United States Patent Application Publication US 2011/0296543 A1 - sequence listing, part 16

SEQ ID NO: 67148 - protein, 283 aa, Unknown
  Obtained from environmental sample
  DOMAIN (190)...(261): Bacterial flagellin C-terminus
  misc_feature (1)..(283): Xaa is any amino acid
MIINHNMSAYFADRQLGVTQEALTKNMEKLSSGLRINRAGDDASGLAVSEKLRSQIRGLQQAERNIQNGVSFIQATEGYLQETQDILHRLRELAVQSANGIYSDEDRMQIPVEVSQLYDESERIASHAQFNGMNVLTGAFAFESPSGRIMQLQVGANMDQNARIYVGNMSADALNLKNAQGDGKISISDPAEANRAIGTVDAALKVVSKQRADLGAYQNRFEIAAQGVAIAAENMQAAESRIRDTNMANKMVDYTRDSILSQSGTAMLAQANLRSQSVLSLLS

SEQ ID NO: 67149 - DNA, 321 bp, Unknown
  Obtained from environmental sample
  misc_feature (1)..(321): n is a, c, g, or t
gtgtgggatttaactctgtctcgccaatgctttttcctgaacaggaaagaacggtcagacagccggcgggttgaacatcaaccggaaaagaaaccaaaacctcaagttcatcactctacaactgcagatctggaaaagatcggtctagcgtttaacagaaggttgcaatttgtggtcgatcacagctctaaccaggtgattatcaaggtaattgataaagagaccgataaagtggttaaggagcttcctcccgaagaattgcagcgtctgcacagtaatctcaaagaggctattggtctgttgtttgatgagatggtttag

SEQ ID NO: 67150 - protein, 106 aa, Unknown
  Obtained from environmental sample
  DOMAIN (7)...(105): FlaG protein
  misc_feature (1)..(106): Xaa is any amino acid
MWDLTLSRQCFFLNRKERSDSRRVEHQPEKKPKPQVHHSTTADLEKIGLAFNRRLQFVVDHSSNQVIIKVIDKETDKVVKELPPEELQRLHSNLKEAIGLLFDEMV

SEQ ID NO: 67151 - DNA, 1824 bp, Unknown
  Obtained from environmental sample
  misc_feature (1)..(1824): n is a, c, g, or t
atgggcagtcttaatatttgttcgcaaaaagggcttgttgaccgttttgattcgtgtatcggagcggcgacggttgtcgctcctttcggcggcaaatactgcgctactccctcacaggtaatggcggcgaaaatacccgtattggacggcgaaacaaaaacctgttcaattatgtcgtggggctttgaccctttaatatccgaggcaagtccgtatcacggagcgattttcgccgtcgttcattcggtggcgaagattatcgccgcaggcggaagcagaaaaaagtgctggcttacgtttcaggaatattttgaaagacttcgtgacgacccgttccgttggggaaaacccgcttccgcgttgttaggcgctcttaacgctcaaatcggtcttggaacagccgctatcggcggcaaagattcaatgtcaggcagtttttctcttgtaaatggcggtcaactcgatgttccccctactctggtctctttcgccgtttcaaccgcaaaattggaaaatatcatcactcccgaattcaaaaaagcggacagttatgtttatttgttaaaaccgcctttttccgtttacgaaaaaattgatttcgccgtgttatgcgaatattttgacggcgttgaaaaaattgccgccgagggaaaaattctttcctgttgggccggcggcagcggcggaactgcggaagcggttgtaaaaatgtgcatgggcaacaaaataggctttacggcggaaaacgaactttttacgggagagggtttttgcggatttatcgttgaaacaaactcgccgttacagttaaaagacgctgttttaattggacgcacaacaggcgactatactctgaaaacaaaaacatataacattcccattgatacattacaagaagaatgggaaaaaactcttgagcctgtttatccgtatcttattaaacaagaaggaaaacttgaaaatttttcgtggaaacgggaaaatacggaaaaaaacaggaaaaaaagcggattaaattcgttctcgaaaccgatttttgttattcctgtttttcccggaaccaacagcgaatacgacagcgcaagggcggttgaaaaagcgggggggaaagcggaaatatttgttatacgcaacctgactcccgccgccgtcgctcaaagcgttaaagagtttgaaaaagcggtgcgtaaatcgcaggtaatatttattccgggaggtttttcaggcggcgatgagcctgacggatcgggaaaatttatcacggcgtttatgcgtaacagcgcgataaaagacgctgttacagaccttttgaaaaaccgcgacgggcttatctgcggaatatgcaacgggtttcaggcgcttataaaactgggtcttgtcccttacggcgaaatccgtgatatgacggaggactcccccactcttacattcaacacaatcggcaggcatcaatctactctgcctattacaaaagttgtctccaacaaatcgccgtggctttcctgctttgaacagggagaacaatttatagtgccgatttcgcacggcgaaggacgctttatcgcccaagagagccttatccgctctttagccgccaatggtcaaatagcgactcaatattcagattacgacggcaacgcctcacaggatatacgttttaaccccaacaattccgacttcgccgttgagggaattacatcacccgacggcagggtcttcggacgcatggcgcataacgagcggctggacgacggtatttacaggaatataccggggattaggagaatggatatatttgcgggggcggtgaagtattttaggtaa

SEQ ID NO: 67152 - protein, 607 aa, Unknown
  Obtained from environmental sample
  misc_feature (1)..(607): Xaa is any amino acid
MGSLNICSQKGLVDRFDSCIGAATVVAPFGGKYCATPSQVMAAKIPVLDGETKTCSIMSWGFDPLISEASPYHGAIFAVVHSVAKIIAAGGSRKKCWLTFQEYFERLRDDPFRWGKPASALLGALNAQIGLGTAAIGGKDSMSGSFSLVNGGQLDVPPTLVSFAVSTAKLENIITPEFKKADSYVYLLKPPFSVYEKIDFAVLCEYFDGVEKIAAEGKILSCWAGGSGGTAEAVVKMCMGNKIGFTAENELFTGEGFCGFIVETNSPLQLKDAVLIGRTTGDYTLKTKTYNIPIDTLQEEWEKTLEPVYPYLIKQEGKLENFSWKRENTEKNRKKSGLNSFSKPIFVIPVFPGTNSEYDSARAVEKAGGKAEIFVIRNLTPAAVAQSVKEFEKAVRKSQVIFIPGGFSGGDEPDGSGKFITAFMRNSAIKDAVTDLLKNRDGLICGICNGFQALIKLGLVPYGEIRDMTEDSPTLTFNTIGRHQSTLPITKVVSNKSPWLSCFEQGEQFIVPISHGEGRFIAQESLIRSLAANGQIATQYSDYDGNASQDIRFNPNNSDFAVEGITSPDGRVFGRMAHNERLDDGIYRNIPGIRRMDIFAGAVKYFR

SEQ ID NO: 67153 - DNA, 1653 bp, Unknown
  Obtained from environmental sample
  misc_feature (1)..(1653): n is a, c, g, or t
ttgaatgagaaaaatcgtgttttcgcctctgagtatcttcccggacagtttgatcaaagagccgattcatgcgctcaatgtatttctctcgccacggggaaagaaagacccgttattcagtcggcgaaaatatatgtaataaccggagatatttcagataacgattttaccagaataaaagcatggcttataaatcctgtggaaagccgagaagcatctttacaaaagcccgaaacattaaaacaaaatttacaagcaccgtcagatgtcggtaatattgacgggtttatttcttccaatgatacggaacttgaagagcttcttaaaaaaatgaacctcgctatggatttacaggatataattttctgccgcaattatttccgtgataccgaaaaaagaaatcctacggtaacggagataagagttcttgacacatattggtcggatcattgccgtcacacgacatttttaacggaacttgacgagatacaaattgacgataaagacattcttgaaatttataaaaattatcttgaattgcgtaaatcctgcggaagggacggcaagcccgttacgctgatggacatggcgacaatcgggacaaaggcgttaaagcaaaaagggcttctgcccgatttggacgaatccgaagaaataaacgcttgttccgtgaaaataaaagttgacgttgacggcaaagaaaaagactggcttttaatgtttaagaatgaaacgcataaccacccgaccgaaattgaacctttcggaggagcggctacttgtcttggcggagcgatccgtgatccgctttcgggacgggcttttgtttatcaagctatgcgtataacgggagcggctaatccgcttgccaacgcaagcgaaacgattgaaggcagactgccccagcgaaaaatttgccgcactgcggcggcgggttacagttcttacggtaatcaaatagggttggcgacaggtcatgttcatgaaatataccacccgggttacgccgccaaacgcatggaactaggagcggttataggagccgcgccttcggagaatgttgtgcgtattactccgtctccttcggacgttgtaattcttttaggcggcagaacgggacgcgatggtatcggcggcgctacaggttcttccaaatcgcacacatcgtcctcgcttgaaacttgcggcgctgacgtgcaaaaaggcaatgcgcctgaagagcggaaaatacagcggcttttccgtgatccaaaagcagcccgtctgattaaacgctgtaatgatttcggcgcgggaggggtaagcgtctccgtcggcgaaatagcggacgggcttgttatcgacttaaacaaaatattaaaaaaatacgaagggctggacggaacggaactcgccataagcgagagtcaggaaagaatgtctgtcgttacttcaaaaaaagacgccgataaatttatcgctcttgctgaaaatgaaaatcttgaaacttcgataattgcggaagttacaaaaacccctcgccttgttatgaagtggaacggaaaaacaattgttgatgtttccagagaatttttgaattccaacggtgcgaaaaaaagcgcaaaggttcatataaaaaatattcagataacaaagacggaaaacaaaccgtaa

SEQ ID NO: 67154 - protein, 550 aa, Unknown
  Obtained from environmental sample
  DOMAIN (188)...(350): AIR synthase related protein, N-terminal domain
  misc_feature (1)..(550): Xaa is any amino acid
MNEKNRVFASEYLPGQFDQRADSCAQCISLATGKERPVIQSAKIYVITGDISDNDFTRIKAWLINPVESREASLQKPETLKQNLQAPSDVGNIDGFISSNDTELEELLKKMNLAMDLQDIIFCRNYFRDTEKRNPTVTEIRVLDTYWSDHCRHTTFLTELDEIQIDDKDILEIYKNYLELRKSCGRDGKPVTLMDMATIGTKALKQKGLLPDLDESEEINACSVKIKVDVDGKEKDWLLMFKNETHNHPTEIEPFGGAATCLGGAIRDPLSGRAFVYQAMRITGAANPLANASETIEGRLPQRKICRTAAAGYSSYGNQIGLATGHVHEIYHPGYAAKRMELGAVIGAAPSENVVRITPSPSDVVILLGGRTGRDGIGGATGSSKSHTSSSLETCGADVQKGNAPEERKIQRLFRDPKAARLIKRCNDFGAGGVSVSVGEIADGLVIDLNKILKKYEGLDGTELAISESQERMSVVTSKKDADKFIALAENENLETSIIAEVTKTPRLVMKWNGKTIVDVSREFLNSNGAKKSAKVHIKNIQITKTENKP

SEQ ID NO: 67155 - DNA, 2463 bp, Unknown
  Obtained from environmental sample
  misc_feature (1)..(2463): n is a, c, g, or t
atgcccgcaaaggccgtgactgtgattgcggtatttgaagggaaaaacgtggtggtgccgcccaccacatactcggtaacggtttggggaggcgcaggctcttccggcgacggcgattacgaggcgggagagacggttaccatatcggcggggacggcgccggctgatagtctgttcaagaaatggacggcctcattgggcagcggtgttgcttttgccaacgcggacagcgcgacgactacgtttataatgcccgcaaaggatgtaacggtaacggcgacgtttgaatcgattatagcagcgcccaagacatacgcggtgacagtatcaagcgccggtaccggagcgggcggcagcggcaattacgcggcgggcgatacagttaccgtatcggcggggacggcgcccgacggtcagcagttcaaaaactggacgggcaacggcgtaactttcgccaaccctaacagcgcgactactaagtttgtaatgcccgcaaaggacgtgacggtgattgcggtatttgcggggatatccggtcccgtaacgtaccgggtaacggtttcaagcgccggtataggctcttccggcaccggcgattacgcggccggcgatacggttaaaatatcgacgggaatagagccggagggccagcggtttaaaacttggacgtcgccttcgggtagcggcgtggtttttgcccatccggatagcgcgacgaccacgtttatcatgccggcaaaggccgtgacggtaacggcggtgtttgaaccgaaggttgcgatgtacaaagtgacggtttcaagcgtcggtaacgacccttccgccaccgccaattacgcggcgggcgcggaggtcgccataaaggcgggaacgccgccggacggtaagcagttcaaaaactggacgtcaagcgacggtgtgatttttgccagcgcaagcaactcgaatacgacgtttattatgccggcaaaagaagtaacggtgacggcgaattttgaatctaaggaaataacgtacaaggtgacgatttcaagctccgccgccggtgcaagcccttccggcgccggaaattacgcggccggcgcgacggtttccgtatcggcggggacggtgccggccggtcagcggttcaaaaactggacgtcgccatcgggcagcggcgtgacttttgccaacgcgagtagcgcggcgacaacgtttgagatgcccgcgaaggacgtgacggtaacggcgaattttgagacgctgtacgtgttgacggttacgggcgggagcggcgggggcagttacgcggcgaatgagatggctgccataactgcggggacggcgccggctggtaaggagttcaaaaactggacgtcaacaaacaacgaagggacgtttaccagcgctaatagctcgaccacgacttttaggatgccggcaaaagccataacggtaacggcgaattttgaaacgatagtggtgaaatacgaggtcatggtttacagtagcggtaaaaacaattccggcgccggcaattacgcggcgggcgatacggtcagtataaaggcggggacggcgccgaacggtcagcggttcaaaaattggacatctgccgacggtgtggtttttgcccacgcggacagcgcgaatacgacgtttaagatgccggcaaaggccgtagaggtaacggcggtgtttgaggcgacgttgtacgtgttgacggttgtgggcgggaccggcggcggtagttacgcggctaatgagacggttaacataagggcgggagcggcgccgaccggtaaggagttcacaaactggacgtcaacaaacaacgaaggggtgtttaccaacgcgaatagcacgattacgacatttaagatgccggcaaaggccgtaacggtaacggcgaattatgagtttgtcgtcacagattccagagacgggaataaatacaagacgacgatgataggcggcaaggtgtggatggcggagaatatgaactatgaaacagagaattcgtggtgttatggtaatctccccgataattgtgaaaaatacggcaggctctatgattgggcaacggcatcgacggtttgccccgtcgggtggcatttgccgtctcgtggtgagtggggggatttggctaaaacagccggcggcaccggtcctttcggtgaagagggcgtagcaggtaagaaacttaaagctaagagcgattggagcgaagccgcgggtacggatgattttggtttttcggccctgcccggcgggtacggaatcagcagtaccggcttcttcgagattggaaaccgtagccattggtggacgtcaacggagtcagagagtgagccggataaagcctattaccggcgagctgacgcctacaatattgaaagcgatgaagtctattccgacaggttgggtgagatggctaattacaagattcgcgaattctctgtacgttgcattggagactag

SEQ ID NO: 67156 - protein, 820 aa, Unknown
  Obtained from environmental sample
  misc_feature (1)..(820): Xaa is any amino acid
MPAKAVTVIAVFEGKNVVVPPTTYSVTVWGGAGSSGDGDYEAGETVTISAGTAPADSLFKKWTASLGSGVAFANADSATTTFIMPAKDVTVTATFESIIAAPKTYAVTVSSAGTGAGGSGNYAAGDTVTVSAGTAPDGQQFKNWTGNGVTFANPNSATTKFVMPAKDVTVIAVFAGISGPVTYRVTVSSAGIGSSGTGDYAAGDTVKISTGIEPEGQRFKTWTSPSGSGVVFAHPDSATTTFIMPAKAVTVTAVFEPKVAMYKVTVSSVGNDPSATANYAAGAEVAIKAGTPPDGKQFKNWTSSDGVIFASASNSNTTFIMPAKEVTVTANFESKEITYKVTISSSAAGASPSGAGNYAAGATVSVSAGTVPAGQRFKNWTSPSGSGVTFANASSAATTFEMPAKDVTVTANFETLYVLTVTGGSGGGSYAANEMAAITAGTAPAGKEFKNWTSTNNEGTFTSANSSTTTFRMPAKAITVTANFETIVVKYEVMVYSSGKNNSGAGNYAAGDTVSIKAGTAPNGQRFKNWTSADGVVFAHADSANTTFKMPAKAVEVTAVFEATLYVLTVVGGTGGGSYAANETVNIRAGAAPTGKEFTNWTSTNNEGVFTNANSTITTFKMPAKAVTVTANYEFVVTDSRDGNKYKTTMIGGKVWMAENMNYETENSWCYGNLPDNCEKYGRLYDWATASTVCPVGWHLPSRGEWGDLAKTAGGTGPFGEEGVAGKKLKAKSDWSEAAGTDDFGFSALPGGYGISSTGFFEIGNRSHWWTSTESESEPDKAYYRRADAYNIESDEVYSDRLGEMANYKIREFSVRCIGD

SEQ ID NO: 67157 - DNA, 873 bp, Unknown
  Obtained from environmental sample
  misc_feature (1)..(873): n is a, c, g, or t
atgccggacacctttctattaggctacgagtccatcatggcacacgggcgcgctatgatcgaggagtatctaaacgacccgcagcgccgcctctccatagatatcgccgaaccgacgggcaacgtgagcgacgcgtacaaagaaaaattcgacaatcttacgctcataggcataatcccggcggccttagcggattctattaacccgtgcgcaatcgcgaccctcatcttcttgctctcgtttttgaccacgcaaaagcgaaaacgcatcgaaatactaatgatcggactgatatacaccgcgacggtatttgtaacctatacgctcttgggcgctggcgctttcgtggcgattacctcgctcggcaaggtctacaaattagggcacgagataataaaatgggcggcggtggctttcgcggcgctcgtcggcatactgagtttgctggacgccctccgctttaagaaaaccggcgacgccaaagaaatcaaactgcagctgccgaagtcggtaaaattgcgaattcacaaaataatcacggacaatatgaaaggttcgcggctgataatcgggacgattataaccggttttttggttacgcttttagaagcggcctgcaccggacaagtatatctgccggtgatagtggggatgacccgtcatggaacgggcgagttaaaattgataggatggctgctcctcgcgctgtataatttcatatttgtactaccgttattcgcggtaatggttgcggcctattacgggctgaagtggacggatttgtccaagatgatgcagaagcacatgacgctggtgaaggtagtgatgggggttgttatgatcgggctggcgctttatttggcgcttgcttga

SEQ ID NO: 67158 - protein, 290 aa, Unknown
  Obtained from environmental sample
  DOMAIN (58)...(289): Cytochrome C biogenesis protein transmembrane region
  misc_feature (1)..(290): Xaa is any amino acid
MPDTFLLGYESIMAHGRAMIEEYLNDPQRRLSIDIAEPTGNVSDAYKEKFDNLTLIGIIPAALADSINPCAIATLIFLLSFLTTQKRKRIEILMIGLIYTATVFVTYTLLGAGAFVAITSLGKVYKLGHEIIKWAAVAFAALVGILSLLDALRFKKTGDAKEIKLQLPKSVKLRIHKIITDNMKGSRLIIGTIITGFLVTLLEAACTGQVYLPVIVGMTRHGTGELKLIGWLLLALYNFIFVLPLFAVMVAAYYGLKWTDLSKMMQKHMTLVKVVMGVVMIGLALYLALA

SEQ ID NO: 67159 - DNA, 645 bp, Unknown
  Obtained from environmental sample
  misc_feature (1)..(645): n is a, c, g, or t
gtgttgccgctaaaggaactttggggtctttgcgagcaatgcggcgacagcttccaaatacccgattccgccgaagtgtccgccgcccttaaatcggtcgattatgaaaaaatacatataaatgacgccggcgacagcgtatttttcgatttatccgctacccgtgtcgacctcggcggtatcgccaaggggtttgttatcaggtggctccgcgagcttttgaggaataacggcgtaaacgacttcctgatctccgccggcggcgacataatagtatccggccgcaggccggacggcgcccattggcgcgtaggcgtacgccacccccgccgtcccgacgaactggtcgccgctatccccgtggcctccggcgccgtgttcacgagcggcgactacgagcgcttcagggaggcggacgacggccgccgctaccaccacatcttcgacccgtcaacaggcttcccttgcggcaagaaccagagtttgaccataagggcccccgacccggtaagggccgacatcctatccacggggctgttttgccggaagccggaagagatcctgtctttcgtagaaaatcggtctgacttagagtgtctggcggttgattccgcgggaaagatctttaaatcgtggggatggtaa

SEQ ID NO: 67160 - protein, 214 aa, Unknown
  Obtained from environmental sample
  DOMAIN (2)...(207): ApbE family
  misc_feature (1)..(214): Xaa is any amino acid
MLPLKELWGLCEQCGDSFQIPDSAEVSAALKSVDYEKIHINDAGDSVFFDLSATRVDLGGIAKGFVIRWLRELLRNNGVNDFLISAGGDIIVSGRRPDGAHWRVGVRHPRRPDELVAAIPVASGAVFTSGDYERFREADDGRRYHHIFDPSTGFPCGKNQSLTIRAPDPVRADILSTGLFCRKPEEILSFVENRSDLECLAVDSAGKIFKSWGW

SEQ ID NO: 67161 - DNA, 774 bp, Unknown
  Obtained from environmental sample
  misc_feature (1)..(774): n is a, c, g, or t
atgcgcctaaggtctattgtaacaatttgcggtatgctaacacttgcaatcggcggctacggctgtggcggcggcggtggaggcggcagtctcaaggaggtcgttgaggaaaactacccgagcggggctaaaaagaaagtgagttactacgggagcggcaacagccttgcgcgtacgacctttttctttgacgacggcaaggtgcagtccgaccagttcttcaagaacggccagcccgacagcacgaggattatctacaacaaggacgggggcaccgtaaagctctccaccttcgcgaacggcaagccgcacgggccggagaaggagtggtatccgaacggcaacctcaagagcgaggccgcgtatgccgacggcataccggtcggtgtcatcaagtcctactatgaggacggcacggtagggtcggaggttagttataaagacggcaagaaagacggcgaggagatcatatactatcaggacggcaagaagaagcgcgtgaggacatacgttgcgggcgaccaagaggggccggaggtcgagtacttcgagaacggcgccatcaagagcgagcagacgtactccaagaacgcgctcaacggcccgttcaagacgtaccataaggatgctaagggtcagggaaaggttgaggagagcggcgcctacgtcaacggcaagtacgagggcgagaggttccaattcgacaaaaacggaaagaagatgtcccgagcggtatacaagaacggggttatggaatttggggagaagttttaa

SEQ ID NO: 67162 - protein, 257 aa, Unknown
  Obtained from environmental sample
  SIGNAL (1)...(23)
  misc_feature (1)..(257): Xaa is any amino acid
MRLRSIVTICGMLTLAIGGYGCGGGGGGGSLKEVVEENYPSGAKKKVSYYGSGNSLARTTFFFDDGKVQSDQFFKNGQPDSTRIIYNKDGGTVKLSTFANGKPHGPEKEWYPNGNLKSEAAYADGIPVGVIKSYYEDGTVGSEVSYKDGKKDGEEIIYYQDGKKKRVRTYVAGDQEGPEVEYFENGAIKSEQTYSKNALNGPFKTYHKDAKGQGKVEESGAYVNGKYEGERFQFDKNGKKMSRAVYKNGVMEFGEKF

SEQ ID NO: 67163 - DNA, 417 bp, Unknown
  Obtained from environmental sample
  misc_feature (1)..(417): n is a, c, g, or t
atgaagtcgtaccgcaaggagttgacgttcaacacatcccaccggcgcgactacataaacataacgccgcaggtgacagacgcgttgcgcgagagcggcatccgcgaggggctatgcctcgtaaacgcgatgcacattaccgccagcgtctacatcaacgacgatgaacgggggttgatcaaagacttcgacgattggcttgaggggctggccccccacgagcccgtcgaccgctaccgccacaacggctccgaggacaacggcgacgcccacattaaacgccaagtcatggggcgcgatgtcgtggtcgcggtgacgggcggaaaattggatttcggcccctgggagcagatattctacggggagttcgacggccggcgggcaaagcgggtgctgattaagatcatcggcgattag

SEQ ID NO: 67164 - protein, 138 aa, Unknown
  Obtained from environmental sample
  DOMAIN (18)...(136): Uncharacterised protein family UPF0047
  misc_feature (1)..(138): Xaa is any amino acid
MKSYRKELTFNTSHRRDYINITPQVTDALRESGIREGLCLVNAMHITASVYINDDERGLIKDFDDWLEGLAPHEPVDRYRHNGSEDNGDAHIKRQVMGRDVVVAVTGGKLDFGPWEQIFYGEFDGRRAKRVLIKIIGD

SEQ ID NO: 67165 - DNA, 354 bp, Unknown
  Obtained from environmental sample
  misc_feature (1)..(354): n is a, c, g, or t
ttgcgggtgggagacaaggtactgcttgttgatgatatttttgattcgggcagaacaattaaccatctggcgcagattattttagacaagggaattcccagaaacgatttaaaaattgcggttcatgattataaatatttttatgacaaaccggagcagtacccgattcaaccagattactggtgtcgaaggcacgatgtgtcaattaacgatgatacctactggattcattatatgagccacgaacttatgggattaacggaaaaagaactggaagaaaattattactctcatgatccaagtttaaaagacgctttgcatataattacggaaaaaaatgatctgcggaattga

SEQ ID NO: 67166 - protein, 117 aa, Unknown
  Obtained from environmental sample
  misc_feature (1)..(117): Xaa is any amino acid
MRVGDKVLLVDDIFDSGRTINHLAQIILDKGIPRNDLKIAVHDYKYFYDKPEQYPIQPDYWCRRHDVSINDDTYWIHYMSHELMGLTEKELEENYYSHDPSLKDALHIITEKNDLRN

SEQ ID NO: 67167 - DNA, 573 bp, Unknown
  Obtained from environmental sample
  misc_feature (1)..(573): n is a, c, g, or t
atgatctgcggaattgatgaagcaggccgcgggccgcttgcggggccggtctatgccgccgctgtcatacttggcgaagattttccgcgcaaacagcgcgatttactgaacgattccaaaaaactttcccatgtcaaacgggaagaactcaggcggcaaatatgcgaaggcgcgcttgcctggggtgtgggatgggcaagccatacagagatcgacaacatcaatattttacaggcaagccttttagcgatgaagcgcgcctttgaggaaatgtgtaaaaaactttcctctcccccgcctgcggacttatctgttattatagacggtctccatgttccaaaaatcagcgccgtatgtacaccaatggtaaaagcggacgcaaaagtccacgaagtaatggcggcctctatcctagcaaaaaccgcgcgcgattcttacatggacgaaatggccctgctctatccgcaatacggttacgcgcaacacaagggctatcccacaaaagcgcatcgcgaggcggtaaaaaaatacggcccttcgccgattcagcgcatgagttttaaagttaggtga

SEQ ID NO: 67168 - protein, 190 aa, Unknown
  Obtained from environmental sample
  DOMAIN (3)...(190): Ribonuclease HII
  misc_feature (1)..(190): Xaa is any amino acid
MICGIDEAGRGPLAGPVYAAAVILGEDFPRKQRDLLNDSKKLSHVKREELRRQICEGALAWGVGWASHTEIDNINILQASLLAMKRAFEEMCKKLSSPPPADLSVIIDGLHVPKISAVCTPMVKADAKVHEVMAASILAKTARDSYMDEMALLYPQYGYAQHKGYPTKAHREAVKKYGPSPIQRMSFKVR

SEQ ID NO: 67169 - DNA, 537 bp, Unknown
  Obtained from environmental sample
  misc_feature (1)..(537): n is a, c, g, or t
atgggcgtaagaggagaacttttttcaacaaggataatattacccaataggacatatttctttaatgttaaagaaaatcgcatgggcgatctctatctaaatatcgtggaaagtaaaaacaaggagacaggcggttttgatcgccaatctgtgattcttttcgccgatgatttacaacaatttttaaaaggttttgacgaatcattaaaagttatggaaaaagcggtgcgggaaaaacgccatggagcgcccggcggccgggaagaaaaaacctaccatagagaaaagcctaaccacgaagaaaaaccttatcgcagggaaaagcctgaccatgatgaaagagaacacaggaattttaacggagataaaaaaggacggcctgatcgcgacaggaacaggcagcattcgtccggtaataaattttcgaaaaattttaaatctgaccgaagtcatgatcacaaaccggaaggcggcaggtttgaaggcagacgcgatagcggaaagcgggttgtggtaagaaagcgcgataaaagatag

SEQ ID NO: 67170 - protein, 178 aa, Unknown
  Obtained from environmental sample
  misc_feature (1)..(178): Xaa is any amino acid
MGVRGELFSTRIILPNRTYFFNVKENRMGDLYLNIVESKNKETGGFDRQSVILFADDLQQFLKGFDESLKVMEKAVREKRHGAPGGREEKTYHREKPNHEEKPYRREKPDHDEREHRNFNGDKKGRPDRDRNRQHSSGNKFSKNFKSDRSHDHKPEGGRFEGRRDSGKRVVVRKRDKR

SEQ ID NO: 67171 - DNA, 1806 bp, Unknown
  Obtained from environmental sample
  misc_feature (1)..(1806): n is a, c, g, or t
atgacaaaagacgaagtgaattgcgcccttgataagatgattctttccgccagcggatggcgcggaatttttgcggcggacagtgcgggaactcccgatgaagaaaataaaacggtagaaattaccgctattcataaaattattacaggagcggcggcgtttattttttccgaatatttacagagatcaaaaaaaaatccattggttctgtttggtacggatacccgtcctaccggcaaggcaattacggaaacgatgattcctgttttacttgcctcaggctgcaatgtgcgtttttcaggatttaccgccgcgccggaaattatggcatgggcgcgcagcgcggcaaacgccgccggatttatctatatatcggcaagccacaacccggttgggcataacggcataaagttcggccttacggacggcggagtgctggcggttgaagaggcaaataaactcattgccgattttcgcttattttttaaaaaagacgattgtattcaaaaaatagaaaatatgatttcagccgccgatcccgcgtccctaaaaaacgtgtacgacggcgaggctgcggcaaaagccgaagcgcgcaaggcgtactatgacttttgcggcgttgttgcgtgggacggtaataccgaaattttatccgtattaaaagctgaccttgcaaagcgtccgcttggcgtggtttgcgattttaacggctctgctaggacagtatccgtagacagggatttctttttcgcgcttgggttaaaatttaattttattaacggagggccgggtgaaattgtccaccgtatagtgccggagggcgaatcacttgatccctgcaaggcgctgcttgaaaaagcccacgccgacgactcttcatttatactgggctatatgcctgactgcgacggcgacaggggaaatcttgttatttgggacgatgccgcaggcattgtacgcgcgcttgaagctcaggaagtttttgcccttgcctgcgtcgcggaacttgctcatcttgtcaggacggggacagagctttccaaagccgccgtagcggttaatgatcctacttctatgcggatagacaggatagccgaagcgtttggagtttctgttttccgcgccgaagtcggcgaggcaaatgtagtgggtcttgcccgcagattgcgcgaacagggatataccgtgcgtattttaggcgaaggttcggcgggagggaatataacgcacccgtccgcagtccgcgatccgattaacacggttcttgccattgtcaagttatttgctgttcgctcgagcgccggcaaagacggtctttttgaaatttggcttaaatgttcagggcaggcggaaaaataccgcgaagattttactcttgcggatataatcgcaagtcttccgccgtttgtcagcactcccgcatattcgtccgccgcggtattgcgtattaatacaaatgatcatactctgttaaaagaccgttatcagaaagtttttttacgcgagtgggaaaacaggaaagatgaattaagttcgcgttttggttttcgtgcatgggaggccagagcttataacggattggaagaaaggcgcggcataagccgttttggagaagcgggcaggggagggcttaaaatactcttttataacggtgaaaacagggaaagcgcctatatttggatgaggggttccgccacagaaccggttttccgtataatggcggatgtcgccggaaatgacgcaaacgttgagcggttcttgcttgattggcaaagaaagatgatactggagtcagataaggagtaa

SEQ ID NO: 67172 - protein, 601 aa, Unknown
  Obtained from environmental sample
  DOMAIN (12)...(164): Phosphoglucomutase/phosphomannomutase, alpha/beta/alpha domain I
  misc_feature (1)..(601): Xaa is any amino acid
MTKDEVNCALDKMILSASGWRGIFAADSAGTPDEENKTVEITAIHKIITGAAAFIFSEYLQRSKKNPLVLFGTDTRPTGKAITETMIPVLLASGCNVRFSGFTAAPEIMAWARSAANAAGFIYISASHNPVGHNGIKFGLTDGGVLAVEEANKLIADFRLFFKKDDCIQKIENMISAADPASLKNVYDGEAAAKAEARKAYYDFCGVVAWDGNTEILSVLKADLAKRPLGVVCDFNGSARTVSVDRDFFFALGLKFNFINGGPGEIVHRIVPEGESLDPCKALLEKAHADDSSFILGYMPDCDGDRGNLVIWDDAAGIVRALEAQEVFALACVAELAHLVRTGTELSKAAVAVNDPTSMRIDRIAEAFGVSVFRAEVGEANVVGLARRLREQGYTVRILGEGSAGGNITHPSAVRDPINTVLAIVKLFAVRSSAGKDGLFEIWLKCSGQAEKYREDFTLADIIASLPPFVSTPAYSSAAVLRINTNDHTLLKDRYQKVFLREWENRKDELSSRFGFRAWEARAYNGLEERRGISRFGEAGRGGLKILFYNGENRESAYIWMRGSATEPVFRIMADVAGNDANVERFLLDWQRKMILESDKE

SEQ ID NO: 67173 - DNA, 462 bp, Unknown
  Obtained from environmental sample
  misc_feature (1)..(462): n is a, c, g, or t
atgctgatgctccttaaaattgataatgacgttatcaccgacgtgcgctggagaacctacggttgcgccagcgccatcgcgtcaacaagcatgctgtcggaagtgataaagggcatgaaaattgaggacgcctacaaagtaaggccggaagaccttgttgaaaaactgggcggtctgccctcgtataagatacactgttccgtgttaggcgacaaagccctccgcgccgccattgacgactacctcgctaaaaccggcaggccgggaatgttacaggaagctgttaccgagatttgccattgcctgggcatcaccgacaaggacatagaaaacgctttccaaaacggcgctcgcaaatgggaagatctgcagcaggccaccaagatcggcactgtctgcggaagctgcaaggaaagagctctggaactgcttcacggcctggaacacatctatgggatgtaa

SEQ ID NO: 67174 - protein, 153 aa, Unknown
  Obtained from environmental sample
  DOMAIN (96)...(148): BFD-like [2Fe-2S] binding domain
  misc_feature (1)..(153): Xaa is any amino acid
MLMLLKIDNDVITDVRWRTYGCASAIASTSMLSEVIKGMKIEDAYKVRPEDLVEKLGGLPSYKIHCSVLGDKALRAAIDDYLAKTGRPGMLQEAVTEICHCLGITDKDIENAFQNGARKWEDLQQATKIGTVCGSCKERALELLHGLEHIYGM

SEQ ID NO: 67175 - DNA, 1161 bp, Unknown
  Obtained from environmental sample
  misc_feature (1)..(1161): n is a, c, g, or t
atgaaacccaatgacggacgcggctttatcccttcctatgcgctggcctttactgtcttcgccgttattacgccgtatctttcaatcatggtgcggggtttgggatacagtcctctttgggtaggggtactgcttggcatctttgaaggttcagccatagccggcccctttttattcggctattgggcggacaaaagcggcaatttccgttttccgataattgtttcctgcatactcccggctctcaccgcaattcccattgtacgctggattcaccccgttatcagcgctattctgcttgccgctctggcgttcggcttccgttccacatcttcattgctggacgcgataactaccgtcagaatcgggaagagcggcaactacggaaagatacggacattcggctcgcttagctttatcgtttttgtgctttttcttcagtggactccgttccttaaacccgacaacgccaaaaatatcgctttctggatagttataacttcgctttccgttataatatacctgttctttctcccgcgcgcagcgtttgactctgttgaacacgaacatgaaaaaaccgatgacacggaaaaagggataccgcttctttctgtttattttatcggaggctttgcgattatttttctgtgccgttttgcaatgtcatcggtctacacgttttttcccctgtacctgaccgagactctgaactgggacgcggtcgggctgatgttcgccctgtcttcggcgtctgaagttccatttatgtatatatccgtaatgctaatccgccgtttcggggcgcttccgcttctcgctatgtcagcggggggaatcgccctgcggcttttgctgtgggcgcttttcccttacaggcccgtcgtcatcgcggcgcagcttctccattctctgtgttatggagtctatcatccggcggcagtgcagtttatatcatcggtctttcccgcaaaaagacgcggtataggaatgcccgtatacctcgcccttggatccggactccctgcgctcctcggcaacatggcgggaggcgtaatagtggagtcaataggcttccgcccgttatttgccatttacgccggtatcgccgcgctgggcgtgttgattttcggcgttatgggcgcaaatagggcacgattataa

SEQ ID NO: 67176 - protein, 386 aa, Unknown
  Obtained from environmental sample
  DOMAIN (12)...(385): Nucleoside H+ symporter
  misc_feature (1)..(386): Xaa is any amino acid
MKPNDGRGFIPSYALAFTVFAVITPYLSIMVRGLGYSPLWVGVLLGIFEGSAIAGPFLFGYWADKSGNFRFPIIVSCILPALTAIPIVRWIHPVISAILLAALAFGFRSTSSLLDAITTVRIGKSGNYGKIRTFGSLSFIVFVLFLQWTPFLKPDNAKNIAFWIVITSLSVIIYLFFLPRAAFDSVEHEHEKTDDTEKGIPLLSVYFIGGFAIIFLCRFAMSSVYTFFPLYLTETLNWDAVGLMFALSSASEVPFMYISVMLIRRFGALPLLAMSAGGIALRLLLWALFPYRPVVIAAQLLHSLCYGVYHPAAVQFISSVFPAKRRGIGMPVYLALGSGLPALLGNMAGGVIVESIGFRPLFAIYAGIAALGVLIFGVMGANRARL

SEQ ID NO: 67177 - DNA, 429 bp, Unknown
  Obtained from environmental sample
  misc_feature (1)..(429): n is a, c, g, or t
gtgattaacgcaaatgccgcctccgctccgtgcataggttgttttaattgctggtttgaaactcccggtaagtgtaaaataaacgattgcctgcaaaatattggttcattattggggaatggcgaagaaacgattataatcagccagaattgttatggcggatacagtgaacaagtaaaaaagattcttgaccgcagcgttccggcaagtactccgttttttacatatcgctcatggaaaataaggcatataaaaagatatagaactaatcggaaacaactgacggtgattttatatggtgattttcttgaaactgagttgaaggccgctgaattaatggtagatggaaaccggggcaatatgggttttaaaaaagctgacctttacatggtaaatcatgttaatgaaattggtcaggtattgaaatga

SEQ ID NO: 67178 - protein, 142 aa, Unknown
  Obtained from environmental sample
  misc_feature (1)..(142): Xaa is any amino acid
MINANAASAPCIGCFNCWFETPGKCKINDCLQNIGSLLGNGEETIIISQNCYGGYSEQVKKILDRSVPASTPFFTYRSWKIRHIKRYRTNRKQLTVILYGDFLETELKAAELMVDGNRGNMGFKKADLYMVNHVNEIGQVLK

SEQ ID NO: 67179 - DNA, 747 bp, Unknown
  Obtained from environmental sample
  misc_feature (1)..(747): n is a, c, g, or t
atgaatatactgattattaatggcagtccaaagaaaaaagacggcgcttcggcgttcttcgcaaaaattttacgctgtatgctttttccacacaaaattttaacaataagccctggtatatccaaagattaccgggaagtattcaataatcttcaaaatgccgattctgttgtaataacggttccgctttatgttgacagtattccctctcatattatacatctcctgaaagagatggaacagtactgtaaaaataatccatgtaaatttatgctttatgtaatttccaacgccggttttgtcggcggacatcataatcaggcgcatttggaacaatatcaatgctggtgtgaaagagccggcattacatggggcggcggattgggtataggcggcggtgtaatgcttcatgtgttatacaaaataacgttgataggagccggtttacaatttactattgaagtaataactaacatcgttaacggaaacccattcataaatantgcgttattattggattttaccaatagtatgattataatgctgtctttttacagcgagatgttattttttgaatttattctttcctgggcaataagaaataagaagagtataaaaaataaatacacaagggtaatgctgccttcgtttatctttattatagtcgcaaatatatttatggcgttaaccggattgcttcatggcaggttggtattttcattatttaaaaaagtgaaatacacataa

SEQ ID NO: 67180 - protein, 248 aa, Unknown
  Obtained from environmental sample
  misc_feature (1)..(248): Xaa is any amino acid
MNILIINGSPKKKDGASAFFAKILRCMLFPHKILTISPGISKDYREVFNNLQNADSVVITVPLYVDSIPSHIIHLLKEMEQYCKNNPCKFMLYVISNAGFVGGHHNQAHLEQYQCWCERAGITWGGGLGIGGGVMLHVLYKITLIGAGLQFTIEVITNIVNGNPFINXALLLDFTNSMIIMLSFYSEMLFFEFILSWAIRNKKSIKNKYTRVMLPSFIFIIVANIFMALTGLLHGRLVFSLFKKVKYT

SEQ ID NO: 67181 - DNA, 363 bp, Unknown
  Obtained from environmental sample
  misc_feature (1)..(363): n is a, c, g, or t
atgatcagatggccgagaattaaccgcgaagtcgtactttctctgcttgaacctacaaaattggagatagactgcgcggaaaacggtgtagaagccgtacgtatgttcagtgaagccccggacaaatacgaattgatttttatggatgtgcagatgcccgaaatggacggctatgaggctacgcggcgtatccggtcactggatgttccgaatgggaaaaccatcccgattgtagccatgaccgcgaatgcattccgtgaagatatagatgaatgcctcgctgccggcatggatgatcatatagggaaaccgattgattttgaaaaagtcatggaaaagctgtgcgtttatttacggaaataa

SEQ ID NO: 67182 - protein, 120 aa, Unknown
  Obtained from environmental sample
  DOMAIN (6)...(115): Response regulator receiver domain
  misc_feature (1)..(120): Xaa is any amino acid
MIRWPRINREVVLSLLEPTKLEIDCAENGVEAVRMFSEAPDKYELIFMDVQMPEMDGYEATRRIRSLDVPNGKTIPIVAMTANAFREDIDECLAAGMDDHIGKPIDFEKVMEKLCVYLRK

SEQ ID NO: 67183 - DNA, 1956 bp, Unknown
  Obtained from environmental sample
  misc_feature (1)..(1956): n is a, c, g, or t
ttgtttcgcttattaagggttcattttttcttttttctttccctgcttgttttttcttgcgcgtcgcaggcaaaaaataattattattatctgggactattggataattctgttcccgaaaaagttaaactgtttgaaaaagctctttccagtcccaatgaatatatcaggaaggcggcggcggaggaacttgctgttttaatgtcgcaggggaaaaccctttcgcgcaaaacaacggaacgcgtccgcaatgaaataaccggtttttgggcggaagcttataaaatcgcggacgcgtttgacaaagagaaagcgcttttatttttatttgaacatgatcaaaattcgccgtcttatgaagaagccagacggtttatcctgaacttatgcaaaaaaaaagatgtatttctttcggattgggaaatagccgctattatggggcatcattctgtttcctgtctgcgttacaatgaagcgctggattattttcgtgtttttaaattggaagacaaatggcccgagcaaattccatatctttttgtttattatcccgtattggtaaatgatttgggcagggcttttcaatatacgcaatcgggcggagaaggacttactcttttttcacaatggctgaccgacaaatctttgccttttgatctgcagtacagacttaatttttacgcgggaagggtcgcgcgcagaatggggaatcagaacgcaaagggtattgctctttttgaacaggcgctgactctcgctccggatgccgatcagattgacgcctgcatttggtatattcttgatttatcaataacaggatcgagcaatactttttttgaaaagctgacgaaatatattcccgactggcacaagggcagttattataacgatgttttagaaagatttttacataaacttgtatcggagcgcgattggaatacagttataagaacgtatgatctgataaaatacacaagcgcgtctgcctctaaaataggttatgcaagagtaatagcccgttcaatagaaaataattatctgtcagccgcggatctgcggcttgccgctaaaacaattgacattgaatcggcgaacgcgcttgccttttacagcgttgcttatgacgtaggcattgttccatctattccttcttttctttaccgctcgcaatgcgctgattttttgaatcaacctttatttgttttaaccgaaagaacggaaccaaaacttgaaaaaaaggaatattctccgtatttgcaatttattatgggtttttttgaaaataaagccgttgattttgtgcttccgcgtattaaagaattggaacataaacttactgtcgatgaattgcgtattgtagcgaaggctcttcatgacgagggttattattccagatgtatggaagttgtcaatatgtatattttcagagtcggttacagcaagaacaagtacgattgggaattattgttcccgcgtccgtatcttgaattggtagaaaagtacgcaaaagaattcgatattgagccttcgctgctttacgggcttattcgctcggaaagcgcgtttagagccgcggtagtttcgcgtgcgggagcggttggattaatgcagttgatgccgtttacagcgaaggatatggcggagcgtataaagcgcgaaggcggacctgatttttttggcgaaaataatgttgttgactctacaaaccctttgcataatgttcatataggcacttattactttaaatatttaaaggactattttgacgacccaattctggcgttgatggcttacaacggcggacaaaataggatacgcagattgcgctccgccaacagcaaactgcccattgatttatttgtggaaactgtcccaattaacgaaactagggattacggcaagagggttccggctgttgcgaagatttatcatgagttgtattacaaggagcagtag

SEQ ID NO: 67184 - protein, 651 aa, Unknown
  Obtained from environmental sample
  SIGNAL (1)...(24)
  DOMAIN (496)...(621): Transglycosylase SLT domain
  misc_feature (1)..(651): Xaa is any amino acid
MFRLLRVHFFFFLSLLVFSCASQAKNNYYYLGLLDNSVPEKVKLFEKALSSPNEYIRKAAAEELAVLMSQGKTLSRKTTERVRNEITGFWAEAYKIADAFDKEKALLFLFEHDQNSPSYEEARRFILNLCKKKDVFLSDWEIAAIMGHHSVSCLRYNEALDYFRVFKLEDKWPEQIPYLFVYYPVLVNDLGRAFQYTQSGGEGLTLFSQWLTDKSLPFDLQYRLNFYAGRVARRMGNQNAKGIALFEQALTLAPDADQIDACIWYILDLSITGSSNTFFEKLTKYIPDWHKGSYYNDVLERFLHKLVSERDWNTVIRTYDLIKYTSASASKIGYARVIARSIENNYLSAADLRLAAKTIDIESANALAFYSVAYDVGIVPSIPSFLYRSQCADFLNQPLFVLTERTEPKLEKKEYSPYLQFIMGFFENKAVDFVLPRIKELEHKLTVDELRIVAKALHDEGYYSRCMEVVNMYIFRVGYSKNKYDWELLFPRPYLELVEKYAKEFDIEPSLLYGLIRSESAFRAAVVSRAGAVGLMQLMPFTAKDMAERIKREGGPDFFGENNVVDSTNPLHNVHIGTYYFKYLKDYFDDPILALMAYNGGQNRIRRLRSANSKLPIDLFVETVPINETRDYGKRVPAVAKIYHELYYKEQ

SEQ ID NO: 67185 - DNA, 930 bp, Unknown
  Obtained from environmental sample
  misc_feature (1)..(930): n is a, c, g, or t
ttgctggaatctgaaaaggctgccccactggaacaaattgataacgaggactttataaggcttgtttcgcaaatccccgccttcgctatggacgaattggggcttaaagaaagccgtaactatacgcgttttgtgaagcttgacagaaactatcttgccgctgttgtctccgcctcggctaaagattcatttcaccgccacgagtggaatttcccggttgtaggacgcatgccttacaagggtttttttaatattgaggacgcgcgcaaagagcgggcaaaactggaaaaaaaagaccttgatgtctggattcgcggggtagacgcttttagcactctgggctggttcaaagaccccatttattcctatatgctggactaccctccctcaagtatggcggatttaattatccacgaacttgttcacgctacggtatttataaagggacaggttaattttaatgaggaattggcggaatttatcggcagcgaaggggcaaggcttttcatagtaaagcggtacggggaagattcggacgaataccggcaaatattttcatccgacaaagacagccaaaattatgtcgcgtttcttcaggaattgatcgcggaacttgatgttctttataaaagcgaagttagcagggaagaaaaactagcggaaaaagagcggataattaacgccgcgaaagagcggttcaacgccgaatacgacaaacgtttttccaacgataaatacagaggttttgcggaactacccgttaacaacgcgtatctggaactttttaggctgtaccacacagaagataatttttacgcggaactttacgaacgttcgggcaagaaccttcccgcttttatcagcgccgccaaaaagatcacaaaaaaaggcaatccccgcattcaacttgaaaacgctctttttcagtga

SEQ ID NO: 67186 - protein, 309 aa, Unknown
  Obtained from environmental sample
  misc_feature (1)..(309): Xaa is any amino acid
MLESEKAAPLEQIDNEDFIRLVSQIPAFAMDELGLKESRNYTRFVKLDRNYLAAVVSASAKDSFHRHEWNFPVVGRMPYKGFFNIEDARKERAKLEKKDLDVWIRGVDAFSTLGWFKDPIYSYMLDYPPSSMADLIIHELVHATVFIKGQVNFNEELAEFIGSEGARLFIVKRYGEDSDEYRQIFSSDKDSQNYVAFLQELIAELDVLYKSEVSREEKLAEKERIINAAKERFNAEYDKRFSNDKYRGFAELPVNNAYLELFRLYHTEDNFYAELYERSGKNLPAFISAAKKITKKGNPRIQLENALFQ

SEQ ID NO: 67187 - DNA, 2985 bp, Unknown
  Obtained from environmental sample
  misc_feature (1)..(2985): n is a, c, g, or t
ttgccagccgcggtcactattcactgcgactggctccgggaaccgaaggggcgggaaccaaaatcggcgaactggacgaggagtttgtctgggaacgccgcttggggatcgtttccattttgcgggcggggctggaggatcaccgctatagaggcggagtccgtgcaggccgcgccgctggaaacgtcgtcagactntatgccgttctggaaagcggacacagcctttcgcagtcccaggcttacagaacgggtgctggcaatccttgatgggtataactcgggtataaccactgccccgccggagattgaggctcttgcatcttttctcgattcccagcgaaatgcccagggcggccttcctttaagcggcagtaatcgcataacggtagaagtcatcgacagccctgaaaatcgcggggatttgtatgcggtggtgatgcacagcttcaggagcggggcggtaaattatccgctcgtgctggccctggcccaggaactggaagaaacgctgaagctcagggtggaatcgttttccaatgacgattcgcttctcctgttaataccccggctgggtatcgaaggaaatataaagcgcatcgaacatatttttcgcaatgccgttacagagcttaacaaaagcggcgggggcggtctttgccggggggagaggctgttcagaaacaggctggaggcgtcaggcgtttttggcgcgagcttccgcgaggccgcggaaaggagcctccttctgcctaaagcgggttttggaaaacgaaccccgctgtggatcacaagacagcgttccaggcggctttttgacgcggtacgcggcgaagagggttttcctgttaccgccgaagcgtggcggagctgcctggtcgatttattcgacatggaaggtttccgcgagttgttaggcgcaattaacgacggcagcgtcgttttgtcttttttttacagcagcatccccagccccttttcgcgcgacatggtgaggcaggaaaccaataccctgatgtatgaatacgatgagcggaaagatatatatggctcaggcgcgacgctttccgacaaggttattcaggaagccctgggcgacgcttccctccgtcctctaataaaaccggaactggccggcagttttagcgcacggcttcgcagggaagagcccggctggacgcctgacgatcagttgtccctgtacgaatgggtcaaagaacgaatcgccatccccctggatgaatgggaaaccctgtgcgagtcattgcctgaaaatctcaaacaggagctttcacaaacaagctctaatgaccggctggtaatggttaagcgtaacggcgccgccattccctcaatggttcaccgggaatgggaagagtcatggcggcttgagcctttgcccctactcggcccctggctgcgttatgaaggcccaatctccctttcgcgcattgccggggtttttggacttagtgtcgcagcggtcgaaatcgccgtaaacgcccttgccgaagttgaggagttagtctgtgacgtgcgtcttgctggagaggtttccccgctcatctgcgacagcagaaaccttgaaatgctgctgcgtctttcccggcgaaaacagcgccctgaaatcagcgaaaggcccgccgcagttttggttccttttcttgctttacggcaaggacttttatcaatgagcaaagagcaaggagcaatgaacaaagggaatactgctttgagcgaggctgctattaaaaagttatatgcctgctgtgcgcctgttaaattgtgggaaactgaattcttcaccgcgcgttgcgctcattacaatccggaaattatcaatcaggagattaacgaaggccgcctggtctggtacggagcgggcaaggaaaagatagggctttgccggcccgatgatctggaactggtaagtatgaataatgttcataaacctaagcaaaagatacattcggaggatgggcttctggcgcagttaatcaacaacggcttttttgaccgtcctcgcgatttctgggaaataaaggatgcgattaacgcgggcgcgcaacagtacatcagcggcaaagactgcgccgaggccctttggcaagaggcatggcagggaaggctgtcatcagactcctttgaaccgcttcgtcgtggcattcaatacggtttcacaattaagaacacggaaactgctgagctcgcagtccagtcaagttccggctctccgcgcatgccccacatcccgcgttctctgcgggatcgctggcggagcggcgctccggtatcgggcagatggttttcgattgttcttaatgatgatgaaaataccgcagagtggtgggatgctccgcttaatgaggaagacagaaaccgggacagggtacgcctgttactggtacgttggggcattctatgccgtccgctactggaaaaaatttccaaaggaagctcagcttccggcgatccatcgccttttagctggtcgggacttttgccgaccatacgccgcatggaactttcaggagagcttgtcgccggccgtttcttcgcgggaatcaattccntgcaattcgccctcccctcaatcgcgcgtgatcttgaaaacgccgaggctgttgacagtatctactggatgaatgccgttgatccggcaagtcccgcagggctcgacattgaaggtttggattcccgcctccccgaccggctgttgtccagccgtatctatttccggggggcgcaactgatcgccgtgtcaaaccggaacaacaaagaactgcatatcttcattgcccccgatgatcccggcatccccgctttgatcgaccttattaaaataccccgtgcaagaaaaatttttccagaaaataaaatagttgttgacactattaacaataaaacagcggggcagagcgaatacgcgcgggggtttcaggactgcgggtttatctctgacagaggcaggctgtgcttttggtga

SEQ ID NO: 67188 - protein, 994 aa, Unknown
  Obtained from environmental sample
  DOMAIN (122)...(327): DEAD/H associated
  misc_feature (1)..(994): Xaa is any amino acid
MPAAVTIHCDWLREPKGREPKSANWTRSLSGNAAWGSFPFCGRGWRITAIEAESVQAAPLETSSDXMPFWKADTAFRSPRLTERVLAILDGYNSGITTAPPEIEALASFLDSQRNAQGGLPLSGSNRITVEVIDSPENRGDLYAVVMHSFRSGAVNYPLVLALAQELEETLKLRVESFSNDDSLLLLIPRLGIEGNIKRIEHIFRNAVTELNKSGGGGLCRGERLFRNRLEASGVFGASFREAAERSLLLPKAGFGKRTPLWITRQRSRRLFDAVRGEEGFPVTAEAWRSCLVDLFDMEGFRELLGAINDGSVVLSFFYSSIPSPFSRDMVRQETNTLMYEYDERKDIYGSGATLSDKVIQEALGDASLRPLIKPELAGSFSARLRREEPGWTPDDQLSLYEWVKERIAIPLDEWETLCESLPENLKQELSQTSSNDRLVMVKRNGAAIPSMVHREWEESWRLEPLPLLGPWLRYEGPISLSRIAGVFGLSVAAVEIAVNALAEVEELVCDVRLAGEVSPLICDSRNLEMLLRLSRRKQRPEISERPAAVLVPFLALRQGLLSMSKEQGAMNKGNTALSEAAIKKLYACCAPVKLWETEFFTARCAHYNPEIINQEINEGRLVWYGAGKEKIGLCRPDDLELVSMNNVHKPKQKIHSEDGLLAQLINNGFFDRPRDFWEIKDAINAGAQQYISGKDCAEALWQEAWQGRLSSDSFEPLRRGIQYGFTIKNTETAELAVQSSSGSPRMPHIPRSLRDRWRSGAPVSGRWFSIVLNDDENTAEWWDAPLNEEDRNRDRVRLLLVRWGILCRPLLEKISKGSSASGDPSPFSWSGLLPTIRRMELSGELVAGRFFAGINSXQFALPSIARDLENAEAVDSIYWMNAVDPASPAGLDIEGLDSRLPDRLLSSRIYFRGAQLIAVSNRNNKELHIFIAPDDPGIPALIDLIKIPRARKIFPENKIVVDTINNKTAGQSEYARGFQDCGFISDRGRLCFW

SEQ ID NO: 67189 - DNA, 912 bp, Unknown
  Obtained from environmental sample
  misc_feature (1)..(912): n is a, c, g, or t
ttgctgaaccaggctgcggaaaatgaagctgggttttccgatcgtcctgtcgcttattgccaccacggttccctctcgaaggaagtacgcagggaggtggaaatggccctcgcttccggggaagtttcctgcgtggttgcaacaggctctctggaactgggaatcgacatcggcaacgttgacgaggtgattctggcgggcagccccatttcagcggcgatagctttgcagagggtgggccgctcgggccacacggtcggtgcggcaagcaagggctggctctttcccttccacggaattgatctgctgcaggcggcggccctctccggcgcagtggaagaaagggagcttgaagaaaccgaaagcatcgaaaatccccttgatctgctctcgcagatcatcctttcattctgcgcagaaaaagatcaaaacgaggatgagctttttcaaacaatacgtggtttttttgtttaccgaaaattgtcaagagaagcctacgacggggttgtacgtatgctttcaggcagctacgaggatacgcggcttagggagcttaagcggcgtttgttccgagatgaggaaacaaagacattgagcgccgcccccggtcttcttccccttttgtatacatccagcggcgttattgccagccgcggtcactattcactgcgactggctccgggaaccgaaggggcgggaaccaaaatcggcgaactggacgaggagtttgtctgggaacgccgcttggggatcgtttccattttgcgggcggggctggaggatcaccgctatagaggcggagtccgtgcaggccgcgccgctggaaacgtcgtcagactntatgccgttctggaaagcggacacagcctttcgcagtcccaggcttacagaacgggtgctggcaatccttga

SEQ ID NO: 67190 - protein, 303 aa, Unknown
  Obtained from environmental sample
  DOMAIN (11)...(86): Helicase conserved C-terminal domain
  misc_feature (1)..(303): Xaa is any amino acid
MLNQAAENEAGFSDRPVAYCHHGSLSKEVRREVEMALASGEVSCVVATGSLELGIDIGNVDEVILAGSPISAAIALQRVGRSGHTVGAASKGWLFPFHGIDLLQAAALSGAVEERELEETESIENPLDLLSQIILSFCAEKDQNEDELFQTIRGFFVYRKLSREAYDGVVRMLSGSYEDTRLRELKRRLFRDEETKTLSAAPGLLPLLYTSSGVIASRGHYSLRLAPGTEGAGTKIGELDEEFVWERRLGIVSILRAGLEDHRYRGGVRAGRAAGNVVRLYAVLESGHSLSQSQAYRTGAGNP

SEQ ID NO: 67191 - DNA, 1464 bp, Unknown
  Obtained from environmental sample
  misc_feature (1)..(1464): n is a, c, g, or t
atggatgatattgcagcgaaattacattcccgatataacccgcaaactgaagcccagcgatatattgacgcccttaaaattgacaaggatattaactgttttatccttatagaacccggtttgggttatatgatccccgtcttgcgaaaaaacaggcctgacggcaaaatcgttgttctccacgcggacgcctgtttcagaacattgacgggtgttattcatggggatgccgaatggttcccggataacgaaaccggagtgcaggaatttctggaagccgaggttcctgttgccgcgcgggtcaggatggtggagtggaggcccggcctgaatgtctttggcggcaaatttctggaacttgtccgtgaaagcacggtatttatcaagcgttccgaggcaagccgaagaaccggcgctttttttgggaaaaaatggctgcgtaattttttccgcaatctggccctttttcagaatacgctgatgtacggaaaaatggatatccccgttgtgattacaggatcgggcccaagtcttgaagccgtgctgccgcggatttccgccgttagagaaagcgtttttatccttgccgcttcttcatcgttacaggctttggcggttggcggtattacgcctgacatggttatcagtacggacggcggcggctgggctctcacgcatctgtactcattttttcgccagccgttgccggcagggcccggaatattggccttgtccctttgcgcggccataccgtcccagtgttcggcggtacctcttcttcctatgaacgacggcagcctctggcagagcatggcgttacacgcaaccggcatcccgtcggtattgattccccagcgcgggacggtgaccgcatccgccctggaactcgcactggaacttagcaatggcaatatattccttgccggcatggatctttcagtatgtgacataagaagccacgcgcggccaaacgggtttgaccacctgttttttggctctgccacgcggttacggcctgtttacacgcagtattttatccgttcgggcggtattaaatcaggcgggagtctggatgtgtacgccgcctggtttaggagccgtctcgcctcatttcccaaacgggttttttcccttggcaacaaccatgaggtctttgacgaacttacgcgggatggcgttgtccaggaaaaatttttaaccacggaggacacggagtttcacggagttttaggagagtattttaagcttgtagatcaggctgatattcccgaaggccgggcaaggcgggccgcagaagcggtaaccgccgcgttaggcgatccactgtacgcccgggcgctgtgcgccgaactatcccccctgctgttcccttcgcaaacagacgttccggcacaggatgtcgccagagcgctgcatgacattgcagagcgatattataatgacgccacaagtgtacggcgttaa

SEQ ID NO: 67192 - protein, 487 aa, Unknown
  Obtained from environmental sample
  DOMAIN (148)...(312): Protein of unknown function DUF115
  misc_feature (1)..(487): Xaa is any amino acid
MDDIAAKLHSRYNPQTEAQRYIDALKIDKDINCFILIEPGLGYMIPVLRKNRPDGKIVVLHADACFRTLTGVIHGDAEWFPDNETGVQEFLEAEVPVAARVRMVEWRPGLNVFGGKFLELVRESTVFIKRSEASRRTGAFFGKKWLRNFFRNLALFQNTLMYGKMDIPVVITGSGPSLEAVLPRISAVRESVFILAASSSLQALAVGGITPDMVISTDGGGWALTHLYSFFRQPLPAGPGILALSLCAAIPSQCSAVPLLPMNDGSLWQSMALHATGIPSVLIPQRGTVTASALELALELSNGNIFLAGMDLSVCDIRSHARPNGFDHLFFGSATRLRPVYTQYFIRSGGIKSGGSLDVYAAWFRSRLASFPKRVFSLGNNHEVFDELTRDGVVQEKFLTTEDTEFHGVLGEYFKLVDQADIPEGRARRAAEAVTAALGDPLYARALCAELSPLLFPSQTDVPAQDVARALHDIAERYYNDATSVRR

SEQ ID NO: 67193 - DNA, 564 bp, Unknown
  Obtained from environmental sample
  misc_feature (1)..(564): n is a, c, g, or t
atgggtacggttgaaacagaggatttccagaaccgctggaaacaaagacctcaggattttaccagggagcgaaaaatgggattcagaaacctcgtatatttcatcctcagcatgataaatgaaagttcccaaaacgccctggaacgtttttttatcaaaatagggaataattctttcatgacccagcaagcattctctcaggcccgccagaaaataaaatggggagccttcagggaattgttcgatttaacagtaaacgctcattatgaggaatacgctgatgagataaaacggtggaacggcttccgtatatttgcggtagacgggagtaagatctcactgccacacgatccgccgttgagggccttttttggaagtagtggagcggggaatacctctcccacggcccaaggatcccttttatacgatatattaaacgatctggccatagacgcccgaatagaaccgatgacaacagacgagagaaccatcgcctatatgcacctcactcaattaacaaggatagaaagtttccagaaagggaaggaattgggtactatttga

SEQ ID NO: 67194 - protein, 187 aa, Unknown
  Obtained from environmental sample
  misc_feature (1)..(187): Xaa is any amino acid
MGTVETEDFQNRWKQRPQDFTRERKMGFRNLVYFILSMINESSQNALERFFIKIGNNSFMTQQAFSQARQKIKWGAFRELFDLTVNAHYEEYADEIKRWNGFRIFAVDGSKISLPHDPPLRAFFGSSGAGNTSPTAQGSLLYDILNDLAIDARIEPMTTDERTIAYMHLTQLTRIESFQKGKELGTI

SEQ ID NO: 67195 - DNA, 612 bp, Unknown
  Obtained from environmental sample
  misc_feature (1)..(612): n is a, c, g, or t
gtgatgagggcgaggaaaaagttttcgaccgcaatagacggactgggctacggggatcataggattaaacttgaacaaggcggggaaaagatgcctgtgagggtgctaaagttccggcttaaaggaggggaggaagaaacgctgataacggacatagaggataagaagctggggataaaagcattcaaggcgctgtatttcaagcggtggccgatagagacgaaatacaatcaaataaagaaccggctggagatagagaacttttcagggaggctagtggacaacatccggcaggatttctacgcgacgatggtattaacgaatttgacgtctgatttcgccggagaagcgcagatagaagtagaggaggagcagagtggtaaagggaaaaaataccgctacaaagtgaacatgaattatgcgataggggtattaaaggatcggctaataataaccttatgtgaagaagatatggaaaagcgcagagaaatgtttgatgaaataacggaaatgctgaagaaaaggataatcccgatacggcctaatcgttctttccccagaaacacaccgcgtaacgtaaagtttcattataaccaaaaatcaaattgttga

SEQ ID NO: 67196 - protein, 203 aa, Unknown
  Obtained from environmental sample
  misc_feature (1)..(203): Xaa is any amino acid
MMRARKKFSTAIDGLGYGDHRIKLEQGGEKMPVRVLKFRLKGGEEETLITDIEDKKLGIKAFKALYFKRWPIETKYNQIKNRLEIENFSGRLVDNIRQDFYATMVLTNLTSDFAGEAQIEVEEEQSGKGKKYRYKVNMNYAIGVLKDRLIITLCEEDMEKRREMFDEITEMLKKRIIPIRPNRSFPRNTPRNVKFHYNQKSNC

SEQ ID NO: 67197 - DNA, 498 bp, Unknown
  Obtained from environmental sample
  misc_feature (1)..(498): n is a, c, g, or t
ttggaggggaaaatgaaacaaaagcattcatgggacattacggacgagttctgggctatagccgagcctttaattcctaaaaaaacaagggaccccgataaagaatacaagcgaaagcaagggggaggccgaccgccaatggaaccccgaaaggcccttgaagccatcttttatgtattgcgtaccggcatccagtggaaggctttgccagttttctttggctcttccagcgccgtccaccgccatttcgtgttttggtcggaggccggcttctttaaggccatgtgggcttgcggattgcggaagtacgacgaagtcaaaggcatagactgggcatggctaagcggggacggctgcatgaccaaggccccgttggccaaagaaacggtcggggccaatccgaccgaccggggaaaaaaaagggagcaagcggcacatgctcgtagacggcatcggggtgcctgttgccatggtaataaccggggcaaacaggcatga

SEQ ID NO: 67198 - protein, 165 aa, Unknown
  Obtained from environmental sample
  misc_feature (1)..(165): Xaa is any amino acid
MEGKMKQKHSWDITDEFWAIAEPLIPKKTRDPDKEYKRKQGGGRPPMEPRKALEAIFYVLRTGIQWKALPVFFGSSSAVHRHFVFWSEAGFFKAMWACGLRKYDEVKGIDWAWLSGDGCMTKAPLAKETVGANPTDRGKKREQAAHARRRHRGACCHGNNRGKQA

SEQ ID NO: 67199 - DNA, 327 bp, Unknown
  Obtained from environmental sample
  misc_feature (1)..(327): n is a, c, g, or t
atgatgggagtggatccggtttccgcaatgaatgctgtcattgaagccggtgcggatatcgtgggtgccaactgcggcaacgggatcgagcgaatgatcgatatcgtcagcgaaatgcgttcggtaaataaaaagattccgattctcgtccacgccaacgcgggccttcccaagaacgtagatggtcaggttatctttccggaaactccggaagacatggccaatttcgcgcctcgcctcgccgcagtcggtgccaacatcataggcggctgttgcggaaccacgccgatgcatatcaaagcgttaaaagaagcactgcaaaaataa

SEQ ID NO: 67200 - protein, 108 aa, Unknown
  Obtained from environmental sample
  misc_feature (1)..(108): Xaa is any amino acid
MMGVDPVSAMNAVIEAGADIVGANCGNGIERMIDIVSEMRSVNKKIPILVHANAGLPKNVDGQVIFPETPEDMANFAPRLAAVGANIIGGCCGTTPMHIKALKEALQK

SEQ ID NO: 67201 - DNA, 1095 bp, Unknown
  Obtained from environmental sample
  misc_feature (1)..(1095): n is a, c, g, or t
ttgcggaaccacgccgatgcatatcaaagcgttaaaagaagcactgcaaaaataaggagaatcccaatgatgaagacaaaatttctttccaccgcgataggttcaatgccttttgaagatccggattacgctgtcggcgtttcactgaaatccatggacgctcccatttggccccagttgccgaggcttggccttttggaacagatggaagtacagtactccgaaaacatcccctgcgccgtaattgacaatgaaaagaaccgtatgtactttcaaaccgattgcgactattcggaaaagttcggcgagttttacgaagcctacatgaccgcctcggatgccgacgggggaacgaaagatttttcgccaatggcgatcagtgaaaagtattccaaaggtatctacgccctcttgcggacattgaaggcgaagggcgcgaaacatccctggctcaaggtacaatccaccgggccgattaccttcgcgctgtctatcaccgatgaaaacaagcgagccatgtactacaacgaagaattcagggatgtaatcgtaaaggccatcgcggcaaagagccgctggcaaatacagcagttcaaaccttttgccgaaaatattatctgctttatcgacgagccgattctgtcggccttcggcagttccacctatgtttcagtcaagcgggaggatgtggtaaatatcctgaaagaggtcatcgaagccatacacgccgagggagccatcgcgggtatccactgctgcggaaataccgaatggagcatactcgttgacgcgggcgtggacatcgtgaactttgacgcttttgagtacggggacactatcgccatatacgcggacagcataaaatcgcatctgaataaaggcggggtactggcatggggtgtgcttcccacttccgaaaaaatccgcgaacagactgttgaatccctggaaaagaagcttgaggaaggcattgatcgtctggcttccagggaattcgacagaaccttattctcagcaggccatgatcactccctcgtgcggcacgggatcgctggccgtcgatgccgcggaaaaagttttttcacatttggctga

SEQ ID NO: 67202 - protein, 364 aa, Unknown
  Obtained from environmental sample
  misc_feature (1)..(364): Xaa is any amino acid
MRNHADAYQSVKRSTAKIRRIPMMKTKFLSTAIGSMPFEDPDYAVGVSLKSMDAPIWPQLPRLGLLEQMEVQYSENIPCAVIDNEKNRMYFQTDCDYSEKFGEFYEAYMTASDADGGTKDFSPMAISEKYSKGIYALLRTLKAKGAKHPWLKVQSTGPITFALSITDENKRAMYYNEEFRDVIVKAIAAKSRWQIQQFKPFAENIICFIDEPILSAFGSSTYVSVKREDVVNILKEVIEAIHAEGAIAGIHCCGNTEWSILVDAGVDIVNFDAFEYGDTIAIYADSIKSHLNKGGVLAWGVLPTSEKIREQTVESLEKKLEEGIDRLASREFDRTLFSAGHDHSLVRHGIAGRRCRGKSFFTFG

SEQ ID NO: 67203 - DNA, 777 bp, Unknown
  Obtained from environmental sample
  misc_feature (1)..(777): n is a, c, g, or t
atgaagattgcggtttccggaaaagggggtgtgggcaaatctaccgtcgcggcctctatcgctttaattttggctcaaaggggcgagcgggtgctcgctcttgacgcggatcctgacgcgaatttggccgctgcccttggcatcccaagaactgtcaaaataaagcctgtctcctcggaaatcgccttaatcgaagaaagaacaggagcaaaggtcaacgagtacgggcgggtattcaagctgaaccccgaggtgtccgacctgacggaaaagctggcgcttaagtacaacggcgtggagcttttggtgcttggggcgattaagaaaggcggcagcggctgcgcctgcccggaaagcaacttcataaaagcctttgtgaacgaccttgtgctgtataaaaacgagacccttgtcatggacatggaagcgggaatcgagcaccttggcagggctaccgccatgggtgtggatgtgatgtttattgtggtggagccgggtcagcgctcacttgactgcgccgctacggttatcagtatgtcaaaagagatcggtatagaaaatttcgttgttatagggaacaaagtaaccggcgatgacgacaaacgctatatctcagacgggcttacaggcattaaagtgtccgccttcctgccgtattcggaaggtatccgcaacgcggacagggacggagtttcggcccttgccggaatgggagatgaggaacgctcccttatcgaaggtcttatcgacacgatttggaaaggcaagcaactgtga

SEQ ID NO: 67204 - protein, 258 aa, Unknown
  Obtained from environmental sample
  DOMAIN (1)...(254): Anion-transporting ATPase
  misc_feature (1)..(258): Xaa is any amino acid
MKIAVSGKGGVGKSTVAASIALILAQRGERVLALDADPDANLAAALGIPRTVKIKPVSSEIALIEERTGAKVNEYGRVFKLNPEVSDLTEKLALKYNGVELLVLGAIKKGGSGCACPESNFIKAFVNDLVLYKNETLVMDMEAGIEHLGRATAMGVDVMFIVVEPGQRSLDCAATVISMSKEIGIENFVVIGNKVTGDDDKRYISDGLTGIKVSAFLPYSEGIRNADRDGVSALAGMGDEERSLIEGLIDTIWKGKQL

SEQ ID NO: 67205 - DNA, 762 bp, Unknown
  Obtained from environmental sample
  misc_feature (1)..(762): n is a, c, g, or t
ttggaaaggcaagcaactgtgagcaagctaatcgccatcaccggcaagggcggcgtgggcaagaccactgtcagcgccttgttgatcaagaacctgctggccgccgggaagtctcccgtgctcgcgatagacgccgacccgaacagttgccttgacgcggcgttgggggtacacgtgacagaaactgttggccgggcgcgcgaggaagcaaaggtcgcatccggaacaagcgcgaatatttccaaacgcgagcttttacggataaaactggagcaggctctggtagaagctaaaggtttcgatcttatcgccatgggccgtccagagggagagggctgttactgttatgccaacaatatcctcaaaaatatcatcgccgaaatttcctcccaatatccctatgtggtgcttgataacgaagcgggcctcgaaaacctttcccggcgtattgttcaaaaagtggacctcctggtattgacttccgacgcttccaacgcgggcctgcaaaccctgctccgccttcacgaattggccgtcgagatggccctgtcctacggcaagctggcactggttgtaaacagactgcgtactgacaatcttcccggcagaatggacgagattagggaaaaaacaaaagcagacctcgtcatcgacctgcccgacgatgaggaagttacggccttcgcggaaacctcaaggagttttcttgaaatttcagattcaaaccctgtatatgagaaaatcagggaattagctatatag

SEQ ID NO: 67206 - protein, 253 aa, Unknown
  Obtained from environmental sample
  DOMAIN (10)...(227): CobQ/CobB/MinD/ParA nucleotide binding domain
  misc_feature (1)..(253): Xaa is any amino acid
MERQATVSKLIAITGKGGVGKTTVSALLIKNLLAAGKSPVLAIDADPNSCLDAALGVHVTETVGRAREEAKVASGTSANISKRELLRIKLEQALVEAKGFDLIAMGRPEGEGCYCYANNILKNIIAEISSQYPYVVLDNEAGLENLSRRIVQKVDLLVLTSDASNAGLQTLLRLHELAVEMALSYGKLALVVNRLRTDNLPGRMDEIREKTKADLVIDLPDDEEVTAFAETSRSFLEISDSNPVYEKIRELAI

SEQ ID NO: 67207 - DNA, 1326 bp, Unknown
  Obtained from environmental sample
  misc_feature (1)..(1326): n is a, c, g, or t
atggataaggaaactattctcgcaaaagtaagtgacggcgcttcggctgcaatgctggaaaaaagccaggccgattgcgttgaaacttgttttgatcgcgctgaacaacaaaagaaccaatgcggtttcggtagaagcggcgtatgctgtcgtatctgtcacatggggccgtgcaggatcagtccaaagtcgccaaagggtatatgcggagctacggttgacactatagttgcgagaaacttcctgcgcgaagtcgcgagcggtaccagcgctcattcagatcacggacgccacctggtgtttaaactgcgggaagtggcccaggggaaagctccaggttttcagatcaaagacgaaaaggccctgcgccgcgccgcacggctttacggcgtggaagaagaaggcagggaagccaacacggtggccctggatctctcggacgtgtttataaaagaatttaccgaacaggaaaaccacctgaagaccctggagcttgcgccaaagaaacgccaggctgtgtgggaagcgacgggcgtcaagccaaacggcatcgatcgcatggtagtagaggcgatgcacagaacgcacatgggtgttgaccacgattacctcaatattctgcaccacgcctttaaggtttccctggccgacggctggggcggctcgcgtgtagcgtccattacctccgacatcctttttggaacgccgacgccgctgaaaagcgcggccaatctcggcgtgttaaagaaagaaaccgtgaacataatcatccacggccacgagccggccctttcggagttgctaaccgtcgtcgtggccgacccggagattgtggcgtacgctaaagccgccggtgcgaacgggatcacccttgcgggcatctgctgtaccgccaatgagattctgatgcgccacggcgttcccgtagccggtaactttttacaacaagaattggcaatcgccaccggggccgttgagctgatggttatcgacgtgcagtgctgtatgccgagcctgccggaaatagccaaaagttaccacaccgagatcgtttctacctccgacatcgccaggaccatcggcgcggttcacaagagcatgggccacggcggcgaaccgctaaatgtagcgagggatatcgtcagacgtgccatcgataatttcaaaaaacgcgatgccgcgaaagtcagcataccaaaacaaaaggaagaccttatcgcgggtttctccgtggacgccattaagtacatgctgggcgggcgcttccgcgcttcattccggcccttaaacgatgcgatcatgcaaaacagaatcctgggcgggtag

SEQ ID NO: 67208 - protein, 441 aa, Unknown
  Obtained from environmental sample
  DOMAIN (48)...(439): Prismane/CO dehydrogenase family
  misc_feature (1)..(441): Xaa is any amino acid
MDKETILAKVSDGASAAMLEKSQADCVETCFDRAEQQKNQCGFGRSGVCCRICHMGPCRISPKSPKGICGATVDTIVARNFLREVASGTSAHSDHGRHLVFKLREVAQGKAPGFQIKDEKALRRAARLYGVEEEGREANTVALDLSDVFIKEFTEQENHLKTLELAPKKRQAVWEATGVKPNGIDRMVVEAMHRTHMGVDHDYLNILHHAFKVSLADGWGGSRVASITSDILFGTPTPLKSAANLGVLKKETVNIIIHGHEPALSELLTVVVADPEIVAYAKAAGANGITLAGICCTANEILMRHGVPVAGNFLQQELAIATGAVELMVIDVQCCMPSLPEIAKSYHTEIVSTSDIARTIGAVHKSMGHGGEPLNVARDIVRRAIDNFKKRDAAKVSIPKQKEDLIAGFSVDAIKYMLGGRFRASFRPLNDAIMQNRILGG

SEQ ID NO: 67209 - DNA, 504 bp, Unknown
  Obtained from environmental sample
  misc_feature (1)..(504): n is a, c, g, or t
atggaaaaactcaggatattgattccgaagggaagaatttttgacaatgtaagccgccttttttctgaggcggggtttcccatcgctttgagcgaccgcacctaccgtccagcgctgggggcggattggcttgacgctaaaatcatgaaaccccaaaacgtgggggaactattggaattgggaagccatgacgcgggttttacgggaatcgactggataaaggaaagcggcgcggacgtacaagacgttcttgatctgggatttgacaaggtccgcattgtcgcggcggttccgcaggactatgacgaggcaaaactgcgttccaaaaaacttgtagtcgccaccgaatatgtaaatcttgcggaagcgtggcttaaatcttccggttatcagtaccaaatcctgcgcacttacggcgcgaccgaagtttttccgccggatgacgccgatatgattattgataacacttcttcggggcagacgctcaaagacaacngggcttaa

SEQ ID NO: 67210 - protein, 167 aa, Unknown
  Obtained from environmental sample
  DOMAIN (49)...(167): ATP phosphoribosyltransferase
  misc_feature (1)..(167): Xaa is any amino acid
MEKLRILIPKGRIFDNVSRLFSEAGFPIALSDRTYRPALGADWLDAKIMKPQNVGELLELGSHDAGFTGIDWIKESGADVQDVLDLGFDKVRIVAAVPQDYDEAKLRSKKLVVATEYVNLAEAWLKSSGYQYQILRTYGATEVFPPDDADMIIDNTSSGQTLKDNXA

SEQ ID NO: 67211 - DNA, 396 bp, Unknown
  Obtained from environmental sample
  misc_feature (1)..(396): n is a, c, g, or t
ttgataacacttcttcggggcagacgctcaaagacaacngggcttaaaattatagcgaccctgcttgaatcttccacgcgctttgtcgcctcaaaagccgcccttgccaaccctgagaaaaaaagccgcattgacgaacttgcaatgcttttccgagccgttcttgacggacgggatcgcgtaatgcttgaaatgaatatcccaaaagagcagtttgaatctttgtcgagccttcccgcaatgcgaagcccgacagtcgctccgctttacggagacgccggtttcgccgtaaaaatcgccgttaagaaacatgaagttcccgatattattccgaaactgaaaaaactcggcgctattgatattgtggaatacgatttgcgtaaagtagttatgtga

SEQ ID NO: 67212 - protein, 131 aa, Unknown
  Obtained from environmental sample
  DOMAIN (56)...(129): HisG, C-terminal domain
  misc_feature (1)..(131): Xaa is any amino acid
MITLLRGRRSKTTGLKIIATLLESSTRFVASKAALANPEKKSRIDELAMLFRAVLDGRDRVMLEMNIPKEQFESLSSLPAMRSPTVAPLYGDAGFAVKIAVKKHEVPDIIPKLKKLGAIDIVEYDLRKVVM

SEQ ID NO: 67213 - DNA, 645 bp, Unknown
  Obtained from environmental sample
  misc_feature (1)..(645): n is a, c, g, or t
atgagcagaacagcggagattggaagaaaaacaggggaaactgaaatactgatcaaactgaatattgacggcaagggcagtgcggttttggattaccctgtcggatttatgtcacatatgcttaacacatttgcgcgtcacggattattcgacatcgaagtgcgagcggaaggcgatcttgaagttgatcagcatcacattgttgaggatacgggcattgtgctcgggcaatgctttgcaaagtcgttaggcgacaagcgaggtattacccgcagcggaagctgtctttttccgatggacgaaactcttgcccgcgccgccatggatataagcggcagaccttttttatattttgacggacagctttcaaattctcctttaatttcaaccgaaggcggcaaagagtacagatttcaaacagatgtagttgaagatttttggcaaggttttgtaagtgcggccggctgtaatctgcatttggagattttacggggcagaagcgatcaccacaagattgaagcgctctttaagtccgccgcccgcgctcttcgcgccgcctgtgaaattgacgagcgcgcaaaagatttaatcccctcaacaaaaggctctctgcccggaattgactcccccggagttcctgtgtga

SEQ ID NO: 67214 - protein, 214 aa, Unknown
  Obtained from environmental sample
  DOMAIN (34)...(184): Imidazoleglycerol-phosphate dehydratase
  misc_feature (1)..(214): Xaa is any amino acid
MSRTAEIGRKTGETEILIKLNIDGKGSAVLDYPVGFMSHMLNTFARHGLFDIEVRAEGDLEVDQHHIVEDTGIVLGQCFAKSLGDKRGITRSGSCLFPMDETLARAAMDISGRPFLYFDGQLSNSPLISTEGGKEYRFQTDVVEDFWQGFVSAAGCNLHLEILRGRSDHHKIEALFKSAARALRAACEIDERAKDLIPSTKGSLPGIDSPGVPV

SEQ ID NO: 67215 - DNA, 609 bp, Unknown
  Obtained from environmental sample
  misc_feature (1)..(609): n is a, c, g, or t
gtgataggcgtaattgactacggagcgggaaacctcggctctgttatgaacgccctaaaacggctttccgttcccgcgcgtttcgctgccgatccgcaagagctttcgccatcatcttcgccgtttgaaaaaataattttccccggagacggacatttcgcaaccgcaatggcgtcgataaacaagtcgggttacgcgcaagcgataaatgaatggataaaagcggacaaaccctttttgggaatatgtatcggcttacagttgttatttgaaacttccgaagaagctccgaatgtacagggactttccgtaattaacggaacagtgcggcgttttcccggtcgcaaagttccgcagattggctggaaccaaaccagcgcgcgaaaagaatctaaaatttttcatggcttaaccgaaaacagttttttctattatatacattcatactacgccgaccccattgatgattcagtaaccgccgctcaaaccgaatactatctgcgctattgctgtgccgttgaacgcggagcgttggccgcagtgcagtttcaccctgaaaaatcaggcgcggcagggcttgcccttctgcgaaattgggtggagggataa

SEQ ID NO: 67216 - protein, 202 aa, Unknown
  Obtained from environmental sample
  DOMAIN (37)...(155): CobB/CobQ-like glutamine amidotransferase domain
  misc_feature (1)..(202): Xaa is any amino acid
MIGVIDYGAGNLGSVMNALKRLSVPARFAADPQELSPSSSPFEKIIFPGDGHFATAMASINKSGYAQAINEWIKADKPFLGICIGLQLLFETSEEAPNVQGLSVINGTVRRFPGRKVPQIGWNQTSARKESKIFHGLTENSFFYYIHSYYADPIDDSVTAAQTEYYLRYCCAVERGALAAVQFHPEKSGAAGLALLRNWVEG

SEQ ID NO: 67217 - DNA, 810 bp, Unknown
  Obtained from environmental sample
  misc_feature (1)..(810): n is a, c, g, or t
atgcaggcaaagcgtataattccatgccttgatgttgacgacggcagagtagtgaagggaataaaattcaaaggtattcaagatgccggagacccaagagaacttgcccgccgttacaacgacgacggcgcggacgaacttacattccttgacatcggcgcttcctacaaaagcagagcgacattgctggatgttgttcgcaaagtagccgccgaagtatttatccccctgtgcgtcggcggcggcataagagtaattgacgatatgcgagacgcaatgaacgcaggagcggacaaagtttcagtatgcacttccgccctgagccgccccgaattgttacgcgaaatggcaaacgcttacggcagtcagtgtgtcgtgctttcgatagacgcaaagcgcgttgatggcgaaaacggcttgcgttggcacgccttttcccacggcggcagaaccgacacgggaattgacgccattgaatgggcgattaaggcggtagaactcggcgcaggcgagatacttctcaactcaattgacgctgacggaacaggcggcggctacgatttggaactgaaccgccgaatactgaacgctgttcccgtacctgtaatcgcctcaggcggcgcgggaacgttggatcaaatagcggaagttttgctcagtacagcatcggcggaaatgccgcagggactctctcccgatgaagcgccgggagcggacgccgcgctgatagcgtcgcttttgcattttgggaaaacgacaattggagagattaaaaaacacgctgaggcgaagggtgtttgtgttagataa

SEQ ID NO: 67218 - protein, 269 aa, Unknown
  Obtained from environmental sample
  DOMAIN (5)...(253): Histidine biosynthesis protein
  misc_feature (1)..(269): Xaa is any amino acid
MQAKRIIPCLDVDDGRVVKGIKFKGIQDAGDPRELARRYNDDGADELTFLDIGASYKSRATLLDVVRKVAAEVFIPLCVGGGIRVIDDMRDAMNAGADKVSVCTSALSRPELLREMANAYGSQCVVLSIDAKRVDGENGLRWHAFSHGGRTDTGIDAIEWAIKAVELGAGEILLNSIDADGTGGGYDLELNRRILNAVPVPVIASGGAGTLDQIAEVLLSTASAEMPQGLSPDEAPGADAALIASLLHFGKTTIGEIKKHAEAKGVCVR

SEQ ID NO: 67219 - DNA, 888 bp, Unknown
  Obtained from environmental sample
  misc_feature (1)..(888): n is a, c, g, or t
atgacggcggtaaaagcggcgaaaaaaacaaaaaaactagtgggcggcagaaggctgaaccgctcctacggcggcgacgcttttattttcttcattctgacggtcttcggtctgttcttcgcctacccgctggtgtacgccattaacaacgcctttaaacccctgaatgaaattttcctgtttccgccgcgtctgttggtgcgccagcccacgatgaataactttcaggatctgtttatcattatgagcaagtcctgggttaccttttcccgctatatttttaacaccgtgctgatcaccgccgtgggaacgggcggcctcattatcgtggcctcgatgggggcatttgtggtatccaaataccgtttccccggcgcgaagctgttttttaacgtagtcattgtcaccctgatgttctccggttatgttacggcgattcccaactacctgattatggcaaaactcggatgggtggataccttcctttccgtcatagtgccggccttcgcgatgccgatgggtttctttctgctcaaacagtttattgacaccataccgaataccctgctggaagcggcaaaggttgacggcgcgaaggaatggcgcatttttctggtgataatccttcccatgataaggcccgcgtggctgaccgtgatgattttttccgtgcagagtctgtggaacgcccgcgcttccaactttatttattcggagcagcttaaaaccctgccctacgcgctttcgcagatcatcctggcgggcatagcccgcgccggagtgggggcggcggtaacgctctttgttatgatcgtgccgctggtaatgttcgttttcgcgcagagcaatattctgcaaacaatggccagctcggggatcaaggagtga

SEQ ID NO: 67220 - protein, 295 aa, Unknown
  Obtained from environmental sample
  DOMAIN (89)...(295): Binding-protein-dependent transport system inner membrane component
  misc_feature (1)..(295): Xaa is any amino acid
MTAVKAAKKTKKLVGGRRLNRSYGGDAFIFFILTVFGLFFAYPLVYAINNAFKPLNEIFLFPPRLLVRQPTMNNFQDLFIIMSKSWVTFSRYIFNTVLITAVGTGGLIIVASMGAFVVSKYRFPGAKLFFNVVIVTLMFSGYVTAIPNYLIMAKLGWVDTFLSVIVPAFAMPMGFFLLKQFIDTIPNTLLEAAKVDGAKEWRIFLVIILPMIRPAWLTVMIFSVQSLWNARASNFIYSEQLKTLPYALSQIILAGIARAGVGAAVTLFVMIVPLVMFVFAQSNILQTMASSGIKE

SEQ ID NO: 67221 - DNA, 933 bp, Unknown
  Obtained from environmental sample
  misc_feature (1)..(933): n is a, c, g, or t
atgagtcttgcaaggtatatggataaaaggagagaagcggacgagcgcttgtcaagggaaatatacaggcatagaatatgctatctttttctcgcgccgtacgctgttgtttttatccttttttatgtagcgcccgttattatatcggttttctacagttttacatatttcaacgttcttgagccgcctaaatttatcggcttgcgcaactatatcaatcttttgttagctgacgatgtttttttaatcgccgtaaagaacacttttattattgcggcggttaccggccctattgggtatataatggccttcctgtttgcgtggtttatcaatgaattgccgcgttatatccgcgcctttgtaacccttgtattctacgcgccgtctcttgccacgggcgcttttatgatttggacgcttattttttcaggcgacgcttacggatacatcaacgggctattgctgaatctgggcattctggatcaaccggtgctctggctgaccgatcccaggtacatgatgccggttatgttaattgtcattttatggatgagtctgggaacgggatttcttgcctttatcgccggcctgagcaccgttgacgtgtcgctttacgaagcgggcctgatggatgggataaagaaccgctggcaggaactttggtatattaccctgcccaacatgaaggggatgctgatgttcggggcggtcatggcgattacccagtcgttcggcgtcgccgatgtcaccgtagccctggcgggattccccagtacggattacgcggcgcataccgtggtgaatcatctggttgattacggttcgctccgctttgaaatgggttatgcgtcagcgattgcgaccctgctgttcctgaccatgattatctgcaatacagtggtgcagaaattactgcaccgcgtggggacctga

SEQ ID NO: 67222 - protein, 310 aa, Unknown
  Obtained from environmental sample
  DOMAIN (81)...(310): Binding-protein-dependent transport system inner membrane component
  misc_feature (1)..(310): Xaa is any amino acid
MSLARYMDKRREADERLSREIYRHRICYLFLAPYAVVFILFYVAPVIISVFYSFTYFNVLEPPKFIGLRNYINLLLADDVFLIAVKNTFIIAAVTGPIGYIMAFLFAWFINELPRYIRAFVTLVFYAPSLATGAFMIWTLIFSGDAYGYINGLLLNLGILDQPVLWLTDPRYMMPVMLIVILWMSLGTGFLAFIAGLSTVDVSLYEAGLMDGIKNRWQELWYITLPNMKGMLMFGAVMAITQSFGVADVTVALAGFPSTDYAAHTVVNHLVDYGSLRFEMGYASAIATLLFLTMIICNTVVQKLLHRVGT

SEQ ID NO: 67223 - DNA, 2166 bp, Unknown
  Obtained from environmental sample
  misc_feature (1)..(2166): n is a, c, g, or t
gtgttcatatcaaatacaagatcaaatatccagttgaaagttcagggcgaaagagcggtgcgccgttccgatccttcgctgtaccccaattacgaccgttcttccggcgcgaccgagccgcccagcgtggcgagaatccgccttaacatgattggcggcgaaagatggcgcgtagcgggccagtggatcgaatgggaagttgatataccggaagacggattgtaccgcttgtcggtaaaagggcggcagaattataaccgcgggtttgtatctaaccgcactgttcttattaacgggcaaactccctgccgcgagctttccgccataccgtttatgtataacaacaaatggcagcttattactcttcgtgacagcgataaaaatgattttatggtcttccctcttaacaggggcgtaaatacaattcgtttgcaggcaaccttaggcgatatgggcgcgatattaaatgtaatggaagaaagcgtgttccgcctgaacggaatttacagaaagatacttgttcttaccggaacagagcctgacgtataccgcgattaccaggttgaacatgtttatcccgaagtaatagaagcgatggcgcttgaaagcagaatcctctacaaactggtagacgatttaacccgctattcgggcgagcgcagcgctcaggcggccgcaacgcttacccttgcgcgccagcttgaactttttgtcaggcgtcccgataaaatcccgcgcactcttacaaactttaaagccaacatcagctctttgggcgacagcatgctggcgcttgcccagtcccagcttgacgttgattttattttattaactaccgccgacgcgaagctgccgaaaataaaagaaaatttctttgtcgctgcgtcgcatgaaatccgctccttcctgtcctcgttctttgtggattataacaacctcggcgacgtgtaccgcaacggcagcaatgttatcgacgtatggatgctcgccgggcgcgatcaaagcaacatccttaaagcgatgatagacgacacttttacgcaaaaaacaggaatcagggtaaacgtaaaacttgtcgcggcggacgctgtattgccgtctgtcgtagcgggtacggggccggatatggctcttaccgttcctcagggcgatcctatgaactacgctatccgtaaagccgttgtggacgtttctcaattcccagattatcaggaagtaataaaggaattaaacccaagcgtggtagttcctttcacttacgccggcggcgtgtgggggcttccggaaactcagtactaccatgtaatgttctaccgcaaagatatttttgaagaacttaaaattgaacttcccgatacatgggacgaccttatcaatattcttcccattattcaaaaaaataatatgaatgtaggtattccgtctgtcgcaactaacgttgcgacaagcatagacttttcaaacttcctcgctcacatgttccagcgcggaggcaggctttacaacgaagaaggctcccgcaccgaattggacggcgaaatcgccattgaggcatttgacgtatacacgaaattttttacgcattacaagacgcctatggtttacgattttctgaacaggttccgcacaggggaaatgccgctggcttttgccgattacacaaactttaacacactggaagttttcgctcccgaacttcgcggtctttggggtttttccagaatgcccggccttaaaaagaaagacgggactatcgaccgttcagtgccgacgggcactttagccgcaatgattttttctaattcaaagaaaagagaactggcgtgggaattcatgaaatggtggataagcgctgatactcagctcaggttcgggcgcgagcttgaaagcattatgggcgcggccgcccgttatcccaccgcgaattacgaggcgtttaagaggctttcgtggggttccgagcaaatggcggttcttgacgaacagagaggctggactgtaggaactcctgaagtgccgggcggttattttgttagccggcatattaccaacgcggtgcggaaaatattaaacgaaggcatggatacgcgggaaacattattggattatacaatcaccattaatgatgagttagcaaaaaaacgaaaagaattcggtctggaataa

SEQ ID NO: 67224 - protein, 721 aa, Unknown
  Obtained from environmental sample
  DOMAIN (294)...(622): Bacterial extracellular solute-binding protein
  misc_feature (1)..(721): Xaa is any amino acid
MFISNTRSNIQLKVQGERAVRRSDPSLYPNYDRSSGATEPPSVARIRLNMIGGERWRVAGQWIEWEVDIPEDGLYRLSVKGRQNYNRGFVSNRTVLINGQTPCRELSAIPFMYNNKWQLITLRDSDKNDFMVFPLNRGVNTIRLQATLGDMGAILNVMEESVFRLNGIYRKILVLTGTEPDVYRDYQVEHVYPEVIEAMALESRILYKLVDDLTRYSGERSAQAAATLTLARQLELFVRRPDKIPRTLTNFKANISSLGDSMLALAQSQLDVDFILLTTADAKLPKIKENFFVAASHEIRSFLSSFFVDYNNLGDVYRNGSNVIDVWMLAGRDQSNILKAMIDDTFTQKTGIRVNVKLVAADAVLPSVVAGTGPDMALTVPQGDPMNYAIRKAVVDVSQFPDYQEVIKELNPSVVVPFTYAGGVWGLPETQYYHVMFYRKDIFEELKIELPDTWDDLINILPIIQKNNMNVGIPSVATNVATSIDFSNFLAHMFQRGGRLYNEEGSRTELDGEIAIEAFDVYTKFFTHYKTPMVYDFLNRFRTGEMPLAFADYTNFNTLEVFAPELRGLWGFSRMPGLKKKDGTIDRSVPTGTLAAMIFSNSKKRELAWEFMKWWISADTQLRFGRELESIMGAAARYPTANYEAFKRLSWGSEQMAVLDEQRGWTVGTPEVPGGYFVSRHITNAVRKILNEGMDTRETLLDYTITINDELAKKRKEFGLE

SEQ ID NO: 67225 - DNA, 303 bp, Unknown
  Obtained from environmental sample
  misc_feature (1)..(303): n is a, c, g, or t
atgaaacgtttcaagctgaacatgaaacgtttcaagctaaacatgaaacgttttaagccgaaccctcgacgtttcaagattaaccctcgacgttttatcccgaaccctcgacgttttatctttaaccctcgctgttctatgctgaaccctcgacgttttaagttgaaccctcggcgtttcaagattaaccctcgtcatttgacttttaaccctcgatgttttaagccgaaccctcggcgttctatccttaaccctcggcgttttatctttaaccctctgcgcctttgcgcctctgcgagatga

SEQ ID NO: 67226 - protein, 100 aa, Unknown
  Obtained from environmental sample
  misc_feature (1)..(100): Xaa is any amino acid
MKRFKLNMKRFKLNMKRFKPNPRRFKINPRRFIPNPRRFIFNPRCSMLNPRRFKLNPRRFKINPRHLTFNPRCFKPNPRRSILNPRRFIFNPLRLCASAR

SEQ ID NO: 67227 - DNA, 1221 bp, Unknown
  Obtained from environmental sample
  misc_feature (1)..(1221): n is a, c, g, or t
atgcatgacaatcagactcagaccctcgaatttccctatgggaaagattttttacgtttttcagtttccggcgagcgtttgaaaggaacgcttgtttcccgtctgcatcattataaggcggaaaagagtcaggaggcgctggttcgggacgccctggcccggccccttgggactccgccgttgcgggagctggctaaaggcaagcgaaaggtcgtccttatcgcaagcgatcatacccggccggtgcccagcaaagtaattgtccctcccatgctggaggagatccggcgcggcaatcctctggcggatattactatcctgattgccacgggctgccaccgggaaaccaccgcggaagaactggaaggcaaattcggcccggaaataataaagaatgagaagatagtgatccatgactgtgattccccggacatggcgaacctggggaaactcccctccgggggcgatctgatcctcaaccgtgcagctgcggaggctgatctgttggtttccgaaggttttatcgaacctcacttttttgcgggtttttcagggggccgaaagagcgtccttccgggtattgccagcaggaaaaccgtactgtacaaccataacgcggaatttatcaaccatccccgcgccaggaccggtattattgaaggaaaccccatccatatagatatgcagtacgcggcgaaaaagatcggccttgagtttatctgcaatgtggttatcaatgccgccaaagcggtcatttttgccgtcgcgggagattgcgattcggcccatcgggcgggcagtgaatttcttctctcccagtgccgggtaaccccaagtgttgcggatattgcaattaccagcaacgggggctatcccctggatcagaacatctaccaggcggttaagggaatgaccgccgccgaagccacggtcaggaaaggcggcgtcatcatcatgctggccaaatccaatgacggccacggcgggccggaattttacaagacttttaaggaagaaaaaaacctggaccgtatgcttgacacctttatgaaaacccccagggataaaacaagagcagatcaatgggagtcccagatttttgcccggatcttacgacacgccaaggttatctatatttccgacgcgccggacgaaatgattcgggattttcagatgatcccggctcattcaatcgaagaagcggtaaaaaagccgaagtga

SEQ ID NO: 67228 - protein, 406 aa, Unknown
  Obtained from environmental sample
  misc_feature (1)..(406): Xaa is any amino acid
MHDNQTQTLEFPYGKDFLRFSVSGERLKGTLVSRLHHYKAEKSQEALVRDALARPLGTPPLRELAKGKRKVVLIASDHTRPVPSKVIVPPMLEEIRRGNPLADITILIATGCHRETTAEELEGKFGPEIIKNEKIVIHDCDSPDMANLGKLPSGGDLILNRAAAEADLLVSEGFIEPHFFAGFSGGRKSVLPGIASRKTVLYNHNAEFINHPRARTGIIEGNPIHIDMQYAAKKIGLEFICNVVINAAKAVIFAVAGDCDSAHRAGSEFLLSQCRVTPSVADIAITSNGGYPLDQNIYQAVKGMTAAEATVRKGGVIIMLAKSNDGHGGPEFYKTFKEEKNLDRMLDTFMKTPRDKTRADQWESQIFARILRHAKVIYISDAPDEMIRDFQMIPAHSIEEAVKKPK

SEQ ID NO: 67229 - DNA, 1449 bp, Unknown
  Obtained from environmental sample
  misc_feature (1)..(1449): n is a, c, g, or t
atgggagcaagaataaaaatgagcagtattaatcccaaaggcggtttcaatccgttgaccgataaaattattgaagaactcagaatgatagtggggaagggtaatgtcatcatcgaaaaagaaaaactggaaacctattcacacgatgagacagacgcgcaagaatacgggcacagtcccgaagcggtaatcctgccttctactaccgaagagatcgccttcatcgtaaagctggcaaaccgcgagcgcatacccataacccccagaggggctggctctggactttcaggcggggctattcccgaatacggaggcattgtcatttccctggaaaaaatgaacagtataatcgagattgacagggaaaacatgcttgccgtagtggaggctggcgtggtcaccaatgactttgccagggcggtagaggagcagggcctgtttttcgccgggtatcccatgagccttcagacctgcgtcataggcggtaacattgccgaaaacgccggtggcggcaaggcggtaaagtacggcgttacaggccgttatatactgggtcttaccctggttaccccccttggagaaatcgtggaactgggggggaaaattgtaaaagatgtttcaggctacgatctaaaatccttgattatcggttcggagggaactctgggcatagttaccaaagctataatcaggctcatcggttacccgtcatcaaagtcagacctcctctcgctttttaaaactcccaaagacgccattgacttggtgcctgaaattctcggcaaaggtctcacacccacaagcatcgaattcatggacaaactttctatagagacaagctgtaagtacctcaacgagagtctcccttacgaaggctgcggggccatgctcctcatcgaattggacggcacaaatccccagcaggttgagacagatcttgttgaaataggcaaactctgcgaaagccggggcgccctggaagtgtacgtagccgaagaccggaacaacattgagcgtatatggaacgtcaggagaaacatagccgaggcctttaaggtttttagccctatccaaagcctcgaagacattgtggttcccatctcccgtatcccccaaataatcccggaactggaaaggcttgggagacaataccaaatgcagataccctgttacggccacgccggagacggcaatctccacgccacattggtaaaagatccggccatgagcatggacgactggaggaaaaacgaaaaggcctgcctggaggaactctaccgtcttacctgtaacgcgggagggaaaatctccggggaacacggaatcggcataaagcgcagggaatttttcaagggcctggtaagtccggctgaactggaactcatgaggtcattaaaacatgcctgggatcccaacaacatcatgaacccggggaagatatttggttaa

SEQ ID NO: 67230 - protein, 482 aa, Unknown
  Obtained from environmental sample
  DOMAIN (60)...(199): FAD binding domain
  misc_feature (1)..(482): Xaa is any amino acid
MGARIKMSSINPKGGFNPLTDKIIEELRMIVGKGNVIIEKEKLETYSHDETDAQEYGHSPEAVILPSTTEEIAFIVKLANRERIPITPRGAGSGLSGGAIPEYGGIVISLEKMNSIIEIDRENMLAVVEAGVVTNDFARAVEEQGLFFAGYPMSLQTCVIGGNIAENAGGGKAVKYGVTGRYILGLTLVTPLGEIVELGGKIVKDVSGYDLKSLIIGSEGTLGIVTKAIIRLIGYPSSKSDLLSLFKTPKDAIDLVPEILGKGLTPTSIEFMDKLSIETSCKYLNESLPYEGCGAMLLIELDGTNPQQVETDLVEIGKLCESRGALEVYVAEDRNNIERIWNVRRNIAEAFKVFSPIQSLEDIVVPISRIPQIIPELERLGRQYQMQIPCYGHAGDGNLHATLVKDPAMSMDDWRKNEKACLEELYRLTCNAGGKISGEHGIGIKRREFFKGLVSPAELELMRSLKHAWDPNNIMNPGKIFG

SEQ ID NO: 67231 - DNA, 354 bp, Unknown
  Obtained from environmental sample
  misc_feature (1)..(354): n is a, c, g, or t
gtgcgacacttattttttggttacaacggcgcgtcatatagtttcaatccacgcacccgtgcggggtgcgacgtatttttggccgattatcttgggccctacgtctttgtttcaatccacgcacccgtgcggggtgcgacgaggagcggcagtgcgcggaagcgattttcaccggtttcaatccacgcacccgtgcggggtgcgacactgggacggcagttacatggtgcatcatgtgtttgtttcaatccacgcacccgtgcggggtgcgacaaaaataaagtctcgtaccccttgaccatagcaggtttcaatccacgcacccgtgcggggtgcgaccggctgctactttag

SEQ ID NO: 67232 - protein, 117 aa, Unknown
  Obtained from environmental sample
  misc_feature (1)..(117): Xaa is any amino acid
MRHLFFGYNGASYSFNPRTRAGCDVFLADYLGPYVFVSIHAPVRGATRSGSARKRFSPVSIHAPVRGATLGRQLHGASCVCFNPRTRAGCDKNKVSYPLTIAGFNPRTRAGCDRLLL

SEQ ID NO: 67233 - DNA, 372 bp, Unknown
  Obtained from environmental sample
  misc_feature (1)..(372): n is a, c, g, or t
atggtttcaatccacgcacccgtgcggggtgcgacaaggctacagataggctcaattccgttgcggtatatgtttcaatccacgcacccgtgcggggtgcgacatcaaaagaaactgaccagggacacgcccctttcgtttcaatccacgcacccgtgcggggtgcgacccagtcagtttatattcctgtgtgacggcattggtttcaatccacgcacccgtgcggggtgcgacttctatcggcaagccaggctcgtaaaaatcaacgtgtttcaatccacgcacccgtgcggggtgcgacggcttgtatccggcccggaatggacgtataggccggtttcaatccacgcacccgtgcggggtgcgacgtaa

SEQ ID NO: 67234 - protein, 123 aa, Unknown
  Obtained from environmental sample
  misc_feature (1)..(123): Xaa is any amino acid
MVSIHAPVRGATRLQIGSIPLRYMFQSTHPCGVRHQKKLTRDTPLSFQSTHPCGVRPSQFIFLCDGIGFNPRTRAGCDFYRQARLVKINVFQSTHPCGVRRLVSGPEWTYRPVSIHAPVRGAT

SEQ ID NO: 67235 - DNA, 300 bp, Unknown
  Obtained from environmental sample
  misc_feature (1)..(300): n is a, c, g, or t
gtgcgacgtctctttcctggtccctcttggatatttcgattgccgtttcaatccacgcacccgtgcggggtgcgactcgtaaattacttaacgcggcataagactatccagtttcaatccacgcacccgtgcggggtgcgacaggcaaggattgaagagctgcgcccgcagatacaggtttcaatccacgcacccgtgcggggtgcgacccgggccgcggaagttgacgagatagacgcatataaagtttcaatccacgcacccgtgcggggtgcgaccacttcatattttataaaataa

SEQ ID NO: 67236 - protein, 99 aa, Unknown
  Obtained from environmental sample
  misc_feature (1)..(99): Xaa is any amino acid
MRRLFPGPSWIFRLPFQSTHPCGVRLVNYLTRHKTIQFQSTHPCGVRQARIEELRPQIQVSIHAPVRGATRAAEVDEIDAYKVSIHAPVRGATTSYFIK

SEQ ID NO: 67237 - DNA, 1539 bp, Unknown
  Obtained from environmental sample
  misc_feature (1)..(1539): n is a, c, g, or t
atgtcggacagggtaatatgggacagattgattagagaatcgcccgtatattccaacgacatgatccgcgtgggagataactccgaagccgaccttcatgtcggcggcaatgacattactataaatgaaaatacgcttcttcgtctgcggtacgacaaggaaaccggcgaatatcaaattgaacttacttcaggaaacatagggcttgttaccaaccccaaagggaatgaagtcgctttgaacattatgggacggcaggtaaaagcaaaaccgggaaccgcccttaacgccgccgccggagataacggcatggctctgcaagtcagcgaaggttcggctgtaatcgcggaagaaaatcaaagtcgcgaacttgacgcgggaaaggctattgcgatggacttaagcggttcaatccgttccgcgccctcggtttttgtcattcaacccaaacctaacgccctttaccgtaagagtacgagtgaaccgcttaacatagatttttcatggaacaggatcaatctacagccgaatgaaaccctgcgtcttgaagcagccgaagatcagtctttcagccgttccgtccgcgccctaaacggacttaacgattcggcgcagatgtctctgaacgccggactttggaactggcggctgacttataacgacggcgctaacagcgtagttttggattcgggacgtttcaccataacggacgctaaggggcttgaattgttaagcccggctaaaaaccggcagtttacctatgagagcgaacttccaaaactgtatttccagtggtcgcagactgatgatgttttgtattacattgctgaagttgacgttacgcccgaattcagaaatcccattatcaaaaagcagacgacggctttgtccttttccgattcaagtcttggagaaggaatctggtactggcgcgtaacgcccgttttttctcaaacagacgacggcggtattaattcaagcgccgccgcttttcgtatagttaaaagcaaagaaccgctaacgccgtctttagtttttgccgaagagttattgccttcgtcttcgtatgcggcggttcccgaacccgcagccgcacccgagcctgtacccgccgtaaaaccggcgccttctcaacccctgagtcaatcgaatattccgcctattccgtttcttgccgctccggctaatcgtcagcctgccgagggataccttatcggcatagaagaactgaaaaaagtcaacatcaattttagttggtcggcggtacggggagcaaatagttatattcttaccatttacaaagaaaccaacggcgaacggaagcaaattatgcaaatgggaccggaaaaccgtacctcatggtcaacggatattaaaactctcggacggggaaattttatatggcgcatagaagcggtaaacgtaggacgtaacaatgtaattgaacagcatggtaacccggcggaaagccgttttgtcgtggacattccccgcgccggacctgtacagataattaacgggctagaggatatacaatga

SEQ ID NO: 67238 - protein, 512 aa, Unknown
  Obtained from environmental sample
  misc_feature (1)..(512): Xaa is any amino acid
MSDRVIWDRLIRESPVYSNDMIRVGDNSEADLHVGGNDITINENTLLRLRYDKETGEYQIELTSGNIGLVTNPKGNEVALNIMGRQVKAKPGTALNAAAGDNGMALQVSEGSAVIAEENQSRELDAGKAIAMDLSGSIRSAPSVFVIQPKPNALYRKSTSEPLNIDFSWNRINLQPNETLRLEAAEDQSFSRSVRALNGLNDSAQMSLNAGLWNWRLTYNDGANSVVLDSGRFTITDAKGLELLSPAKNRQFTYESELPKLYFQWSQTDDVLYYIAEVDVTPEFRNPIIKKQTTALSFSDSSLGEGIWYWRVTPVFSQTDDGGINSSAAAFRIVKSKEPLTPSLVFAEELLPSSSYAAVPEPAAAPEPVPAVKPAPSQPLSQSNIPPIPFLAAPANRQPAEGYLIGIEELKKVNINFSWSAVRGANSYILTIYKETNGERKQIMQMGPENRTSWSTDIKTLGRGNFIWRIEAVNVGRNNVIEQHGNPAESRFVVDIPRAGPVQIINGLEDIQ

SEQ ID NO: 67239 - DNA, 1020 bp, Unknown
  Obtained from environmental sample
  misc_feature (1)..(1020): n is a, c, g, or t
atgaaggagaaaaagatgagtagaaaaactacattcaaaaacgcagtcgtggttatccttgccgcgttatttttattaatggcaggttgtaatcttcttgatcctttttttgtacgggtagaatttattgaaggcgtgccggaaacaggcaacgccggaacgccccttacccttacaggaaatgtcagacccgcttttgcgagtaacaaagatattgtttggtctgtaaaagaatcaggaaccacaggcgcgagtattagcggaaatattttaaacgctgcggcggacgggatagttacaataagggcggttatagcaaacggcattgcggaaggaaaggaatatactcaggattttgaaattgtattcggtgaaggcggcgcagtgggcgatgtcgctgtagacggggttacgctcaatcactcaacccttaccctgaccataggggaaacggcaactcttatcgctactgtacacccctctaacgcaaccaacaaaaatgtaacatggagttccaacgaaacaggtgtagcgaccgtaaccagtggcggcgttgtaatcgctcatgccgccggaagtgcgataattaccgtaacaacggcagacggcggtaaaaccgccgaatgttccgttgacgtaaacgatccgtccctttctacattaagcggaacaatcacaatcagtcctagcaacggcgttaccgtcggcacggaactgaccgccgtatacaccggaagcgaaacggttacttaccattgggaaaaagacggaagcagtgtcggcacgaattctaacaagtacacgccgacagacgtgggaagttacaccgtaacagtgagcttgacaggctacaataacaagacaagcgcacccgttgttgtgtcgcctggtacattaagcggaacaatcacaatcagccctagcagcggcgtaaccgtcggcacggaaatgaccgccgtatacaccggaagcgaacggttacttactattngggaaaagacggaagcagtgtcggcatga

SEQ ID NO: 67240 - protein, 339 aa, Unknown
  Obtained from environmental sample
  SIGNAL (1)...(27)
  DOMAIN (133)...(211): Bacterial Ig-like domain (group 2)
  misc_feature (1)..(339): Xaa is any amino acid
MKEKKMSRKTTFKNAVVVILAALFLLMAGCNLLDPFFVRVEFIEGVPETGNAGTPLTLTGNVRPAFASNKDIVWSVKESGTTGASISGNILNAAADGIVTIRAVIANGIAEGKEYTQDFEIVFGEGGAVGDVAVDGVTLNHSTLTLTIGETATLIATVHPSNATNKNVTWSSNETGVATVTSGGVVIAHAAGSAIITVTTADGGKTAECSVDVNDPSLSTLSGTITISPSNGVTVGTELTAVYTGSETVTYHWEKDGSSVGTNSNKYTPTDVGSYTVTVSLTGYNNKTSAPVVVSPGTLSGTITISPSSGVTVGTEMTAVYTGSERLLTIXEKTEAVSA

SEQ ID NO: 67241 - DNA, 1362 bp, Unknown
  Obtained from environmental sample
  misc_feature (1)..(1362): n is a, c, g, or t
atggcaagctcgcctgtgggtctgcttgaagccgaaactcccgcgctcttacagcttttagccgccgaaaacaagggacttcaatccgccgtaatcggcaggcaaaaacgcagttttcaatctttttattttgctccttttgacgtgtttttcctgatcagcgaaaaagaagatgttttttacaaggacgcaagaacaatttttatacaaaccataatctcattgtgcgtagccgtcgccgccgctgtgcttcttcttattgtgattacaagccgccttaccgaaccgcttggaaacatagtaaaggcgatgaccggaattattgaaaaggcggatctttcctccagagtggaagttgaatacaacgacgaaaccggcaatctcgcgatgacctttaacaaaatgactgaagagttggacagcgcctacggacagataaagcgctacgcttttgacgctgttcttgccggaaaaaaagaagaacgcatccgccagatttttcaaaagtacgttcccaaagatgtaattgagcgtttcttcgcctctcccgaaaaaatgcttgtcggtgacaaccgcagcctttcgattcttttctccgatatccgctcctttacaaccatttccgaaggcatggcgccggacgacttggtaaattcattgaaccgctatttttcggggcaggtggaaattatctataatagaaaaggcgttgtagacaaatacataggcgacgccatcatggcgttctggggcgctcccgaaaaacatgatgatgacgcgttacagtccgtgttatcggggcttgacatgatggacgccgtagaaaaatttaacgagaaccagcgaaaactcggcaagtgcgaatttaagataggaataggcattaactttggggaagttactgtcggcaacataggcagcgagcgcaagatggactacacggtaatcggggatgcggtaaatctcgcatcgaggatggaaggtcttacaaaaacctatcattcggaaattttgatatcggaaagcctttttaaagaattgcaaaaatccgctccatccgccggccttttttacagactgcttgatactgtagccgtaaaaggaaagacacaaggcgtaaaaatttttaccgtaagaaaagcgctttcgcccgcggaacaaaaagcgtggcaggtgcataaccagggaatgaagttatactacggccgctctttcagcgaagccgcgcaaaaattcaaggaagcgctgtccctgctccccaaagactttaacgcggagaatctgtacaaacgctgcgtggattacgccgcaaacccgccgcctgaggggtggaatggggttgaggttatgaagacgaaataa

SEQ ID NO: 67242 - protein, 453 aa, Unknown
  Obtained from environmental sample
  DOMAIN (71)...(141): HAMP domain
  misc_feature (1)..(453): Xaa is any amino acid
MASSPVGLLEAETPALLQLLAAENKGLQSAVIGRQKRSFQSFYFAPFDVFFLISEKEDVFYKDARTIFIQTIISLCVAVAAAVLLLIVITSRLTEPLGNIVKAMTGIIEKADLSSRVEVEYNDETGNLAMTFNKMTEELDSAYGQIKRYAFDAVLAGKKEERIRQIFQKYVPKDVIERFFASPEKMLVGDNRSLSILFSDIRSFTTISEGMAPDDLVNSLNRYFSGQVEIIYNRKGVVDKYIGDAIMAFWGAPEKHDDDALQSVLSGLDMMDAVEKFNENQRKLGKCEFKIGIGINFGEVTVGNIGSERKMDYTVIGDAVNLASRMEGLTKTYHSEILISESLFKELQKSAPSAGLFYRLLDTVAVKGKTQGVKIFTVRKALSPAEQKAWQVHNQGMKLYYGRSFSEAAQKFKEALSLLPKDFNAENLYKRCVDYAANPPPEGWNGVEVMKTK

SEQ ID NO: 67243 - DNA, 750 bp, Unknown
  Obtained from environmental sample
  misc_feature (1)..(750): n is a, c, g, or t
atgaatttttctgaagaaagaaaatacaaaatatatgctatattgtttttattattaacattctcgctattatcaacatgtatactaaacaaggaggcgaaagccatgtcctcaaatgctgatcctcttattatcaatatttccatcgacacgaaaaacggccgtaaaaccatttcgccgtatatttacggaataaacggaacgccttcaaaaaatcaactttcggcaaaggcctgccgtttggggggtaaccgtacaacaggctataattgggaaaataatttttccaacgcgggccaggactggcatcattacaacgatcttcatctggttcctaaagatacagacagttcaacaccgggtattacgatactggactttgttaaaaaagccaataatctgggagcatacgcgcttattacattgccgatggcgggatatgtctccaatgacgggtacggcgctgtcgataaaaatgatacagcgccttcaaaacgctttgcgcctgtaaaagaccgaaaaaacggcgagttgtcgcttagaccgaatctttccgacggcgcggtttattcggatgaattagtcaattacctgatttccaaacttggaaattcgagtaacggcggcatacgcggttattcacttgataacgagccgccctgtggccgagtacgcatccgcgcattcaccccgaaaaggtcactgtcgcggaaatactggaaagatctgtttccctttcttccgtcgtaa

SEQ ID NO: 67244 - protein, 249 aa, Unknown
  Obtained from environmental sample
  misc_feature (1)..(249): Xaa is any amino acid
MNFSEERKYKIYAILFLLLTFSLLSTCILNKEAKAMSSNADPLIINISIDTKNGRKTISPYIYGINGTPSKNQLSAKACRLGGNRTTGYNWENNFSNAGQDWHHYNDLHLVPKDTDSSTPGITILDFVKKANNLGAYALITLPMAGYVSNDGYGAVDKNDTAPSKRFAPVKDRKNGELSLRPNLSDGAVYSDELVNYLISKLGNSSNGGIRGYSLDNEPPCGRVRIRAFTPKRSLSRKYWKDLFPFLPS

SEQ ID NO: 67245 - DNA, 3885 bp, Unknown
  Obtained from environmental sample
  misc_feature (1)..(3885): n is a, c, g, or t
ttgcctattaccggaatcaaaggtgtctttgaagcggtaagagcacctatcaggcagaacggcgctgttgtagggttaatcgccattatacgcgacataacccagcgcaaaaaaacagaaagtgaactttccttcaagacttcacagcttaaaatgattattgattcaattcccgacggaatgttttgcaaggatataaatttaaaatacatacaatgtaacaaggtctttgaaagttttacgggtgtccgtgaagaatacattctgggcaagtccgacaaggaaagcagctggttatcacaagatgctattgaaaaaatttatcgtgtagaacgggctgtaattgatgaaggccggagctttacccttgaagaaacagtcccctcgcttgttaccggaaaagaaagcatttttgaaacgactaaagccccgattacacaggacggcaacgtcgtagggttaatcgccattatacgcgacattacccagcgcaaaagaacagaaaaggaactttccttcaagacttcacagcttaaaatgatgattgattcaattcccgacagcatgttttgcaaggatatagatttaaaatacatacaatgtaacaaggtctttgaagattttatgggtgtccgtgaagaatatcttctgggcaagtccgacaaggacggcagctggttatctccggatgatattgaaagaatttatcgtttagaacgggctgtaatagatgaagaccggatatttacctttgaagaagcagtccattcgcctgttaccggaaaagaaagcgtttttgaagcggtaagagccccgattagacaggacggcgctgtcgtaggattaatcgccattatacgcgacataacccagcgcaaaaaaacggaaaaggaactttccttcaagacttcacagcttaaaatgattattgattcaattcccgacggcatgttttgcaaggatacagatttaaaatacatacaatgtaacaaggtctttgaaagttttacgggtgtccgtgaagaaaatattctgggcaagtccgacgacgaggaaggcagctggttatcacaagatgttgttgaaaaaattcatcgtgtagaacaggctgtaattgctgaaggccggagcattacctttgaagaaacagtcccctcgcttgttaccggaaaagaaagcatttttgaaacgactaaagccccgattacacaggacggcaacgtcgtagggttaatcgccattatacgcgacataacccagcgcaaaaaaacggaaaaggaactttccttcaagacttcacagcttaaaatgatgattgactcaattccagacagcatgttttgtaaggatatagatttaaaatacatacaatgtaacaaggtctttgaaaaatttatgggtgtccgtgaagaaaatcttctgggcaagtccgacgaggacggcagctggttatctccggatgatgttgaaagaatttatcgtttagaacgggctgtaatagatgaagaccggatctttacctttgaagaaacagtccattcgcctgttaccggaaaagaactcatttttgaaacgactaaggccccgatcatacaggacggcgccgtcgtggggataatcgccataatacgcgacatatcatcgcggaaagaaatggagaagaatctcgcgcttcagacttcattgtttaagacgatgctcagctcgcttcccgacgccgtattctgcaagaatttgaatttcaaatataccttatgcaacaactacatggcggaaatgatcggcagaaaaattgaggacatactcggcaaggacgacgtgaccggcatggggctgccgcccgaaacggcggccatcgccaatgaaaccgacaggaaagtcgtgaatgaacaacagcgcataatgtacgaggaatggatgccctgcgcggacggcgtcacgcggctttttgaaacggtaaaatcgccgcttatactggagggcgatgtggtcgggattatggcaatagcccgcgacgtgacccggcgcaaagaaatggaagaagaagcaatggccgccaaccgcgccaagtcatccttccttgccaatatgagccatgagcttagaacgccgctcaacgtggttatcggtctgacggatctgatactcgaagacgacatgaacgcccacacgagggaaaatctgctaaagataagcaacgcgggctccacgctgttgagcattgtaaacgacatccttgacttctccaaaatcgagtcgggcaaactcaccctgtcgccggttgagtattatatgtccagcatactgaacgatatcattaccctggtgcttacccgcattgggggaaaacccatacaattcaaattaaacatcaaagacgatctgccgaacaaactgtacggcgacgatctgcgggtaaagcaaatactgaccaatcttctcaccaacgccgtcaaatatacccgcgagggaagcatagagctcagcgtgcgctgcatgcgggaaggcggtacggtatggatggatgccgccatcagcgacaccggcatgggcatacccaaagaagacattaagaacctcttccttgattattaccaggtctcggccaacgccaaccgtaatattgaaggtacgggattgggcctgcccattaccaagaggctggtagaaatgatgggcggggaaatcagcgtggaaagcgagcatggcaaaggctccacgttccgtttccgcataaagcagggcttcgtcaacgatatgccgctgggagcggaggtctcggaaaaactccgttccttcagctactccgacgacaagcgcgctgtcggcaaaaaactggtaagggttaatttaagctacgccaaagtgctggtggttgacgatatgcagaccaatctggacgtggcgtcgggcatactgcgcaaataccaaatgcaggttgactgcctgaccaacgggctggccgcgattgaccggatacgcgagggaaaccctgtttacaacgccatattcatggatcacatgatgcccggaatggacggcatagaaacagccgacaagattcgcgccatagacacggaatacgcgaaaaatgtcccgataatcgccctgaccgccaacgccatatcgggaaccgacaagatgttctacgcgcacggtttccagggatttataaccaaaccgattgacgtaatggagatggatgcggttctcaggaaatgggtgtatgacagcaaaaataaacaagccctcgttccggacacactggttcccgaagcggttcccgaagatgaaatcattgaaataaatatacagggggtggatacgaaaaaagggctttccctgtacgccaatgaaactgatatttacctgcccatgctgcgctcgtatatagtcaacacgcccgcaacccctggaaaactccggcaagtcaaggggggaaacttatccgattatgttattgcggtacacggattaaaaggcaccagcgccggcataggggcggaatccatcagggaggcggccctgaatctggaggatttggccagatccggagactttaataaggttatggaactaaacaacaagctgattagcgacacggaagtagtcgtagaaagcgtaaaaacatggcttgaggggtacgacgcccttaacgcgaaaccggtccaaaaggcccccaatcctgaggttttggcgcgcctgaggcaatgctgcgaaaaattcgacatgtccggcattgacaaagccatggcggaactggaaagtaccgattacgaagaaggcaatgatctgataaaatggttaaaggataagattgttatatcggaaataacagaagcggcagcaaaaattgcgcagtatgaaaaggagttaaagaaatga

SEQ ID NO: 67246 - protein, 1294 aa, Unknown
  Obtained from environmental sample
  DOMAIN (1125)...(1211): Hpt domain
  misc_feature (1)..(1294): Xaa is any amino acid
MPITGIKGVFEAVRAPIRQNGAVVGLIAIIRDITQRKKTESELSFKTSQLKMIIDSIPDGMFCKDINLKYIQCNKVFESFTGVREEYILGKSDKESSWLSQDAIEKIYRVERAVIDEGRSFTLEETVPSLVTGKESIFETTKAPITQDGNVVGLIAIIRDITQRKRTEKELSFKTSQLKMMIDSIPDSMFCKDIDLKYIQCNKVFEDFMGVREEYLLGKSDKDGSWLSPDDIERIYRLERAVIDEDRIFTFEEAVHSPVTGKESVFEAVRAPIRQDGAVVGLIAIIRDITQRKKTEKELSFKTSQLKMIIDSIPDGMFCKDTDLKYIQCNKVFESFTGVREENILGKSDDEEGSWLSQDVVEKIHRVEQAVIAEGRSITFEETVPSLVTGKESIFETTKAPITQDGNVVGLIAIIRDITQRKKTEKELSFKTSQLKMMIDSIPDSMFCKDIDLKYIQCNKVFEKFMGVREENLLGKSDEDGSWLSPDDVERIYRLERAVIDEDRIFTFEETVHSPVTGKELIFETTKAPIIQDGAVVGIIAIIRDISSRKEMEKNLALQTSLFKTMLSSLPDAVFCKNLNFKYTLCNNYMAEMIGRKIEDILGKDDVTGMGLPPETAAIANETDRKVVNEQQRIMYEEWMPCADGVTRLFETVKSPLILEGDVVGIMAIARDVTRRKEMEEEAMAANRAKSSFLANMSHELRTPLNVVIGLTDLILEDDMNAHTRENLLKISNAGSTLLSIVNDILDFSKIESGKLTLSPVEYYMSSILNDIITLVLTRIGGKPIQFKLNIKDDLPNKLYGDDLRVKQILTNLLTNAVKYTREGSIELSVRCMREGGTVWMDAAISDTGMGIPKEDIKNLFLDYYQVSANANRNIEGTGLGLPITKRLVEMMGGEISVESEHGKGSTFRFRIKQGFVNDMPLGAEVSEKLRSFSYSDDKRAVGKKLVRVNLSYAKVLVVDDMQTNLDVASGILRKYQMQVDCLTNGLAAIDRIREGNPVYNAIFMDHMMPGMDGIETADKIRAIDTEYAKNVPIIALTANAISGTDKMFYAHGFQGFITKPIDVMEMDAVLRKWVYDSKNKQALVPDTLVPEAVPEDEIIEINIQGVDTKKGLSLYANETDIYLPMLRSYIVNTPATPGKLRQVKGGNLSDYVIAVHGLKGTSAGIGAESIREAALNLEDLARSGDFNKVMELNNKLISDTEVVVESVKTWLEGYDALNAKPVQKAPNPEVLARLRQCCEKFDMSGIDKAMAELESTDYEEGNDLIKWLKDKIVISEITEAAAKIAQYEKELKK

SEQ ID NO: 67247 - DNA, 435 bp, Unknown
  Obtained from environmental sample
  misc_feature (1)..(435): n is a, c, g, or t
ttgctcccccgactttcgagcttcagcgtcagtatcgggccaggcgactgccttcgctgttggtgttcttccagatatctacgcattccaccgctacacctggaattccatcgccctctcccacactcaagacttgcagtattaaaggccggacatgggttaagcccatgcattaaacccctaacttacaaacccgcctacgctccctttacgcccagtaattccgaacaacgctcgctccctacgtattaccgcggctgctggcacgtagttagccggagcttcctcgaacggtaccgtcataacgtattcttcatacgccttttcttcccgtccaacagagctttacaacccgaaggccgtcatcactcacgcggcgttgctgcgtcaggctttcgcccattgcgcaaaattccctactgctgcctcccgtag

SEQ ID NO: 67248 - protein, 144 aa, Unknown
  Obtained from environmental sample
  misc_feature (1)..(144): Xaa is any amino acid
MLPRLSSFSVSIGPGDCLRCWCSSRYLRIPPLHLEFHRPLPHSRLAVLKAGHGLSPCIKPLTYKPAYAPFTPSNSEQRSLPTYYRGCWHVVSRSFLERYRHNVFFIRLFFPSNRALQPEGRHHSRGVAASGFRPLRKIPYCCLP

SEQ ID NO: 67249 - DNA, 720 bp, Unknown
  Obtained from environmental sample
  misc_feature (1)..(720): n is a, c, g, or t
ttgaaaaggaaaaggaagagaaaaatgaaattttcaaaacaagtattgacggcgttaaccgccattgtgatcgtcgcgcttgccggctgcgcctccaaccccaaagtaagaaatgtggaacttgaaaacaagggaacctcgatgaacattaccacgcctgactggatcaaaaactataccgccaacggcgtttcggcggtacaggcgcagccccagtttaaggacaagtactgcatcattggcgaggaaagcggcgtgaacaagcagtttatcctggcatgggcggacagctttagcgcccagcagagaatcggcgcgatgctgcgaaccactatcgtcagcgagtatcaggcgcgggcgcagggctcggcccagtcgtcgggcagcgcgaccatgtcatcgtcttcaggcgaatacagtcaggagattgacaacgtgatcaacgccatagtagacgtaagctattcgggcgcgcagcgcgaagcggactggtggagtctgcgccggcgctacgatcccgacaacaaaagcgagtttaccgatgaatacaccgcctatgtattgtacaccatacccaaagccgaaatgaacaggcaggtagccaaagccctggaaacgtccgtcaaagccgactctgctttatacgacatcacaatcgagatggcccgttccatattgcaaaacgggctggcaaggtggggagaagaattgagcaattaa

SEQ ID NO: 67250 - protein, 239 aa, Unknown
  Obtained from environmental sample
  SIGNAL (1)...(26)
  misc_feature (1)..(239): Xaa is any amino acid
MKRKRKRKMKFSKQVLTALTAIVIVALAGCASNPKVRNVELENKGTSMNITTPDWIKNYTANGVSAVQAQPQFKDKYCIIGEESGVNKQFILAWADSFSAQQRIGAMLRTTIVSEYQARAQGSAQSSGSATMSSSSGEYSQEIDNVINAIVDVSYSGAQREADWWSLRRRYDPDNKSEFTDEYTAYVLYTIPKAEMNRQVAKALETSVKADSALYDITIEMARSILQNGLARWGEELSN

SEQ ID NO: 67251 - DNA, 594 bp, Unknown
  Obtained from environmental sample
  misc_feature (1)..(594): n is a, c, g, or t
atgatagatgaagcggacgcgttcctgggtgaccgcgatcaagaaggggattccggcacgagcaaccgcgtctttgcgcagattgccagttttatggggaataccgaatacaggggaaaaataatctggtttttaattacctgccgcccggatcttatacctatagacttaaagcgccaggggcgcgccgaagagcatctcgcgctcttttatcctgaaaccgacaaagacagggaagatctttttaagacgcttgtccgcaaacttgatttggacatccgtaatttttctgtttccgatcttttcaggaaatacaaccacgaatattcgggcgccgaccttgaagctgttcttgtgcgcgcgaaactgcttgccgcgatggatgatcgtgtttttgtaaaacgcgaagacatggaagaggcaatgagcgattttaatccggcggcatatccttacgatgtggaactgcaaaatcttgtggcggttttggaatgcacttcccgtgaaatgataccgaaaaagttccagaaacttccccgcagtaaaattatcagcgaaattcaggaattaaaagtgctggttagagaaagataa

SEQ ID NO: 67252 - protein, 197 aa, Unknown
  Obtained from environmental sample
  DOMAIN (1)...(128): ATPase family associated with various cellular activities (AAA)
  misc_feature (1)..(197): Xaa is any amino acid
MIDEADAFLGDRDQEGDSGTSNRVFAQIASFMGNTEYRGKIIWFLITCRPDLIPIDLKRQGRAEEHLALFYPETDKDREDLFKTLVRKLDLDIRNFSVSDLFRKYNHEYSGADLEAVLVRAKLLAAMDDRVFVKREDMEEAMSDFNPAAYPYDVELQNLVAVLECTSREMIPKKFQKLPRSKIISEIQELKVLVRER

SEQ ID NO: 67253 - DNA, 777 bp, Unknown
  Obtained from environmental sample
  misc_feature (1)..(777): n is a, c, g, or t
atgacagaaaaatctttagcgcaaaaactggatttatggtacgaaaaaatctgcggcaaagattttattaaagacgacccggttcaatttccgcatcgcttctctaaaaaggaagacatagaaattgccgcttttcttacggcgaccatcgcgtggggaaggcgcgacttaatcctgcgttcatcggagcgtatgttcgccataatgggaaaaagccccttttcttacataatctcgcgcgaatacaaaaacttaaaaaacaagaacatacaccgcaccttttttgaaagcgaccttaaatacttttgcaaagggtttgaacactgttacgcgaaatattcaaaccttgaaaaacttttttccggaaccggaaacacatgggaaggaatagccttattccgcgaagagatggcaaagggaaacaaggggcagtattccaaacacatttccaatcccggaagtacggatgaggaaacgggaggaaatgaaagcaagggctccgcgtgcaagcggcttaatcttgccctgcgctggcttgtgcgcaaaggaccggtggatttaggcttgtggaaaagcataaaacccgcatccctgtatatcccgctggacgtgcatgtcgcgcggacggcgagaaaacttgggcttttggaacgcaagtccaacgacaagaaagcggttgtcgagctgacggaaagattaagaacgtattgcgcggaagaccccgttaagtacgatttcgctctcttcggcatgggcgtgggagcaattagcaattag

SEQ ID NO: 67254 - protein, 258 aa, Unknown
  Obtained from environmental sample
  misc_feature (1)..(258): Xaa is any amino acid
MTEKSLAQKLDLWYEKICGKDFIKDDPVQFPHRFSKKEDIEIAAFLTATIAWGRRDLILRSSERMFAIMGKSPFSYIISREYKNLKNKNIHRTFFESDLKYFCKGFEHCYAKYSNLEKLFSGTGNTWEGIALFREEMAKGNKGQYSKHISNPGSTDEETGGNESKGSACKRLNLALRWLVRKGPVDLGLWKSIKPASLYIPLDVHVARTARKLGLLERKSNDKKAVVELTERLRTYCAEDPVKYDFALFGMGVGAISN

SEQ ID NO: 67255 - DNA, 1086 bp, Unknown
  Obtained from environmental sample
  misc_feature (1)..(1086): n is a, c, g, or t
gtgcccgtcgtagacaataacggaaaattaaaaggaataatcacaaaccgcgaccttcgcttttgccgcgacgattcccttcccgtcgttaaagtgatgacagaggaagtaatcgttgtggaaggagagccgaccgtagaaaaagcgcgcgataaattcgccgaattccgcattgaaaaacttcctgtggtggataacgagggcaggcttaaagggcttatcaccgtaacggacatggaaaaacatgaaaatttccccaacgccgcgactgataaaaccggcaagcttattgtcggcgcggcaatttccccccaggattacggcgtgcgccttccccttcttataaaagcaaaagttgattttgtggtcattgataccgcccacggcgattcaaaaaacgtcatggaagcgatcaaaaaaattaaaaaggaattcaacattcccgtaataggcggaaatgtcgccacaaaagacggaacaaaaaaattaatcgacgcgggcgcggacgctgtaaaagtgggcataggtccgggatcaatctgcaccacgcgggttgtcgccggaatcggagtgccgcagtttaccgccgtctgggaatgcgccgaagaggcgtcaaagtcaaaaataccggtaatcgcggacgggggtattaagttctcgggggacattaccaaggcaataggcgcgggagcgggcgttgtaatgataggcaaccttttcgccggattaaaagaagcgccgggaagcgaaattattcatgacggaagaatttacaaagaataccgaggaatgggaagcatgggcgccattgccgacggagcgggcgaccgttaccagataggcaaagacgaggaacctgtgccggaaggaattgaggggcgcgtgccttacaagggcgaacttcgcacctacttaaaccagcttatcgcaggattacgcaaaggcatggggtattgcggctgtaagagcataacggaacttaataaataccgtaaatttgtaaaaattaccgcttccggcctgcgcgaaagccatcctcatgacattaccatcacgcaggaagcgcctaattattcaccatcctga

SEQ ID NO: 67256 - protein, 361 aa, Unknown
  Obtained from environmental sample
  DOMAIN (31)...(228): CBS domain pair
  misc_feature (1)..(361): Xaa is any amino acid
MPVVDNNGKLKGIITNRDLRFCRDDSLPVVKVMTEEVIVVEGEPTVEKARDKFAEFRIEKLPVVDNEGRLKGLITVTDMEKHENFPNAATDKTGKLIVGAAISPQDYGVRLPLLIKAKVDFVVIDTAHGDSKNVMEAIKKIKKEFNIPVIGGNVATKDGTKKLIDAGADAVKVGIGPGSICTTRVVAGIGVPQFTAVWECAEEASKSKIPVIADGGIKFSGDITKAIGAGAGVVMIGNLFAGLKEAPGSEIIHDGRIYKEYRGMGSMGAIADGAGDRYQIGKDEEPVPEGIEGRVPYKGELRTYLNQLIAGLRKGMGYCGCKSITELNKYRKFVKITASGLRESHPHDITITQEAPNYSPS

SEQ ID NO: 67257 - DNA, 396 bp, Unknown
  Obtained from environmental sample
  misc_feature (1)..(396): n is a, c, g, or t
ttgcctatcattacaacgcccgctcccgcgcctattgccttggtaatgtcccccgagaacttaatacccccgtccgcgattaccggtatttttgactttgacgcctcttcggcgcattcccagacggcggtaaactgcggcactccgattccggcgacaacccgcgtggtgcagattgatcccggacctatgcccacttttacagcgtccgcgcccgcgtcgattaatttttttgttccgtcttttgtggcgacatttccgcctattacgggaatgttgaattcctttttaatttttttgatcgcttccatgacgttttttgaatcgccgtgggcggtatcaatgaccacaaaatcaacttttgcttttataagaaggggaaggcgcacgccgtaa

SEQ ID NO: 67258 - protein, 131 aa, Unknown
  Obtained from environmental sample
  misc_feature (1)..(131): Xaa is any amino acid
MPIITTPAPAPIALVMSPENLIPPSAITGIFDFDASSAHSQTAVNCGTPIPATTRVVQIDPGPMPTFTASAPASINFFVPSFVATFPPITGMLNSFLIFLIASMTFFESPWAVSMTTKSTFAFIRRGRRTP

SEQ ID NO: 67259 - DNA, 387 bp, Unknown
  Obtained from environmental sample
  misc_feature (1)..(387): n is a, c, g, or t
atggctaatgttatcgaggggcttggcgccgacagggaaagactgctcgccaacctgcgcggcggcgggatacccggcggagtgatggcggagcccgcctacatactgttagctgaaacaggagtcagcgacgcccatgaagttatacgcaagataacccttgccgccgaaaaggaaaatatcagttttgcagccgcgctcgccaaagagacggagacgcttaaaaaaataagcggcaaattggcggagttgggattaatcacggcgaaagcggaagacttaaaagaggcgttatcattctttgaaaacccggagcgttattgcgggcttgcggcaaaaaaagcaagaacgctcgcggaaaaatataaggcgttaatgggagggtaa

SEQ ID NO: 67260 - protein, 128 aa, Unknown
  Obtained from environmental sample
  misc_feature (1)..(128): Xaa is any amino acid
MANVIEGLGADRERLLANLRGGGIPGGVMAEPAYILLAETGVSDAHEVIRKITLAAEKENISFAAALAKETETLKKISGKLAELGLITAKAEDLKEALSFFENPERYCGLAAKKARTLAEKYKALMGG

SEQ ID NO: 67261 - DNA, 906 bp, Unknown
  Obtained from environmental sample
  misc_feature (1)..(906): n is a, c, g, or t
ttgaagggatttgatcccgccacgctggaagcgccgctgtttctggaactgttggcctgtcccggcggctgcctaaacggccccggaatgtccggcatgtcgccgggcgtttcccgccatacccgccttttggactatgtctgctccgccgataataccctcgacggcgaagcgctctccctcacgccacagattgaagccggttatcctctggccccgctgccggacgtagtacacacggaacaggaaatcaccgaagcgcttatgctggtgggaaaacacagccttgccgaccggctcaactgttcgagctgcggctatgatacctgccgtgattttgccatcgccctgctggacggaagggcggaaaaaaccatgtgcgcctcgcatatgcgggagcttgccaataaaacagccaacggcctgattaaggcgattccttccggcgttgtcatcgtcgatagggacatgaaaatcatcgactgcaacgaacagtttgcccgccttatgggaaacgaaaccgaagaacttttcgccatgatgccggggctggaaggggcagatctaaaaaaaatatcgcctttcccgcagtatttccagacgattattgatccgtcagggccggagctttcccaaaccgacgtgcgggtcggcagtaaaatatttcacctgactgttttcgccgttgaaaagggcattgccgcggcgggggttgtagaagacattaccgcgcctcgggtacgaatcgaaaaaaccgttgaacgtgcgcgggagataatcaaaaagaatgtttcaactgttcagcaaatagcttttctccttggagaaaacgcggcggaatccgaggccatcctaaattccattatcgagtcctacacggtagaagaagatgacggacaacattga

SEQ ID NO: 67262 - protein, 301 aa, Unknown
  Obtained from environmental sample
  DOMAIN (96)...(130): Putative Fe-S cluster
  misc_feature (1)..(301): Xaa is any amino acid
MKGFDPATLEAPLFLELLACPGGCLNGPGMSGMSPGVSRHTRLLDYVCSADNTLDGEALSLTPQIEAGYPLAPLPDVVHTEQEITEALMLVGKHSLADRLNCSSCGYDTCRDFAIALLDGRAEKTMCASHMRELANKTANGLIKAIPSGVVIVDRDMKIIDCNEQFARLMGNETEELFAMMPGLEGADLKKISPFPQYFQTIIDPSGPELSQTDVRVGSKIFHLTVFAVEKGIAAAGVVEDITAPRVRIEKTVERAREIIKKNVSTVQQIAFLLGENAAESEAILNSIIESYTVEEDDGQH

SEQ ID NO: 67263 - DNA, 1263 bp, Unknown
  Obtained from environmental sample
  misc_feature (1)..(1263): n is a, c, g, or t
atgacggacaacattgaacatctgccgggcggcactcccggcgattcagccaattcgttgtctcaaaacaccttcatcgaagtagatcatttccagctttgcaaatacaaccagaacgcacctggggatgtgtttctctcgcagaagaaccccagcgacggacgggtgatcaccgccctttccgacggccttggctccggaataaaggccggggtgcttgccacgctcaccgcgactatggccgccaaattcattatgtgtaacattcccatcaagcgggcgtccgaaatcatcatgaacagtctgccggtatgcagtgaacgggggattagttacgctacattcacgctggtagatattgcccctaacgcttcggtaagaattatggagtatgacaacccgccctacacgtttataagaaaaggaacggtacttgaacccgcgaagagagaaaacccttttgagcggcaggacaaatcgaccgggcctaaaaaagataccagcgtgctgtactcgcactttaaggcccaaagcggcgaccgcctgatttttttctccgacggcgttagccaggcgggcatgggaaccaaaccccacccctttggctggacaaccgccaaagcccgccagtttgcccttgagagcgttcgggaaaaaccggaaatcagcgcccgcgaattggcccactgcatagtccagaaggcttcgcaattcgacttgttcaagcctaaagacgatatttcctgcggcgttatttatttccgggagccgagggatatgctaatactcaccggcccgccggttcaccctgaaagcgatcgggagattacgaatcttttttcgtcttttaccggaaagaaagtggtttccggtggcaccactgccgccattatcagccgggagcttaaccggcagataaaagtgaacatgaaaagttacgacaaaaacataccgccctggtcggagatggaaggggcggatatggtaaccgagggcatcatcactctgggggcggtcgagaggatgctggagaaccgtactgaaatcgaagcccacgccggaggccgggacgccgcatcccgcatgatcgacctcctcctggacagtgacaggatcacgtttatagttggcacaaagatcaacgaagcccaccaggatcctaccatgccggtagagctggaaatcaggcgcaacgtgatcaagcgcatcgcatctttactgaaagaaaagtaccttaaagaggtacagatacgttatttttag

SEQ ID NO: 67264 - protein, 420 aa, Unknown
  Obtained from environmental sample
  DOMAIN (52)...(255): Stage II sporulation protein E (SpoIIE)
  misc_feature (1)..(420): Xaa is any amino acid
MTDNIEHLPGGTPGDSANSLSQNTFIEVDHFQLCKYNQNAPGDVFLSQKNPSDGRVITALSDGLGSGIKAGVLATLTATMAAKFIMCNIPIKRASEIIMNSLPVCSERGISYATFTLVDIAPNASVRIMEYDNPPYTFIRKGTVLEPAKRENPFERQDKSTGPKKDTSVLYSHFKAQSGDRLIFFSDGVSQAGMGTKPHPFGWTTAKARQFALESVREKPEISARELAHCIVQKASQFDLFKPKDDISCGVIYFREPRDMLILTGPPVHPESDREITNLFSSFTGKKVVSGGTTAAIISRELNRQIKVNMKSYDKNIPPWSEMEGADMVTEGIITLGAVERMLENRTEIEAHAGGRDAASRMIDLLLDSDRITFIVGTKINEAHQDPTMPVELEIRRNVIKRIASLLKEKYLKEVQIRYF

SEQ ID NO: 67265 - DNA, 1515 bp, Unknown
  Obtained from environmental sample
  misc_feature (1)..(1515): n is a, c, g, or t
atgcccaaaaaatcattgattacttgcggggactcaatgcttaatatcaataataatacgtcccgtctgaaacgggaaatattggtgcgtatagcccggctgcaatttgaagggaaattagccgaaggggttcatgatataccaagggaacttgcccccaccggtagtactccgatccgctgctgcatataccatgaccgggaaatcttaaggcatcgggtgatcgcccggctgggatgcggccttgaaaagtatgactatgaaaagcggctcgccgaatatgtggaggaggccctgaacagggagaaaccaacctggcccatgcttaccgtacttgatttggcgtgtaacgcctgtgtgcgatcccattttatggtaaccaatgcctgccttgcctgcgttgcccggccctgtgtggtgaactgcggaagaaaggcgattgagattaaagagggccgggcgcgtatcgacagcgagaaatgcgtcaattgtggcgtatgcctgcaaaattgtccctatcacgcgatcataaaaattcctgtaccatgtgaggaagcctgcccggtaggcgccatttccaaaaacgaaagcggcagggagtgcattgattatcataaatgcatcaattgcggcaactgtatgcgcgaatgtccctttggcgcgatgatggacaagagtcagcttgttgacgtgattaagcatattatgaacaaaaaaaacgtggtcgccatgtacgcgcctgccgtagcggcccagttccgtgttgagccgggccggcttgagggggccatgcttgcggcgggcttctcaaacgtgcttgaagtcgccctgggcgcggatattacagcggataaagaggctgcggaatttgcagagcgcatggaaaaaggtgaaaagatgatgaccacttcctgttgccccgcgtttgtgcggacaatccgccgccatataccggaacttaatgactgcgtttccgacacccgcacgccaatgcactacaccgcagaaattgccaaaaacaaatacccagattgcatcactgtttttatcggtccctgccttgccaagcggcgggaaggtatggacgacgaatttgtggattacgttatttccattgaagagttgggcgctttgtttgttgctaaagaaatcgatgtcgcacaggcaaccccgacaccgggagaaaagctgcctacttcttcggggaggaatttcgcaaaatccggcggcgtggcccaggctgtgagggcaaggctcaaagatccttcgatattgagagaaactgtcattgacggccttgataaggaaggaatgaaacgcctcgccgaatttggcaagataaacacaggtcagcttccctacacggaaggaacgcccaaccttatcgaagtaatgacgtgtcagggaggctgtgtcgccggtccatcagtagttaccaatacaaaagtcgccctcgtgcagttggcaaaatacgcggaatttggcgcgaaagaaaatagcggagagaataaataa

SEQ ID NO: 67266 - protein, 504 aa, Unknown
  Obtained from environmental sample
  DOMAIN (229)...(475): Iron only hydrogenase large subunit, C-terminal domain
  misc_feature (1)..(504): Xaa is any amino acid
MPKKSLITCGDSMLNINNNTSRLKREILVRIARLQFEGKLAEGVHDIPRELAPTGSTPIRCCIYHDREILRHRVIARLGCGLEKYDYEKRLAEYVEEALNREKPTWPMLTVLDLACNACVRSHFMVTNACLACVARPCVVNCGRKAIEIKEGRARIDSEKCVNCGVCLQNCPYHAIIKIPVPCEEACPVGAISKNESGRECIDYHKCINCGNCMRECPFGAMMDKSQLVDVIKHIMNKKNVVAMYAPAVAAQFRVEPGRLEGAMLAAGFSNVLEVALGADITADKEAAEFAERMEKGEKMMTTSCCPAFVRTIRRHIPELNDCVSDTRTPMHYTAEIAKNKYPDCITVFIGPCLAKRREGMDDEFVDYVISIEELGALFVAKEIDVAQATPTPGEKLPTSSGRNFAKSGGVAQAVRARLKDPSILRETVIDGLDKEGMKRLAEFGKINTGQLPYTEGTPNLIEVMTCQGGCVAGPSVVTNTKVALVQLAKYAEFGAKENSGENK

SEQ ID NO: 67267 - DNA, 1305 bp, Unknown
  Obtained from environmental sample
  misc_feature (1)..(1305): n is a, c, g, or t
gtgatcaagatagagtctaccacagaaacaatagaaagtaaaggcggattgatccttgccggaaaaatcgcggtgaaggccgggctggagcggataaagagcacatttgtaaacaatgccgcagccgtcatagtcagcctgtacggtcttatgatggaagggaagagcgattttgaaagcatgggggaaaaacgcgggagcctttttttccaggaggcgctgaggctgccggttgtatacgcgaaagaaacagtgaggctgtaccttgagcagatgtcggctgacgccggtacgattatcgtgcaattgagggaaagctccgcaaagataatatcgcaagcgccgttacacggattgtggatagaagggaggcattatctccctgtggacattgacactgcggcaatggacaactcaaaaacaaaaaaagaaggggtaagccggacataccggaagtacgacgggtttcatccgatatttgcgtatgtggggaaggaagggtatatgctggactgcgaattgaggcccggcagccagcactgccagaaggggacggcggcgtttatagaagggtttatggggcggctgcggggcatacagccgggcgggcgtctgttgttccgcatggatgccggcaacgacgcgtttgagacgctgaaagcggtaacggggaaaggcagttattgcgtcataaagcggaacaaacgccggcaaaacgatgaaaaatggcttaaaatagcaaaacggcgcggaaaacgggttgcgtcgaggaaagggaaaaaagtctggataggaacggcgcggatacacccgtgcaagaaagacgaagtccttgaagatgtcgcctgcgtgttcgaggttatagaacgcaagagggacgcacaggggaaccggtatttaatccctaaattagaagcaaacatctggtggacgaacctggcctgcggggctgaaaaagtgatagaactgtaccatggccatgccgccagcgaacagtttcacagcgaattgaaaaacgacatgggcattgagcgcctgccgtccgggaaatttgcggtgaacaagatactgcttgcggtggcgatgaacgcgtataacgcgttgaggctgcttgggcaaaaatccatagagaaggaaagccgtatgaaagtgaggcgcaaacggctgggaaaagtaatccgcgatttgatatgcgttgcgggaaaactggtaaaacatggcagagacctgatattcaaaatgaatgagagagacccgatgctgccggtgtttttacggctgaatgccgcgttgggctgtccatag

SEQ ID NO: 67268 - protein, 434 aa, Unknown
  Obtained from environmental sample
  DOMAIN (128)...(367): Transposase DDE domain
  misc_feature (1)..(434): Xaa is any amino acid
MIKIESTTETIESKGGLILAGKIAVKAGLERIKSTFVNNAAAVIVSLYGLMMEGKSDFESMGEKRGSLFFQEALRLPVVYAKETVRLYLEQMSADAGTIIVQLRESSAKIISQAPLHGLWIEGRHYLPVDIDTAAMDNSKTKKEGVSRTYRKYDGFHPIFAYVGKEGYMLDCELRPGSQHCQKGTAAFIEGFMGRLRGIQPGGRLLFRMDAGNDAFETLKAVTGKGSYCVIKRNKRRQNDEKWLKIAKRRGKRVASRKGKKVWIGTARIHPCKKDEVLEDVACVFEVIERKRDAQGNRYLIPKLEANIWWTNLACGAEKVIELYHGHAASEQFHSELKNDMGIERLPSGKFAVNKILLAVAMNAYNALRLLGQKSIEKESRMKVRRKRLGKVIRDLICVAGKLVKHGRDLIFKMNERDPMLPVFLRLNAALGCP

SEQ ID NO: 67269 - DNA, 438 bp, Unknown
  Obtained from environmental sample
  misc_feature (1)..(438): n is a, c, g, or t
atgggagggatattcggtataatgccgctatggcgcaagtggcttgtgtggaacggcaagtattgggagattgacgagggcggtgttttgatccacgagaaaggtttggagatggtgcggaatatttatgacgagctttggaaaactgccaattatagggagcgtatagacattgaaaaagcggcgataatgagcgagagcgtgcgaaggcgaaaagcctttgttgaggccgccacttggattaaagatttaagaattaaagcggaagaattggacgctaatccgtggttgttgaacttgaagaacggcactatagaccttaaaagcggcgaatttagggaacataaacaggaggatttaattacaaaaattgccaatgtggattatgatcctaaagctgattgtcccatgtggaaacagttattcgggagattatga

SEQ ID NO: 67270 - protein, 145 aa, Unknown
  Obtained from environmental sample
  misc_feature (1)..(145): Xaa is any amino acid
MGGIFGIMPLWRKWLVWNGKYWEIDEGGVLIHEKGLEMVRNIYDELWKTANYRERIDIEKAAIMSESVRRRKAFVEAATWIKDLRIKAEELDANPWLLNLKNGTIDLKSGEFREHKQEDLITKIANVDYDPKADCPMWKQLFGRL

SEQ ID NO: 67271 - DNA, 918 bp, Unknown
  Obtained from environmental sample
  misc_feature (1)..(918): n is a, c, g, or t
atgatcacaggcgccgcccagatggacggggccgtccttgtagtatcagcgcctgattcagttatgccccagacaaaagagcacataattctcgcccgtcaggtaggcgtacccaatatgatcgttttcttaaataaaattgatcaggttgacgatcctgagcttttactgctggtcgaagaagaagtcagggatgttcttaaacataacggtttccccggcgacaagattcccatcatcaaaggttccgcgtttaaggcgatgtccgagccggataatgccgaatccacaaaatgtatcgacgaacttcttgaggcgatggactcctacttccccgatccggtgcgcgattcagacaaaccctttattatgcctattgaagacgtattcacaattcagggacgcggcacagtcgttacgggcaaagtggaacgcggcgttcttaagcttaacgaagaagttgaaattgtcggtattaaacccacaaagaaaaccgttattaccggtattgaaatgtttaacaaactgctcgacgaagcgcaggccggcgataacgtcggtacccttctccgcggtattgataaaaaagaagtcgagcgcggacaggttctcgctaaacccggttcaattacgcctcacaaaacattcaaaggccagatttactgtctgtcncaagaagaaggcggacgccacagcccgttctttacaggttacaggccgcagttctatttccgcaccactgacatcaccggaactgtcaagcttcccgaaggcaaagaaatggtcatgcccggcgacaatacggaaattatcggcgagttgatccaccccatcgccatggaaaaaggtcttcgcttcgctatccgcgaaggcggcaaaaccgtcgcctccggtcaggtagtcgagataatcgaataa

SEQ ID NO: 67272 - protein, 305 aa, Unknown
  Obtained from environmental sample
  DOMAIN (1)...(115): Elongation factor Tu GTP binding domain
  misc_feature (1)..(305): Xaa is any amino acid
MITGAAQMDGAVLVVSAPDSVMPQTKEHIILARQVGVPNMIVFLNKIDQVDDPELLLLVEEEVRDVLKHNGFPGDKIPIIKGSAFKAMSEPDNAESTKCIDELLEAMDSYFPDPVRDSDKPFIMPIEDVFTIQGRGTVVTGKVERGVLKLNEEVEIVGIKPTKKTVITGIEMFNKLLDEAQAGDNVGTLLRGIDKKEVERGQVLAKPGSITPHKTFKGQIYCLSQEEGGRHSPFFTGYRPQFYFRTTDITGTVKLPEGKEMVMPGDNTEIIGELIHPIAMEKGLRFAIREGGKTVASGQVVEIIE

SEQ ID NO: 67273 - DNA, 309 bp, Unknown
  Obtained from environmental sample
  misc_feature (1)..(309): n is a, c, g, or t
atggctaaggaaggcattcgcgtaaggttgcgcggttttgacgttgaattaattgatcagagcgctaagtctatcgccgcggctgtaagaaaagccggtgcgaaagtaacgggacctatccccctgccgacgcgaattaataaggtgaccgttttacgttcacctcatgtaaataagaagagccgcgaacaatttgaaatgcggactcataagagattgattgatattgttaatccttctgcggaagttatggattcattaatgaagcttgaactccccgcaggcgttgatgttgagattaaacagtaa

SEQ ID NO: 67274 - protein, 102 aa, Unknown
  Obtained from environmental sample
  DOMAIN (5)...(100): Ribosomal protein S10p/S20e
  misc_feature (1)..(102): Xaa is any amino acid
MAKEGIRVRLRGFDVELIDQSAKSIAAAVRKAGAKVTGPIPLPTRINKVTVLRSPHVNKKSREQFEMRTHKRLIDIVNPSAEVMDSLMKLELPAGVDVEIKQ

SEQ ID NO: 67275 - DNA, 627 bp, Unknown
  Obtained from environmental sample
  misc_feature (1)..(627): n is a, c, g, or t
atgttagggctttatgccagaaaagttggaatgactcaagtttttgacgaggcgggaaatcttatgccggtatcggtattaaggatagacccgaatgttgtcatttccaaaaaaacaaaagaagcggacggttacgccgctgtcgtcgtcggtatagacgaagcaaagaaaaatcgcgtaacaaaagcccgcgcgggacagtttcccgaaaacattacacctaagaaaaagatttgcgaactgcgtgattttgaaaaagaagtcgccgtaggggactctcttggaattgaagtgttaaaagatgtcagatatgtcgatgtttcaggcgtttcaaaaggcaagggttttcagggcgttgtaaagcgctacaaattcggcggcggacgcagaactcacggttctaaattccaccgcgaacccggttcgacagggcagagcacataccccgcaaaaacttttaagaatgtaaaattacccggacgaatgggacgggaaaaagtaacggttttaagccttcgggttgtaaaaacagatcctgaaaaacagctcattttggttcggggcgctgttcccggtattaataaagggcttgtgtttgtccgctccgcggtcaagaagggacggtaa

SEQ ID NO: 67276 - protein, 208 aa, Unknown
  Obtained from environmental sample
  DOMAIN (8)...(201): Ribosomal protein L3
  misc_feature (1)..(208): Xaa is any amino acid
MLGLYARKVGMTQVFDEAGNLMPVSVLRIDPNVVISKKTKEADGYAAVVVGIDEAKKNRVTKARAGQFPENITPKKKICELRDFEKEVAVGDSLGIEVLKDVRYVDVSGVSKGKGFQGVVKRYKFGGGRRTHGSKFHREPGSTGQSTYPAKTFKNVKLPGRMGREKVTVLSLRVVKTDPEKQLILVRGAVPGINKGLVFVRSAVKKGR

SEQ ID NO: 67277 - DNA, 639 bp, Unknown
  Obtained from environmental sample
  misc_feature (1)..(639): n is a, c, g, or t
atgaactgtaaagtgtattcaaaagaaggcaaagaaattcgcactatggcgttaagcgataatgtttttggtcttcctgtaaatgaagatttaatttggtacgctattaataatgaacttgccaacaaaaggcagggtaatgccagcacaaaaggaagagccgaagttcacggttcaaacgctaaaccgtataaccagaaaggaacaggacgagcgcgcagaggcgataaaaaatctcctgttcttgtcggcggaggcgtaatcttcggtccgaaaccgagagatttttcctattcaatacctaaaaaagcgaaacgccttgcccttaaaacaattcttagtttgaaagcgcagagcgacacattaaaaatagtagaagatttttcggttgaatcgggtaaaacaaaagatttggcaaaactccttgataattttgaacccggacttcgcacggtaataatccttaaagacgacgatccanaaattaaaagagctgcggcgaatattccgtgggttnaatatctttcttacaaccgcttgtcggcgcatgaattgttttacggccgtcaggtgttaatgctggaaacagcggctaaaaatcttaacgatttttacgctgaaaaggaggcaggggaatga

SEQ ID NO: 67278 - protein, 212 aa, Unknown
  Obtained from environmental sample
  DOMAIN (15)...(204): Ribosomal protein L4/L1 family
  misc_feature (1)..(212): Xaa is any amino acid
MNCKVYSKEGKEIRTMALSDNVFGLPVNEDLIWYAINNELANKRQGNASTKGRAEVHGSNAKPYNQKGTGRARRGDKKSPVLVGGGVIFGPKPRDFSYSIPKKAKRLALKTILSLKAQSDTLKIVEDFSVESGKTKDLAKLLDNFEPGLRTVIILKDDDPXIKRAAANIPWVXYLSYNRLSAHELFYGRQVLMLETAAKNLNDFYAEKEAGE

SEQ ID NO: 67279 - DNA, 831 bp, Unknown
  Obtained from environmental sample
  misc_feature (1)..(831): n is a, c, g, or t
atgggtattaagaaatataaaccgataacgccgggaatgaggcagtggacaagcttagataactcggagcttaccaaaggcgcaaagcctgaaaaaaccctcacaagcggaagaaaagacagagccggacgcgattcattcggacgcatcagtgtgcgccacaaaggcggcggacacaaacgcaaataccgcgacatcgattttaaaagagacaaagtcggtattccgggaaaagtcgccacgcttgaatatgatccgaaccgcagcgcgaacatcgctcttatcaattacaaggacggcgagaaacgctacattatcgcccccaaagaacttaaaatgggcgcgacaattttaagcggtcccgatgccccgattgaaccgggcaacgctcttccgctggaaaatattccgttaggatttaatgtttacaatattgaattaacgctcggcaagggcggacagatggctcgttccgccggaacaggcgctcttatcgccgccaaagaaggcgattatgttacgctcaaactgccgtcgggtgaaatgcgcatggtgtttaaaaaatgttatgcgacaatcggcagtgtcggcaacgaagaccacatgaatacaacattgggcaaagccggtcgcaaacgctggcttggcgtgcgccccacagtgcgcggtatggttatgaaccctgtggatcacccgcacggcggaggcgaaggaaagaataagggtattcaccctgttaccccgtggggtcagcccactaagggttacaagacccgtaaaaaacataaaccttcttcaaggtttatagtaagcaggggaaagaagaactaa

SEQ ID NO: 67280 - protein, 276 aa, Unknown
  Obtained from environmental sample
  DOMAIN (43)...(119): Ribosomal Proteins L2, RNA binding domain
  misc_feature (1)..(276): Xaa is any amino acid
MGIKKYKPITPGMRQWTSLDNSELTKGAKPEKTLTSGRKDRAGRDSFGRISVRHKGGGHKRKYRDIDFKRDKVGIPGKVATLEYDPNRSANIALINYKDGEKRYIIAPKELKMGATILSGPDAPIEPGNALPLENIPLGFNVYNIELTLGKGGQMARSAGTGALIAAKEGDYVTLKLPSGEMRMVFKKCYATIGSVGNEDHMNTTLGKAGRKRWLGVRPTVRGMVMNPVDHPHGGGEGKNKGIHPVTPWGQPTKGYKTRKKHKPSSRFIVSRGKKN

SEQ ID NO: 67281 - DNA, 348 bp, Unknown
  Obtained from environmental sample
  misc_feature (1)..(348): n is a, c, g, or t
atgttttttacgggtcttgtaacccttagtgggctgaccccacggggtaacagggtgaatacccttattctttccttcgcctccgccgtgcgggtgatccacagggttcataaccataccgcgcactgtggggcgcacgccaagccagcgtttgcgaccggctttgcccaatgttgtattcatgtggtcttcgttgccgacactgccgattgtcgcataacattttttaaacaccatgcgcatttcacccgacggcagtttgagcgtaacataatcgccttctttggcggcgataagagcgcctgttccggcggaacgagccatctgtccgcccttgccgagcgttaa

SEQ ID NO: 67282 - protein, 115 aa, Unknown
  Obtained from environmental sample
  misc_feature (1)..(115): Xaa is any amino acid
MFFTGLVTLSGLTPRGNRVNTLILSFASAVRVIHRVHNHTAHCGAHAKPAFATGFAQCCIHVVFVADTADCRITFFKHHAHFTRRQFERNIIAFFGGDKSACSGGTSHLSALAER

SEQ ID NO: 67283 - DNA, 426 bp, Unknown
  Obtained from environmental sample
  misc_feature (1)..(426): n is a, c, g, or t
atgaaagaagaaaaaggttataaagcaatcagcagatttcttatcgggtcgccttacaagatcaggcctgtagccgaccttgttcgccgcagaacatacccggaagctatttccattttggaaaatatgcctcataagggagcgaagcttattcgcaagaccgttaaatccgccgcttccaatgcgttagcggataataaaaaacttgacgaggatatgctttatgttaaggaaatttatattgatgacggaccgcgccttaaaagagtttggtttcgcggcagaggaagagcggatatgcaggtaaagcgaatgtgccatgtaaccgtagtggttgatgaaacttcggcttcagctaacgatgcggcaggcgcaaaaggcggcgcatccaaagaagttaaagcttcaaaaaaggcggctaaataa

SEQ ID NO: 67284 - protein, 141 aa, Unknown
  Obtained from environmental sample
  DOMAIN (9)...(114): Ribosomal protein L22p/L17e
  misc_feature (1)..(141): Xaa is any amino acid
MKEEKGYKAISRFLIGSPYKIRPVADLVRRRTYPEAISILENMPHKGAKLIRKTVKSAASNALADNKKLDEDMLYVKEIYIDDGPRLKRVWFRGRGRADMQVKRMCHVTVVVDETSASANDAAGAKGGASKEVKASKKAAK

SEQ ID NO: 67285 - DNA, 1119 bp, Unknown
  Obtained from environmental sample
  misc_feature (1)..(1119): n is a, c, g, or t
atgctgtacagggaatacggacagacaggtgaaaaaatttcgctcctgggttttgggggaatgcgtttcgcccatattgatgaccatgacgaatgcgtccgtgttatgaccgccgcagcggaagggggagttaactattttgacaccgcgccgggttatttcgggaccaaaagcgaaacggtttttggaaaaggcttcgccgaattcaggaggagaaagcttccttactattgcgcgaccaagactttcgcttccaaaccggacgagattcgccgcgagatagaggagcagcttaaacgcatggatattcccgctattgatttctaccatatatggtgcatcaccagcctggaaaactggcgaagccgcaaacaggacggcgtcctgcaaaccttcaggaagctcaaggaggaagggcttatccgccacgtctgcgtgtcaagccacctgattaaggacgagataaaggaactccttatggagcaggactgttttgaaggagtgctgttcggttattcgctgtataacttccggacaaggcaggcggcctttgacgcgatacggaaaaacaaacttggcgcggtggtgatgaatcccctgggcggcggcgttatcccccagaaccctgaaaaatttaactttttatgccgccccggcgaaagcgccgcaacggcggctttgcgcttcctttgggatcaccaggatataacttccacccttgtcggttttgaaaacgccgaacaggtgaaggaagcgcttaccgccatggagacctacaagccccggacaaaggcggaactggaagaagtaaaatcccacgcccttgcttccgttgagggcttatgcacaggctgcggctattgcgacgactgcccgcagggtattcccattccaaagtacatggacacctacaaccagaagatcctcaacgagggaggttcaggcgatccgataggggaccggttgaaatggcactggagtctggatcgctcaggcgccggcaaatgcaccgcttgcggccagtgcgaaaatgcctgcacccagcaccttaacattattgaaaggttgaaagaaatcgcatcgccaacggcgccgacgccgcctccggcaggcagttaa

SEQ ID NO: 67286 - protein, 372 aa, Unknown
  Obtained from environmental sample
  DOMAIN (7)...(275): Aldo/keto reductase family
  misc_feature (1)..(372): Xaa is any amino acid
MLYREYGQTGEKISLLGFGGMRFAHIDDHDECVRVMTAAAEGGVNYFDTAPGYFGTKSETVFGKGFAEFRRRKLPYYCATKTFASKPDEIRREIEEQLKRMDIPAIDFYHIWCITSLENWRSRKQDGVLQTFRKLKEEGLIRHVCVSSHLIKDEIKELLMEQDCFEGVLFGYSLYNFRTRQAAFDAIRKNKLGAVVMNPLGGGVIPQNPEKFNFLCRPGESAATAALRFLWDHQDITSTLVGFENAEQVKEALTAMETYKPRTKAELEEVKSHALASVEGLCTGCGYCDDCPQGIPIPKYMDTYNQKILNEGGSGDPIGDRLKWHWSLDRSGAGKCTACGQCENACTQHLNIIERLKEIASPTAPTPPPAGS

SEQ ID NO: 67287 - DNA, 720 bp, Unknown
  Obtained from environmental sample
  misc_feature (1)..(720): n is a, c, g, or t
atgatcgttctaaagggcatctccaaatcgtacggtaatgttacagcagtacgcaatgccgaccttgccgtttcttcaggctgtattttcgggatcatcgggcgctcgggcgcgggcaagtccagcctgctgcggacaatgagcctgcttgaaaccccggacacgggcgaggtgtactacaacgacgtgcgagtggacaccctgcggggcgcggcccttcttgagcggcgcagaaaaatgggaatgatattccagaatttcaatctgcttggatcacgcgacgtgctggggaatatcgcctaccctctggaaattgcgggctttaaccggaaacaaattgaaaagcgcgttgacgagcttctggagatggttgatattgccgacaagcgcagggcaaggatgcgggaactctcgggcggccagaaacagcgggtggctatcgcccgcgcgttagctgtaaatcccgaggtgcttttctgcgacgaggcgacaagctcccttgacccgcagaccacccggtcaattctcgccctgatccgcgacttgcagcagaggctgaaaataacggtggtgctgattacgcaccagatgggcgttatcaaagagatatgccaggaagtggcggtaatggacgggggaatcattgtggaatacggaactgtcgcctcggtgtttgaatcgcccaaaacagccgcggcaaaggagttgatccgtgactag

SEQ ID NO: 67288 - protein, 239 aa, Unknown
  Obtained from environmental sample
  DOMAIN (27)...(213): ABC transporter
  misc_feature (1)..(239): Xaa is any amino acid
MIVLKGISKSYGNVTAVRNADLAVSSGCIFGIIGRSGAGKSSLLRTMSLLETPDTGEVYYNDVRVDTLRGAALLERRRKMGMIFQNFNLLGSRDVLGNIAYPLEIAGFNRKQIEKRVDELLEMVDIADKRRARMRELSGGQKQRVAIARALAVNPEVLFCDEATSSLDPQTTRSILALIRDLQQRLKITVVLITHQMGVIKEICQEVAVMDGGIIVEYGTVASVFESPKTAAAKELIRD

SEQ ID NO: 67289 - DNA, 387 bp, Unknown
  Obtained from environmental sample
  misc_feature (1)..(387): n is a, c, g, or t
ttgggcgattcaaacaccgaggcgacagttccgtattccacaatgattcccccgtccattaccgccacttcctggcatatctctttgataacgcccatctggtgcgtaatcagcaccaccgttattttcagcctctgctgcaagtcgcggatcagggcgagaattgaccgggtggtctgcgggtcaagggagcttgtcgcctcgtcgcagaaaagcacctcgggatttacagctaacgcgcgggcgatagccacccgctgtttctggccgcccgagagttcccgcatccttgccctgcgcttgtcggcaatatcaaccatctccagaagctcgtcaacgcgcttttcaatttgtttccggttaaagcccgcaatttccagagggtag

SEQ ID NO: 67290 - protein, 128 aa, Unknown
  Obtained from environmental sample
  DOMAIN (67)...(107): Protein of unknown function (DUF1602)
  misc_feature (1)..(128): Xaa is any amino acid
MGDSNTEATVPYSTMIPPSITATSWHISLITPIWCVISTTVIFSLCCKSRIRARIDRVVCGSRELVASSQKSTSGFTANARAIATRCFWPPESSRILALRLSAISTISRSSSTRFSICFRLKPAISRG

SEQ ID NO: 67291 - DNA, 669 bp, Unknown
  Obtained from environmental sample
  misc_feature (1)..(669): n is a, c, g, or t
gtgactagcgaaaaaattctggaagtgctgaagatgctgccggaggcgactttggaaacggtatacatgacctttgtgtcgacttttttcgcctgcctcctgggtttccccttaggcgcgtatttgttcatcgcctccccttccgggcttgccccccgcaccgttttatacaacgtgctttcccgcgtcgtgaacctgttccgctcgcttccctttatcattctgatgatcctgcttatccccctgacgcggctgatcataagaaccagcataggccccacggcggtaatcattcccctttcaatagccgccgcgccctttgtggcgcgcgtcgcagaatccgccctgtccgaggttgaccagggcgtgcttaccgcggccagggccatgggctccaccaacttccagatcgtccgcaaggtgctgatcccggaagccatgcccgcccttatttccggcctcgccctgacgataataaatctgattggttattccgccatggccggcgcgataggcggcaggggcttaggcgaccttgccatacgctacggctattaccgcttcaggacggacgtaactatcggcgcggtaattgtcataatgatattggtggaagcggtacaaatgacaggcacggcgattagcaggagtctgttggcgaaaagatga

SEQ ID NO: 67292 - protein, 222 aa, Unknown
  Obtained from environmental sample
  DOMAIN (17)...(220): Binding-protein-dependent transport system inner membrane component
  misc_feature (1)..(222): Xaa is any amino acid
MTSEKILEVLKMLPEATLETVYMTFVSTFFACLLGFPLGAYLFIASPSGLAPRTVLYNVLSRVVNLFRSLPFIILMILLIPLTRLIIRTSIGPTAVIIPLSIAAAPFVARVAESALSEVDQGVLTAARAMGSTNFQIVRKVLIPEAMPALISGLALTIINLIGYSAMAGAIGGRGLGDLAIRYGYYRFRTDVTIGAVIVIMILVEAVQMTGTAISRSLLAKR

SEQ ID NO: 67293 - DNA, 1110 bp, Unknown
  Obtained from environmental sample
  misc_feature (1)..(1110): n is a, c, g, or t
atgcgggacggttacaccgctcccaaagttttgtggcttaaaaaacacaagcccgccgctttcgcgaaactgcggcatattcttctgccccataactacatcaattttttattgacaggcgaatattgggcggaatacggcgacgcgtcaggaaccgctctttttaatgtcagcgagcgcaaatggtcttccgccgtttgcaagtacatatctcccgatttggaaaaataccttccgccgctgacagcttccgacaaaacagccggaaaggttagcaaggccgcggcggaattatacggcattaacgaaggggtactggtctcctccggcggcggcgataacatgatgagcgcaatcggtacaggagccgtacgcgacggtttccttaccatgagcctcggcacatctggaacgcttttcggtttttcaaaaaagcccgttatcgatccaactggaaatctcgcagccttttgttcttcttcaggcggatggcttccgcttttgtgtacaatgaactgtacagtggcaagcgaagaattccgcaaacttatggaattggacgtaaaggcgtttgacgcggaagccgaaaaagccccaataggcgcggacggtattgtaattctgccatttttcaacggagagcggactcccaacctgcccaacggcagggcgagcgttaacggcattaccgccgccaactttaagcgcgaaaatttagcgcgcgccgcgcttgagtccgccatcttcgggatgaggatagggcttgacgggtttaaggcgcttggcttcaagccgaaagaaatacggttaaccggcggcggggcgaaaagcccgatctggcagcacattgcggctaacgtgatgaatctgccgatacgtacccccacaagttcggaagcggcggcgatagggagcgcgattcaggcgctttggtgtctgcagaggaattcgcaatgggcgggaaagaaaagttctattgaggaattggcggacgagcatgtcgcgttaggcgcaacggttaacccggacaagaagagcgtaaagctgtataacgacgcttacgcggtatattccatgtatcttggggctttaagccctctatataattaa

SEQ ID NO: 67294 - protein, 369 aa, Unknown
  Obtained from environmental sample
  DOMAIN (1)...(120): FGGY family of carbohydrate kinases, N-terminal domain
  misc_feature (1)..(369): Xaa is any amino acid
MRDGYTAPKVLWLKKHKPAAFAKLRHILLPHNYINFLLTGEYWAEYGDASGTALFNVSERKWSSAVCKYISPDLEKYLPPLTASDKTAGKVSKAAAELYGINEGVLVSSGGGDNMMSAIGTGAVRDGFLTMSLGTSGTLFGFSKKPVIDPTGNLAAFCSSSGGWLPLLCTMNCTVASEEFRKLMELDVKAFDAEAEKAPIGADGIVILPFFNGERTPNLPNGRASVNGITAANFKRENLARAALESAIFGMRIGLDGFKALGFKPKEIRLTGGGAKSPIWQHIAANVMNLPIRTPTSSEAAAIGSAIQALWCLQRNSQWAGKKSSIEELADEHVALGATVNPDKKSVKLYNDAYAVYSMYLGALSPLYN

SEQ ID NO: 67295 - DNA, 1350 bp, Unknown
  Obtained from environmental sample
  misc_feature (1)..(1350): n is a, c, g, or t
atggctgattattttgtcggaggaaaagagtattttcccggaatccaaaaaatcaaatttgaggggccgaagagcaagaaccctctggctttcaaattctacgacgcggaaaaagttataggcggcaagaagatgaaggatcatctgcgctttgcgattgcctactggcacagcttttgcggcgacggcggggacccgttcggaccgggcacgcacatcttcccgtggaacacggaagcgaaagacgcgatggacgcggcggacagaaaaatggacgccgcttttgaattctttacaaagataggcgcggaattttacgcgttccacgacagggacgtagcccccgaaggcgcaaacccggcggaaagcgaaaaaaaccttaagaccttagttgcgaaggcgaaaaaattgcagggcgagacaggcgtaaaacttctttggggaaccgcgaatgttttcggcaacccgcgctttatgaacggagcggcaacaaatcccgagttcggagttgtcgcccttgccgccacacaggtaaaagccgcgattgacgcgacaattgaacttggcggcgcaggctacactttctggggcggacgcgaaggttacatgagccttcttaacacggatcttaagagagaaaaagaaaacctggcgcgcttccttacgatggctagggactatgcccgcaaacagggctttaagggcgtgttctacattgagccgaaaccgatggagccgacaaagcaccagtacgactttgacacggagaccgtcataggcttcctgcgccagtggggtcttgataaagatttccgcatgaacatagaagccaaccacgcggaacttgccggacacgaattcgcgcacgagctggaaacagccgccgccgcgggtttcttcggctcggtagacgccaaccgcggcgacgtacagaacggctgggacacagaccagttcccgatgagttattacgaaacagcgatggcgatgtacacaatccttaaaatcggcggctttacgacaggcggccttaacttcgactcaaaaatccgcagaaactcggtagacccggcggaacctctttatcgcccacataggcggcatgaacactttcgcggtaggcctgaaatcgcgcaaaggattattgacgacggagttatcccgaactttgtgagggatcgttatgcgtcattcagttctggagacggcgcaaagttcagcaagggagaacttacgctggagcagcttgcgaagattggaacagacgccggttacggcaagactggacttacgagcggcaaacaggaatatcttgagaacgttctgaacgggtatttgctgggactgtaa

SEQ ID NO: 67296 - protein, 449 aa, Unknown
  Obtained from environmental sample
  DOMAIN (95)...(310): Xylose isomerase-like TIM barrel
  misc_feature (1)..(449): Xaa is any amino acid
MADYFVGGKEYFPGIQKIKFEGPKSKNPLAFKFYDAEKVIGGKKMKDHLRFAIAYWHSFCGDGGDPFGPGTHIFPWNTEAKDAMDAADRKMDAAFEFFTKIGAEFYAFHDRDVAPEGANPAESEKNLKTLVAKAKKLQGETGVKLLWGTANVFGNPRFMNGAATNPEFGVVALAATQVKAAIDATIELGGAGYTFWGGREGYMSLLNTDLKREKENLARFLTMARDYARKQGFKGVFYIEPKPMEPTKHQYDFDTETVIGFLRQWGLDKDFRMNIEANHAELAGHEFAHELETAAAAGFFGSVDANRGDVQNGWDTDQFPMSYYETAMAMYTILKIGGFTTGGLNFDSKIRRNSVDPAEPLYRPHRRHEHFRGRPEIAQRIIDDGVIPNFVRDRYASFSSGDGAKFSKGELTLEQLAKIGTDAGYGKTGLTSGKQEYLENVLNGYLLGL

SEQ ID NO: 67297 - DNA, 612 bp, Unknown
  Obtained from environmental sample
  misc_feature (1)..(612): n is a, c, g, or t
atgaaccttgcaaataaattatcattttttcgtataattctcgcccctgtgtttttcatcatttatcttctgcctcgcttttttccttcgctattcgtgaacggagcggcatggacagtgcccgtactttggggtatttctgtcgtttctgaaataaccgactatttcgacggttttgccgcccgcaaactcaacctgacaagcgactttggaaaactgttagaccctttcgccgacacgcttacgcaaattactttttttctttgttttataattgacggtacttttcccggcggtatttttccggtaattttatttttaatagttgtttaccgtgaattcgcaattatgttccttcgcaacttgatggcgaaaaaaggcattgctatgggcgcgcgcatgggcggaaaaataaaaaccgtcgcatatatcaccgcggcggcaatcgctctcttaaccgaaagttttgaacgattggaagtattaacatcgattttgccgtatataaaaataggcgcgcttattgcctttactatttccgtaaccatttcggtaatttcgttttttgactatcttttaatttacaaaaaaacggcggacataaaagcgtaa

SEQ ID NO: 67298 - protein, 203 aa, Unknown
  Obtained from environmental sample
  DOMAIN (44)...(194): CDP-alcohol phosphatidyltransferase
  misc_feature (1)..(203): Xaa is any amino acid
MNLANKLSFFRIILAPVFFIIYLLPRFFPSLFVNGAAWTVPVLWGISVVSEITDYFDGFAARKLNLTSDFGKLLDPFADTLTQITFFLCFIIDGTFPGGIFPVILFLIVVYREFAIMFLRNLMAKKGIAMGARMGGKIKTVAYITAAAIALLTESFERLEVLTSILPYIKIGALIAFTISVTISVISFFDYLLIYKKTADIKA

SEQ ID NO: 67299 - DNA, 528 bp, Unknown
  Obtained from environmental sample
  misc_feature (1)..(528): n is a, c, g, or t
ttgatgattgacgcaacagaggggctttccgaccaagacaagaaaatcgccgctctcgcccatgacaaaggcaggggcataatcatggcgctcaacaagtgggatgaaatgcctcagcagaaaaatacattcaaagacgctgaaggaaaaatacactttcaattcgggcaaatggaatatgcgccgattatccccgtcagcgcaaaagacggttccggcgttgacaaactgctgaatacggcgataaaaatgtacggtcagcttaatctgcaaataggaacatcacagcttaatcaggctttggaaaagtggctgcaggaatatccgccgcctaccggaccaagaacatactttaaaatcaaatacgccgtgcagaagtcggtaaaccccgtacacttcatttttttcgtttcccgtattcaagttataagcgactcctatattgcgtatttaaggaacaaaatacgcaaagatttggggttttcccttatccccgttttaatcgacgtaaaaagttcctcaaagtaa

SEQ ID NO: 67300 - protein, 175 aa, Unknown
  Obtained from environmental sample
  misc_feature (1)..(175): Xaa is any amino acid
MMIDATEGLSDQDKKIAALAHDKGRGIIMALNKWDEMPQQKNTFKDAEGKIHFQFGQMEYAPIIPVSAKDGSGVDKLLNTAIKMYGQLNLQIGTSQLNQALEKWLQEYPPPTGPRTYFKIKYAVQKSVNPVHFIFFVSRIQVISDSYIAYLRNKIRKDLGFSLIPVLIDVKSSSK

SEQ ID NO: 67301 - DNA, 822 bp, Unknown
  Obtained from environmental sample
  misc_feature (1)..(822): n is a, c, g, or t
atgctgacatctttgaaataccgcaaccttccaacagtagttctcgccggacgtcccaatgtgggaaagtcaacgctctttaaccgcctgcttcacaaacgcagggcgattaccgaccctacgcccggcgttacgcgcgaccccgtagaagcggattgtcttatcaatgaaaaaccattgcgccttatcgacacaggcggcttcaaacttacggattgcgatgagcttgacaagttggtagttgaaagaactcttgaaacaattaaaaaagccgaccttgttgttttactgctcgaagcgggagagataacaagcgaggacgaagaacttataaacactctgcgtccgtaccgagaaaaattaattgtaacggtaaacaaaacggaaggcggcagacatgaagccgacgcgtggaatgttctcaccttcggttttgaaaaagttttaatgatctccgccgaacacggcgataatatcggcgaacttcaacaggagataataaagcgtcttgatttttccaaagtggaagaagcgcaggaagaaaaagttatcaggattgcgctgctcggcaaacccaacacaggcaagtccacgctgtcaaacagactgacaggagccaacgcttctatcgtaagcgaaaatcccggcacgacnagggacactgttgaggggcgtttcagttggaaatcacgcaattttattatcatggataccgcaggcatcaggcgcaaggcaaaggtgaacgaaaacatcgagtactattcccgtaaaccgagccataaaaacaataagcgacgccgatattgtcatattgatgattga

SEQ ID NO: 67302 - protein, 273 aa, Unknown
  Obtained from environmental sample
  DOMAIN (184)...(267): GTPase of unknown function
  misc_feature (1)..(273): Xaa is any amino acid
MLTSLKYRNLPTVVLAGRPNVGKSTLFNRLLHKRRAITDPTPGVTRDPVEADCLINEKPLRLIDTGGFKLTDCDELDKLVVERTLETIKKADLVVLLLEAGEITSEDEELINTLRPYREKLIVTVNKTEGGRHEADAWNVLTFGFEKVLMISAEHGDNIGELQQEIIKRLDFSKVEEAQEEKVIRIALLGKPNTGKSTLSNRLTGANASIVSENPGTTRDTVEGRFSWKSRNFIIMDTAGIRRKAKVNENIEYYSRKPSHKNNKRRRYCHIDD

SEQ ID NO: 67303 - DNA, 342 bp, Unknown
  Obtained from environmental sample
  misc_feature (1)..(342): n is a, c, g, or t
ttgaagaaaaatcacctgccaaaacaaagggcgaactcaacgagggcggcccctcgccgagaccacctcacggcctttacggacgtcttgaaaaaacacggcgtgaaaatcagcatggacggcagaggcagggcgttggacaacgtctttgtggagcggctttggagaaccgttaagtacgaggacgtttatctgaaagactacgagagcgtcgcggaatgccatgccggactgacggcgttcttcaaccggtacaacacccggcggccccatcagtcattgaggtaccggtatcctaaagacgtttttatggagggggttacacactccattgcggcataa

SEQ ID NO: 67304 - protein, 113 aa, Unknown
  Obtained from environmental sample
  misc_feature (1)..(113): Xaa is any amino acid
MKKNHLPKQRANSTRAAPRRDHLTAFTDVLKKHGVKISMDGRGRALDNVFVERLWRTVKYEDVYLKDYESVAECHAGLTAFFNRYNTRRPHQSLRYRYPKDVFMEGVTHSIAA

SEQ ID NO: 67305 - DNA, 657 bp, Unknown
  Obtained from environmental sample
  misc_feature (1)..(657): n is a, c, g, or t
atgaattcagccgcaagagttaccggttcgaccggttcgggggctacgcaagcctattatcagaatctgagggcaaagttcgggatcagcacggtcagcaaagcggggacgtcaaacagcgcggctgcggctgtcgtggatcggtttacggcaggcgctaaggcgggagcgagcggggcagtgtacacgaaagaggcggccatgcagaaagcgcagaatttggccaacgcgcattacacctctatgaaaggggcggtggagggatttatcggcggaagcaacggcccgcagggacagacgttttgggcgacggcggctaagagcatggttacgagcgcgggaggcgtaaacaatatcaaggatttccaagtcagcgacgaaacgcggattaaggctaaggagatgatcggggaggacggctactacggggtgaaacgcacgaccgaccgtatcatggagttcgcgaaagcgcttgccggcagcggggcgtcggagaagactatagacaacctgcggaaaggcgtacaggccgggttcgacgctgtgtcgaagatgtacggggggttcgacaagctgccgcaggtgtctcaggacacgtactcggcggtgatgaaagagttcgacagttggacgtctggaactatggtggcgagttag

SEQ ID NO: 67306 - protein, 218 aa, Unknown
  Obtained from environmental sample
  misc_feature (1)..(218): Xaa is any amino acid
MNSAARVTGSTGSGATQAYYQNLRAKFGISTVSKAGTSNSAAAAVVDRFTAGAKAGASGAVYTKEAAMQKAQNLANAHYTSMKGAVEGFIGGSNGPQGQTFWATAAKSMVTSAGGVNNIKDFQVSDETRIKAKEMIGEDGYYGVKRTTDRIMEFAKALAGSGASEKTIDNLRKGVQAGFDAVSKMYGGFDKLPQVSQDTYSAVMKEFDSWTSGTMVAS

SEQ ID NO: 67307 - DNA, 1686 bp, Unknown
  Obtained from environmental sample
  misc_feature (1)..(1686): n is a, c, g, or t
ttgattgagaaagacgttattccttctatggacaagaaccaacaggcaaggttggaacgcagtgcgtcggttactgacgaggactttaaaaccatcaaggcagaagacctgccgcttaagaacaaacctaagactgcggatgaaattctttcagagcttgacggcatgattgggcttgcaaaagtcaagaccgccgtgaggcagcttatcgaaactatcagtatgcaaaaagaacgcgaagaaaaaggcggcgctgccgcaaagatacaggcgatacacttgtgtttctatggcaaccccggtacggggaagaccactgtggcaagaaaacttggcgctctgtttcagacaatggggcttttaccgacggacaatatgctcgaggttacaagagccgacatggtggcgggctacgtggggcagaccgctccgctggtgaacaccgtgtgcgacaaggctttaaacggcattctttttatagatgaagcctacgatctttgccgtgattcttacgacagctttgggaacgaagcggttaccgcgttattaaaacgcatggaagacgaccgtggaaaatttgtagtgatcgccgcaggctaccgtaaagagatggatgactttcttcaagccaactccggatttagaagccgctttacccactttcttgaactggacgattacaaccccgatgagcttttcgcaatctttgcgtccatggcaaaatcaaacggctacaaactttctgcagacggggaaaagcgggcaaaggaagtcattaccgaaatacatcgcacaaggggcaaggactttgccaatggcaggtcaatgcgtaatcttcttgacgatacgatacgcagaatgccggaacgccttgcctcccttacggaggcggaacgtactgttgaagctctttcaacaattactgaattggacttcctctccgagagaaaagaagaacgtaccgtcgatgagatactcgcggaacttgatgcgatggttggcatgacggacatcaaaagaacagtacgcgaaatcgccaacaagattcaaatacaaaaagaacaggaagaaaaagacgggacaaagagcgcgggtgagggcaacaacattgttatcaccggcaaccccggcaccggaaagacaacgattgtccgtacattgggtgcgttgtttaaagctatcggtcttcttaaaacggagacggtcatcgaggtaaacggtaatgatttgaaaggctcttacttgggacaatcgaaggacagagtaaacgagaagtgcgatgaggcaatgggcggcatcctctttgtcgatgaggcttatgtgcttgccgatacccaacgcggtggcgcggttgatcagtacgcaaaagaagcggtggaaatcctgatgacccgattggaaaatgacagaacaaaatttgtcggcgtagtcgcgggttacgaaagagagatgcaggtcttcctcgatactgtaaacccaggaatgagacggcgtttcaagcattacctcagcttgagcgattacagcgcggaagaactattcgcaattttcaattccatgggtaagaaagcaaagttacaccttgacaccagaggcaagcgaagcggcaaaaaccgccattaccgatatgttcaacaacaaggggccgaactttggcaacgcgggagaaatcagagtcttctttga

SEQ ID NO: 67308 - protein, 561 aa, Unknown
  Obtained from environmental sample
  DOMAIN (79)...(232): Magnesium chelatase, subunit ChlI
  misc_feature (1)..(561): Xaa is any amino acid
MIEKDVIPSMDKNQQARLERSASVTDEDFKTIKAEDLPLKNKPKTADEILSELDGMIGLAKVKTAVRQLIETISMQKEREEKGGAAAKIQAIHLCFYGNPGTGKTTVARKLGALFQTMGLLPTDNMLEVTRADMVAGYVGQTAPLVNTVCDKALNGILFIDEAYDLCRDSYDSFGNEAVTALLKRMEDDRGKFVVIAAGYRKEMDDFLQANSGFRSRFTHFLELDDYNPDELFAIFASMAKSNGYKLSADGEKRAKEVITEIHRTRGKDFANGRSMRNLLDDTIRRMPERLASLTEAERTVEALSTITELDFLSERKEERTVDEILAELDAMVGMTDIKRTVREIANKIQIQKEQEEKDGTKSAGEGNNIVITGNPGTGKTTIVRTLGALFKAIGLLKTETVIEVNGNDLKGSYLGQSKDRVNEKCDEAMGGILFVDEAYVLADTQRGGAVDQYAKEAVEILMTRLENDRTKFVGVVAGYEREMQVFLDTVNPGMRRRFKHYLSLSDYSAEELFAIFNSMGKKAKLHLDTRGKRSGKNRHYRYVQQQGAELWQRGRNQSLL

SEQ ID NO: 67309 - DNA, 567 bp, Unknown
  Obtained from environmental sample
  misc_feature (1)..(567): n is a, c, g, or t
atgaactgtccaaacaaaatttgcaaacaagaaatccctaatgattcgtgtttctgcgaccaatgcggcgttcatttactgcgctgtgacaagtgcggctttatcggcaccggcaagttctgcggcagttgcggcggctcaatgtcagccattcaaccgccagcctcgccgtcttcatcaaagccggtcaacgaaacgccgaccgctcctccgccgtccaccacttcgccgtccacctcttcatctgctgcgaccgtagttgtatcgcttccctcggaaaaaattcttctgtgccaccttgacggttggaacatggaaatagcggacggcgatattcttggcagaacaaacggtccgcactcaggctcgcttggcaagttccctgtgatttcatcaaatcacgcaaaggttatgcgggcaaataacgaatggtttatcacggacttaaattccacgaacaagacttatgttaatggcgcgaaactggagccaaatgttccgataaagataaagcagaatgacgttgtcatgcttgccaatgttacatttacagtgagactcacatga

SEQ ID NO: 67310 - protein, 188 aa, Unknown
  Obtained from environmental sample
  DOMAIN (122)...(179): FHA domain
  misc_feature (1)..(188): Xaa is any amino acid
MNCPNKICKQEIPNDSCFCDQCGVHLLRCDKCGFIGTGKFCGSCGGSMSAIQPPASPSSSKPVNETPTAPPPSTTSPSTSSSAATVVVSLPSEKILLCHLDGWNMEIADGDILGRTNGPHSGSLGKFPVISSNHAKVMRANNEWFITDLNSTNKTYVNGAKLEPNVPIKIKQNDVVMLANVTFTVRLT

SEQ ID NO: 67311 - DNA, 921 bp, Unknown
  Obtained from environmental sample
  misc_feature (1)..(921): n is a, c, g, or t
atggaagatcaagctgagaaactgcgggaaattatgaagcggaaaaaagacggtacgggttcgccaagggcgtcgtcttcaaaatcgaacgtaaagccggctgataaggcccgcgttattaccgtcacttcaggcaagggcggcgtgggaaagaccaacctttccgttaatatggcccttgcgttcgcaaggttgggaagaaaagtcgttgtaatggatgccgaccttggtcttgccaacgttaacgtaatgctcaatatgatccccaagtacaatctgtaccatgttattaagaaacaaaaaacaatacgcgaaattcttgtggagacggaatacggcatttccatcgtggccggagcttcgggcttttcccaaatagccaacatgggcgaagaagacagaagagattttatctcggagcttgattcattatcaaacgcggacataatcatcattgacacaagcgcgggcgtttccagtaatgttttggattttatcgccgccgctgatgacgccgttattatcactacccctgaaccgaccgcgattaccgacgcttacggtataattaaaattatcgccaccgaatatgactcggttaatatgggtttgaaacttgtggtaaaccgcgcgaaaggcgcggctcaggcgaaaagcgtcgccgataggatgattaatatcgcaggccagtttttaaatttaaaacttgattatctgggattcatttatgacgacgtgtcagtctcccatgccgtacttaggcaaaaaccttttatggtggtggatccaaagtgcaaggctagtatttgcgttcaacatatcgtagaacgcatggacaggaataaaccgggagaaaccggcggttttggggcaatgtttaaaagacttttcaagtcttcgcagaatgaaactgtggtataa

SEQ ID NO: 67312 - protein, 306 aa, Unknown
  Obtained from environmental sample
  DOMAIN (38)...(300): 4Fe-4S iron sulfur cluster binding proteins, NifH/frxC family
  misc_feature (1)..(306): Xaa is any amino acid
MEDQAEKLREIMKRKKDGTGSPRASSSKSNVKPADKARVITVTSGKGGVGKTNLSVNMALAFARLGRKVVVMDADLGLANVNVMLNMIPKYNLYHVIKKQKTIREILVETEYGISIVAGASGFSQIANMGEEDRRDFISELDSLSNADIIIIDTSAGVSSNVLDFIAAADDAVIITTPEPTAITDAYGIIKIIATEYDSVNMGLKLVVNRAKGAAQAKSVADRMINIAGQFLNLKLDYLGFIYDDVSVSHAVLRQKPFMVVDPKCKASICVQHIVERMDRNKPGETGGFGAMFKRLFKSSQNETVV

SEQ ID NO: 67313 - DNA, 795 bp, Unknown
  Obtained from environmental sample
  misc_feature (1)..(795): n is a, c, g, or t
atgttggataagttgcgaaaagaaatgcctcttgaacagttggaaaattttgacattgtgcaggatcgtgttcttgaatggataggggagagcgtcagcatatataaagaagaagccgttatgcgcaagccaagaataatggttcttgtcggccctacgggagtcggaaaaacaacaacgatatcaaaacttgcggccatctacggcatagggaccgatgaaattcccgccgtggacgtaagacttataacgattgacaccttccgtatttgcgccaaggagcaacttgaacaaatagggagcattatgcagataccggtttcctgcgtgtcaaacaagcaggatataagaaaggaagtcgcgctttacggcgatgacattgatttgtttttaattgacactatcggcaatagccccaaagattcgtcgaagataggcgaaatgaaggagattcttgacggatgtcccaaaaacgcggaatatcatcttgttataagcgcggcgacaaaaacaaccgatatagaagagataatgcgtcagtttgagccttttaattataaatcagttatacttacaaagatggatgagactggcagttacggaaatataatttccgcccttgcggaaaaagggaagagtatttctttcattactaacgggcaggctgttcctgaggatataagaagggcgtctgtcgtgcgctttcttattaatcttgacggttttaaaataaaccgtgataaaatagagaagcgttttccttcgggggaagctgatcaatttaagtggagataa

SEQ ID NO: 67314 - protein, 264 aa, Unknown
  Obtained from environmental sample
  DOMAIN (45)...(195): GTPase of unknown function
  misc_feature (1)..(264): Xaa is any amino acid
MLDKLRKEMPLEQLENFDIVQDRVLEWIGESVSIYKEEAVMRKPRIMVLVGPTGVGKTTTISKLAAIYGIGTDEIPAVDVRLITIDTFRICAKEQLEQIGSIMQIPVSCVSNKQDIRKEVALYGDDIDLFLIDTIGNSPKDSSKIGEMKEILDGCPKNAEYHLVISAATKTTDIEEIMRQFEPFNYKSVILTKMDETGSYGNIISALAEKGKSISFITNGQAVPEDIRRASVVRFLINLDGFKINRDKIEKRFPSGEADQFKWR

SEQ ID NO: 67315 - DNA, 435 bp, Unknown
  Obtained from environmental sample
  misc_feature (1)..(435): n is a, c, g, or t
ttgagcgattgccgattacgctccatttctaaaaatatctggttccttacggaaaaagcgcggcaggccctcgccaaccagatatgcaaccaatacgccgatgaagacaagcacttgcgcgttcttacgattgatcccgcccttgagcaaagaatcatcgacgccaagtatgaaaccgcctcagggcttgtctgcgcccttgatcctccgacgcaaaaagcgtggattaaatcggtcgcgaaagcggtggcggctgttaaggaaaaaggttggatgcccgtaattttatgttccgagcaggcgcgtttccttgtcaagaattcaacggatcgtgaattgcctgatttggcggttctttccgtcccggaaattgttactggaattattcctgaagcggtagggatgatacgaatagaaaatatggcggagaattaa

SEQ ID NO: 67316 - protein, 144 aa, Unknown
  Obtained from environmental sample
  misc_feature (1)..(144): Xaa is any amino acid
MSDCRLRSISKNIWFLTEKARQALANQICNQYADEDKHLRVLTIDPALEQRIIDAKYETASGLVCALDPPTQKAWIKSVAKAVAAVKEKGWMPVILCSEQARFLVKNSTDRELPDLAVLSVPEIVTGIIPEAVGMIRIENMAEN

SEQ ID NO: 67317 - DNA, 870 bp, Unknown
  Obtained from environmental sample
  misc_feature (1)..(870): n is a, c, g, or t
atggcatacccttccactctaaaaggagaagatccaaacgggcttgaggtgatcaaaaaggtcgccagagacgactattttgacgcaattgagatcacctggacaaaggatgcagcccaacgcgccgaaatcaaaaagcttcttgaagtatcccacctgacggtttgttatggcgcgcagccaaggcttttgacaacaggcatgaacgccaatcatctggatgaggcggagcggaaaaaagccgaagcgactttgatagaagccattgacgaggctgaatacatgggagccaggggtatcgcttttctttccggaaaatgggcttctgaaacaaaggaacaatcctatgcccaactcttaaaaaccacgcgcaatctttgtgattacgcaaaaccaaaaggaatgaatatcgtctttgaggtttttgacttcgacatcgccaaggcttccatcattggcccggctccgctggcagcccgcttcgcggctgatatgcgtaccagtcataataactttgggcttatggtagacctttcccacattcccatgacctatgagacgccggaattcgtagtccgcaccctcaaaccctatatcgtccactttcatgtaggaaacaccgtgtgcagagatcctaaagcggaagggtacggggatgaacaccagcgtttcggtttccccaacggttcaaacgacacagcccaggtgctcgaatatctgcgcgtacttaaaaatgaagggttctttaacgcggaaaatccctatgtcttttcttttgaggtcaaacctttcaaggatgaagatccggatacagtggttgcgaacgccaaaagggtactaaaccgcgcctgggcgttactggaggattaa

SEQ ID NO: 67318 - protein, 289 aa, Unknown
  Obtained from environmental sample
  DOMAIN (18)...(217): Xylose isomerase-like TIM barrel
  misc_feature (1)..(289): Xaa is any amino acid
MAYPSTLKGEDPNGLEVIKKVARDDYFDAIEITWTKDAAQRAEIKKLLEVSHLTVCYGAQPRLLTTGMNANHLDEAERKKAEATLIEAIDEAEYMGARGIAFLSGKWASETKEQSYAQLLKTTRNLCDYAKPKGMNIVFEVFDFDIAKASIIGPAPLAARFAADMRTSHNNFGLMVDLSHIPMTYETPEFVVRTLKPYIVHFHVGNTVCRDPKAEGYGDEHQRFGFPNGSNDTAQVLEYLRVLKNEGFFNAENPYVFSFEVKPFKDEDPDTVVANAKRVLNRAWALLED

SEQ ID NO: 67319 - DNA, 966 bp, Unknown
  Obtained from environmental sample
  misc_feature (1)..(966): n is a, c, g, or t
gtgaagattgtagtgttagacggttataccgaaaatcccggtgacttaagctgggaagggttagaaaaatttggagaactaaaggtctatgacaggtcttctttaacagaccccaaagaagcaatcgcaagaatcggagatgcccaggcggtgtttacaaacaagaccccgataacggcggaagtattcaacgcctgcccctcgataaaattcgtcggcgtgctcgccacaggttataatgtggtggatgtgaatgccgccagggaaaagggagttccggtctgcaatattcccgcctatggaaccgcggctgtgggccagttcgccatcgctctgcttctcgaaatctgccaccacatcgggcatcacgataaggcagtccacgagggcaagtgggaaaacaacgcggactggtgtttctgggacttccctctgattgaactcgccggcaagacccttggcgttatcggctttggtcgtatcggacagacaaccggcgcgatagcaaaggccatggacatgaaagttattgcctatgacagtgttacaactgacagcggcaggcagattgcggaatatgtcagcctcgacaaactgctcgccgactccgatgtaatcgcgctccactgccccctgtttcccgaaacccagggcattattaataaggccaacatcgccaaaatgaaagatggcgtaatcattctgaataattcacgcgggccgctggtggttgaacaggacctggctgatgcccttaacagcggcaaggtatacgcggcgggtcttgatgtcgtttcttcggaaccgatcaaaggaaacaatcctttgctcaaagcgaagaactgctttattactccccacatttcctgggcatcaaaggaaagccgccagaggcttatggatttagccgtaagcaatctggccgccttcgtaaaaggcagcccaataaatgtggtaaacaagtaa

SEQ ID NO: 67320 - protein, 321 aa, Unknown
  Obtained from environmental sample
  DOMAIN (3)...(320): D-isomer specific 2-hydroxyacid dehydrogenase, catalytic domain
  misc_feature (1)..(321): Xaa is any amino acid
MKIVVLDGYTENPGDLSWEGLEKFGELKVYDRSSLTDPKEAIARIGDAQAVFTNKTPITAEVFNACPSIKFVGVLATGYNVVDVNAAREKGVPVCNIPAYGTAAVGQFAIALLLEICHHIGHHDKAVHEGKWENNADWCFWDFPLIELAGKTLGVIGFGRIGQTTGAIAKAMDMKVIAYDSVTTDSGRQIAEYVSLDKLLADSDVIALHCPLFPETQGIINKANIAKMKDGVIILNNSRGPLVVEQDLADALNSGKVYAAGLDVVSSEPIKGNNPLLKAKNCFITPHISWASKESRQRLMDLAVSNLAAFVKGSPINVVNK

SEQ ID NO: 67321 - DNA, 1401 bp, Unknown
  Obtained from environmental sample
  misc_feature (1)..(1401): n is a, c, g, or t
atggaatatatagactggtcaggaaaaaagatccctgttgccggcagttatgatctttttgtcgcgggcggcggatgcgccggagcaggcgcggctattgcggctggccgatcgggaattaagacctttgcggctgaacggatgttcgcgttaggcggaactatgacctgcgccctgatgagcaaaatcgccatctcatcctccaatcatgggattgccgaagaactgatcaaacgcctggacgcttatcaaaaatcaaattttctcgcttcgcgccatgaggtcccgattgatcccgaactgtgcaagtggatgcttgacaagatggttattgaggaggcgggggcggaagtccgattcgggacgacgatctgtgatgtagttgccaataaccgcaggattgaatatgtgatcattgacagcgtcaacggttttgaagcggttaaggcaaattactttgccgattgcaccggcgacggtcagttgggttttaaggccggagcttcttacgcggttggcaacgacgaaggttacggttcatctccctcgctcctgttccgtattgccaatgtggacatagaaaaactgatctccgaaatggaagcccatccggatacatacgcttcggaacggaacacctattccaaccataaattaagcccccgccaaaacagggaaaatatcgccaatgacaaatacgcccattttgccgatttcgttccccttatccgtcaaaaagcaaaggaaaaccccggttttctgacggaatgggagcttgagaagatccttcagcgggggatcatattcatgaaccagcctcagggaacccatgtattggtgaactcaaccaggataccctattttaagggcaatgacaacaaagagctttctgacgccatggtgtccggaagaaagcaaatagaagcgacgttccgttttatgaaagcgtttattccgggatttgaaaaatcttttatcatggataccgcaagcatgctgggcatacgcgagtcaagacggattacaggcgattatatttttaccagcgaggatgtgaacagttgccgtaaatttgacgacgcggtggcgagcaatttcggcggcgtggagattcatgcggccaacgggcagggtacaaaaattagtgagttgggaaaagacgatttttatcacattccctatcggagcattatcgcgaaggattttgacaacctatatgtggccggccgctgtttcagcgcaaatcacgccgcactttcggcagcccggaacatcgcctattgtatggcgctggggcaggctgtgggaagcgccgccgcgcagttgacacacagagggaaaatgaatattcgggaaatcgaaataaaagccctgcaaaaagaactggcctcaattatgtag

SEQ ID NO: 67322 - protein, 466 aa, Unknown
  Obtained from environmental sample
  misc_feature (1)..(466): Xaa is any amino acid
MEYIDWSGKKIPVAGSYDLFVAGGGCAGAGAAIAAGRSGIKTFAAERMFALGGTMTCALMSKIAISSSNHGIAEELIKRLDAYQKSNFLASRHEVPIDPELCKWMLDKMVIEEAGAEVRFGTTICDVVANNRRIEYVIIDSVNGFEAVKANYFADCTGDGQLGFKAGASYAVGNDEGYGSSPSLLFRIANVDIEKLISEMEAHPDTYASERNTYSNHKLSPRQNRENIANDKYAHFADFVPLIRQKAKENPGFLTEWELEKILQRGIIFMNQPQGTHVLVNSTRIPYFKGNDNKELSDAMVSGRKQIEATFRFMKAFIPGFEKSFIMDTASMLGIRESRRITGDYIFTSEDVNSCRKFDDAVASNFGGVEIHAANGQGTKISELGKDDFYHIPYRSIIAKDFDNLYVAGRCFSANHAALSAARNIAYCMALGQAVGSAAAQLTHRGKMNIREIEIKALQKELASIM

SEQ ID NO: 67323 - DNA, 1224 bp, Unknown
  Obtained from environmental sample
  misc_feature (1)..(1224): n is a, c, g, or t
ttgggggggaatataacttccgcctatgtggaaacctgcaactggtttttgaacaataccctgttttccgtccgaagcctgtacaaggaaatagaagacgggtataaagccgagtacgggcgcggacacgaaattcgggatcacgcgcccttcaggttcaacggcgagtacctaaaaattttcctggatgaattaatggccagggaaaacgtgaaaacgcttttttactcgtttgtaaatgacgtggttatcgagaacaaccgcataaaggcggtcatcatccagaccaagaaaggccccatggcggtaagcgcccaggtagtaattgacgcgaccggtgacggggatgtggctttcgccgccggggttcccttcaagcaggggcgggacaaggatggctactgccagcctggcaccctgaatttgcggcttgcgggggtggatccaaaatttttctgcgagggaccggcggaaaaagacaaactgaaggccattgataaaaaatttcagcaggattatgacgcgggtaaaatcctccttgactgcaaacggcgcgaactcattatggggcggctgacctcaggcggggttatcggcagtttgaattacccctgttcgtatatgattgatcctacgagcaacgttgatcttaccaaaggcgaaatggaatgccgtcagtatatcaagcagattatccattggatgcgggtgaacctgggcgggtttgaaaaacttgaagtggtttccatcgcgccggaacttggctttagggacagcaggcggattgagggaaaatacaccttaacaacggaagacattgagagtaacagatcctttgacgataccatctgcgttttcccgaggatatacgatatgcttacccccgacggaaacatgggcggcaacggcgcgctggaaggagaaggctacaaggggcatatcctggttttgcttgaaccaaacagcgcccgttcctataatattccttaccggactatgcttcccgtaaacgtcgacaatctcctgatttccggccgttgtatttcttccacccatgtggcgcagtcaagcatcagggccatttacgcctgtatgctgacaggccaggccgcgggaaccgccgccgctttgtcgattcgggataattgcgttccggaaaaggtcaatatccgcaaactccaggatcatctggtaaaacagggaatcgaaattccaaaaacgtga

SEQ ID NO: 67324 - protein, 407 aa, Unknown
  Obtained from environmental sample
  misc_feature (1)..(407): Xaa is any amino acid
MGGNITSAYVETCNWFLNNTLFSVRSLYKEIEDGYKAEYGRGHEIRDHAPFRFNGEYLKIFLDELMARENVKTLFYSFVNDVVIENNRIKAVIIQTKKGPMAVSAQVVIDATGDGDVAFAAGVPFKQGRDKDGYCQPGTLNLRLAGVDPKFFCEGPAEKDKLKAIDKKFQQDYDAGKILLDCKRRELIMGRLTSGGVIGSLNYPCSYMIDPTSNVDLTKGEMECRQYIKQIIHWMRVNLGGFEKLEVVSIAPELGFRDSRRIEGKYTLTTEDIESNRSFDDTICVFPRIYDMLTPDGNMGGNGALEGEGYKGHILVLLEPNSARSYNIPYRTMLPVNVDNLLISGRCISSTHVAQSSIRAIYACMLTGQAAGTAAALSIRDNCVPEKVNIRKLQDHLVKQGIEIPKT

SEQ ID NO: 67325 - DNA, 1902 bp, Unknown
  Obtained from environmental sample
  misc_feature (1)..(1902): n is a, c, g, or t
gtgaacgagtacggttttcttgaaacgccttaccgcaaggtggtaaagggcattgctacaaaggatattgaatacctgtcggccatggaggaggacaggtactacatagcccaggcttctgcaaggctgaacaactcagggagttttgcggacgcacaggtgccttgcagaaggcagggggattacactacgcgttccccgggcgatattgaatacatggacgtttctcccaagcagattatttcggtttccgcttccctcatcccgtttttggagcatgatgacgctaaccgcgccctcatgggttccaacatgcagcggcaggctgtgcccctggttttcacggaggcacccagggttggcacgggaatggaaggcaagtgcgcctacgattcaggggttctttgcaaagcccggcgggccggaacggtgattaacgttagttcccaggaagtttgcattgagccggacgataaaaatgataaaattcctgaaacaaacgacgatggcatcgatgtgtatcgccttgttaaatatcaaagaaccaatcaggacacctgctacaaccagcggccaatagtcaagcttggagaaaagatcgtcaaagggcaggtcatcgccgacgggcctgccacaaaaaacggcgaattggctttgggcaggaatgtcctggtgggtttcttgccatggaacggttacaactatgaggactcaatattaatttcccagagggtggtaaaggacgatatgttcacctccatccatataaaggaatttttcaccgaggtaagggaaaccaaacttgggcccgaaaagataacgcgggacattcccaatacttcggaaaaaagcctggacaaccttgatgcggaaggcattatccgcgttggggcaaaagtccgctccggtgatatccttgtgggcaaggtgactcccaaaagcgagaccgaaaccacccctgagtttaagctccttaactcgatattcggcgaaaaggccaaagaggtgcgggactcctcacttcgggtgccgcacggtatcgaggggacgatcattgacattcagcggttaaggcgtacggaaggggatgatcttaaccccggagtggatgaggtggttaaggtcttaattgccacgaaacgaaaactccgggaaggcgacaaaatggccggacgccacggcaacaaaggcgttgtagcccgcatacttccggaagaggatatgccctacatggaagacggcactccgcttgacctctgccttactcccctgggggttccctccagaatgaacatcggccagctccttgaaacagagctcggctgggctgcatcaaatctggacgagtggtattcggccccggtattccagtcgccttctaccgagcagatcgaagaaaagctaaaagaagcggggcttcccgttaccagcaaggcggtactcanggatggccgcaccggcgagccatttataaatcccattttctgcgggatcatttacttccttaagcttcaccacctggtggatgacaagatgcatgcccgttccaccggcccctattcgctggtgacacagcagccccttggcggcaaggcccagtttggcggccagcgcctcggagagatggaagtatgggctttggaagcatacggcgcggcgcatacattgcaggaactgctgacgatcaagtcggacgacatgacagggcgttccaaaatttacgaggccattgtaaagggggagccttccaccacggcgggcattcccgaatcgtttaacgttctggtgcaggaactgagggggcttgcgctggatcttgccatttttgacaataatagtaaacaaattcctcttaccgagaaagacgaagagctgattgcgaaatcgaagagtaatttctaa

SEQ ID NO: 67326 - protein, 633 aa, Unknown
  Obtained from environmental sample
  DOMAIN (535)...(611): RNA polymerase Rpb2, domain 7
  misc_feature (1)..(633): Xaa is any amino acid
MNEYGFLETPYRKVVKGIATKDIEYLSAMEEDRYYIAQASARLNNSGSFADAQVPCRRQGDYTTRSPGDIEYMDVSPKQIISVSASLIPFLEHDDANRALMGSNMQRQAVPLVFTEAPRVGTGMEGKCAYDSGVLCKARRAGTVINVSSQEVCIEPDDKNDKIPETNDDGIDVYRLVKYQRTNQDTCYNQRPIVKLGEKIVKGQVIADGPATKNGELALGRNVLVGFLPWNGYNYEDSILISQRVVKDDMFTSIHIKEFFTEVRETKLGPEKITRDIPNTSEKSLDNLDAEGIIRVGAKVRSGDILVGKVTPKSETETTPEFKLLNSIFGEKAKEVRDSSLRVPHGIEGTIIDIQRLRRTEGDDLNPGVDEVVKVLIATKRKLREGDKMAGRHGNKGVVARILPEEDMPYMEDGTPLDLCLTPLGVPSRMNIGQLLETELGWAASNLDEWYSAPVFQSPSTEQIEEKLKEAGLPVTSKAVLXDGRTGEPFINPIFCGIIYFLKLHHLVDDKMHARSTGPYSLVTQQPLGGKAQFGGQRLGEMEVWALEAYGAAHTLQELLTIKSDDMTGRSKIYEAIVKGEPSTTAGIPESFNVLVQELRGLALDLAIFDNNSKQIPLTEKDEELIAKSKSNF

SEQ ID NO: 67327 - DNA, 360 bp, Unknown
  Obtained from environmental sample
  misc_feature (1)..(360): n is a, c, g, or t
atgtcaatgatcgtcccctcgataccgtgcggcacccgaagtgaggagtcccgcacctctttggccttttcgccgaatatcgagttaaggagcttaaactcaggggtggtttcggtctcgcttttgggagtcaccttgcccacaaggatatcaccggagcggacttttgccccaacgcggataatgccttccgcatcaaggttgtccaggcttttttccgaagtattgggaatgtcccgcgttatcttttcgggcccaagtttggtttcccttacctcggtgaaaaattcctttatatggatggaggtgaacatatcgtcctttaccaccctctgggaaattaatattgagtcctcatag

SEQ ID NO: 67328 - protein, 119 aa, Unknown
  Obtained from environmental sample
  misc_feature (1)..(119): Xaa is any amino acid
MSMIVPSIPCGTRSEESRTSLAFSPNIELRSLNSGVVSVSLLGVTLPTRISPERTFAPTRIMPSASRLSRLFSEVLGMSRVIFSGPSLVSLTSVKNSFIWMEVNISSFTTLWEINIESS

SEQ ID NO: 67329 - DNA, 918 bp, Unknown
  Obtained from environmental sample
  misc_feature (1)..(918): n is a, c, g, or t
atgcgggacatacaggattttgattcgataatgattcggctggcttccccggagatgatcaggaactggtcttacggggaagtaaagaaaccggaaaccataaattaccggacgcttcgtccggaaaaagacggcctcttctgcgaaaggattttcgggacgacaaaggaatgggagtgttattgcggtaaattcaagtcgatacgttataaaggggttacctgcgaccgttgcggcgtagaggttacccactttaaggtgcgccgcgagcgcatgggccatatagagctggctgccccggtttcgcatatttggtattaccgctcggttcccagccgcatgggactgctccttgatatgacgatgactgccctccgttccgtgctgtattacgaaaaatatgttgtcattgacccgtccgacacggagctgaaaaaagggcagatgctctccgaggacgaatactttgaggagcaggaacggtatgggtatggcagtttcaccgcgggcatgggcgccgaggcgattcgcaccctgctggaaaacgtcaatctggacgaggaggcggcaaaactacgggaaaaaatgatagaaaaaggcgccaagagcgacaggaagctcctgaagcgcattgagattatcgaggctttccgcaattcccagaacaagcccgagtggatgatactcgacgtgctcccggtgatacctccggacttgcgccccatggtacagcttgacggcggaagattcgcgactgcgatctcaatgatctgtaccgccgggtcatcaaccgcaacaaccgccttaaaaggctgcaaacgcttaacgcccccgaaatcattatacgcaacgaaaagaggatgctccaggaagcggtggacgcgctttttgacaattccaagaaaaagaaagtggtaa

SEQ ID NO: 67330 - protein, 305 aa, Unknown
  Obtained from environmental sample
  DOMAIN (4)...(281): RNA polymerase Rpb1, domain 1
  misc_feature (1)..(305): Xaa is any amino acid
MRDIQDFDSIMIRLASPEMIRNWSYGEVKKPETINYRTLRPEKDGLFCERIFGTTKEWECYCGKFKSIRYKGVTCDRCGVEVTHFKVRRERMGHIELAAPVSHIWYYRSVPSRMGLLLDMTMTALRSVLYYEKYVVIDPSDTELKKGQMLSEDEYFEEQERYGYGSFTAGMGAEAIRTLLENVNLDEEAAKLREKMIEKGAKSDRKLLKRIEIIEAFRNSQNKPEWMILDVLPVIPPDLRPMVQLDGGRFATAISMICTAGSSTATTALKGCKRLTPPKSLYATKRGCSRKRWTRFLTIPRKRKW

SEQ ID NO: 67331 - DNA, 3480 bp, Unknown
  Obtained from environmental sample
  misc_feature (1)..(3480): n is a, c, g, or t
atgctccaggaagcggtggacgcgctttttgacaattccaagaaaaagaaagtggtaaagggttcttccaaccggccgcttaaatcgatcagcgatatgctcaagggaaaacagggacgcttccgccagaaccttttgggcaagcgcgttgattattcaggccgctcggtcattaccgtcgggccggatttgaagatgtggcagtgcgggcttcccaccaagatggcgattgaactgttcaagcccttcatcatgaaaaagctcgttgacaaggatgttgtttancatatcaagaaagccaagatgctgcttgaagcggagagcgcggaaattttcgcaatcctcgacgaggtggtaaaagaacatccggtgctgttgaaccgcgcgcccactttgcaccgccttggcatacaggcctttgagccggtgcttgtggaaggcaaggcaatcaaactccatccccttgtctgccacgctttcaacgctgactttgacggcgaccagatggccgtccacgtgccactgacccaggcggcccagatggagtgctggaccctgatgctctccgcccgcaaccttcttaacccggcgaatggcagaaccatagtgttcccatcccaggacatggtgctgggaattaacttccttacccgcgttaaaccgaacggcaagcggccggagtcttccaatccggaagccaaaaacaagcctccctattattcctccccggaagaagcccttatggcggtggagaataaattcctcgattggggatccctcatacgcgtcaaacccgtgaaattccctatatgggacaagattgaccatgaggcggtaatccccgcggacggaatcatagaaaccaccgtcggaaggctgatattcaacgaggaacagcccaaagagattccctttatcaattatgaaatgaaagacaaggagcttcgcgcccttattgagcatgtctttaagaaaaacggctcatggattacggtaaaaatgctggacgcgatcaagtcaaccggctaccgttatgcgacagttttcggcgccaccatcggcattgacgacattgtggttcccaaagaaaagccggaaatgatcgataaggcaaacagggaagtcgaggcgattcaggcccagtggcgcaagggcattatgacccaggaggaacgctacaataaagtcgtcgaggtatggaccaagaccaacgacgagcttacaaacatcatgatgaaaaccctagaggcggatcatgatggctttaactcgatttacatgatggcaaactccggggcgcgcggaagccgcaaccagatacgccagcttgccgcgatgcgcggccttatggccaagccgtcaggcgccattatcgagctgcccatacgatcgaacttcaaggaagggctttccgtcattgagttctttatttcaactaacggcgcgcgcaagggtctcgcggacaccgcccttaagacctccgaggccggttaccttacgcggcggcttgtggatatagcccaggacgttgttgtaaacgagaatgactgcggtaccatcaacggaatttcctacaccgcagtcaaggaaggcgaagatatcgtggagcctttgagcgaccgcattatcggacgctacactatcgagcccgtgaagcatccttttaccggcgaaattatcgtcgatgttaacgaggagattaccgaggaaatcgccaaaaagatcaccgccgccgaagttaattccgtgcgtatacgcaccgttctgacctgtgaggcgaaacacggcgtctgccgtatgtgctacgggcgcaacctggcgacaaaccgcacggtagaaatcggagaggcggtgggaaccatcgccgcccagtcaatcgggcagccgggaacacagcttaccatgcgcacattccatatcggcggcacggctaccaaactcagcgaggaaaaccgtattttccttaaatatccggtttatatcagcgacgttataggaacccacgttgtgcttgacgacgggcgctggcttttcacgcggcgcggccacgcgattgtaaataaagtaatgcatgaatacccaattgaggacagcgatcagatcatggtagaaagcggtcagcgggtcaatcccgatgccgtaattatcaagcgcggctctgttgatataaaagcccctgacagcacatatgtccaaatcctgaacagccccgacgggcattccaggatactctacctgatcggtaaagagcaaaagatcgagataaggaacggctctgatttccttgttaaaaaaggaacggtggttgaaaaggaaaaaaccatcgccacatttgatcctttctccgatcccatcattgccgagcacagcgggactgttaaatacgaggatattatttccggaactacccttaaagaggaaatggacgaggttacggggaacatcgaaaagcgcataacggaattccagcttgaaaacaagcagccccgtatccatatccttgacgacaatgacaacgagctaatatcctaccacctccccggtggttcgattctgcaggttgaggacggtgacaggatcaaggcgggccgcaccattgccaagatactcaaagagtccgcccgcgccatggatataacttccggccttccccgcgtcagcgagctgtttgaagcgcgcaagccgagaagcccggcggaactcgccaatgtgtccggagtggtgctttttgagggaattgccaagggcaaacgcaagatcacggttaaagatacgttagaccgtgaataccaccattttatccccatggtgaagcgccttctggtacgcgacggcgacacggtggaagccggtgagcctctatgcgccggaaatatcaatccccatgacatattaagtatcatgggagaaagctacctccagacctatctgatggacgaaatccagcaggtataccggcttcagggcgtgtcgattaacgacaagcatattggcgttatagtccgtcagatgatgcggaaagttgagatccgttttgtgggcgacacaagatttatctatggccagatggtagacaagtaccgcttccacgaggaaaacgccagagttataaaagaaggcggtcagcccgctattgcccagcctttgttccagggcatgaccaaggcggcgctgaatatcgattcgttcctttcggcggccagtttccaggaaaccacccgtgtactgaccaacgccgccattgccggcagcaccgactatctgcgcggcctgaaggaaaatataatcattgggcatccgatacctgcgggcaccggcatgaagcgttaccaggacatcaagctgtttgacgaagacagccaggatctggaaaagcagatgcaggagatccttgaacagcgcaggcttgaggccgagtttgccgcagaagccgcaaaagcggcggagatgatgcctgtggaagatgtggaggaagactaa

SEQ ID NO: 67332 - protein, 1159 aa, Unknown
  Obtained from environmental sample
  DOMAIN (387)...(467): RNA polymerase Rpb1, domain 4
  misc_feature (1)..(1159): Xaa is any amino acid
MLQEAVDALFDNSKKKKVVKGSSNRPLKSISDMLKGKQGRFRQNLLGKRVDYSGRSVITVGPDLKMWQCGLPTKMAIELFKPFIMKKLVDKDVVXHIKKAKMLLEAESAEIFAILDEVVKEHPVLLNRAPTLHRLGIQAFEPVLVEGKAIKLHPLVCHAFNADFDGDQMAVHVPLTQAAQMECWTLMLSARNLLNPANGRTIVFPSQDMVLGINFLTRVKPNGKRPESSNPEAKNKPPYYSSPEEALMAVENKFLDWGSLIRVKPVKFPIWDKIDHEAVIPADGIIETTVGRLIFNEEQPKEIPFINYEMKDKELRALIEHVFKKNGSWITVKMLDAIKSTGYRYATVFGATIGIDDIVVPKEKPEMIDKANREVEAIQAQWRKGIMTQEERYNKVVEVWTKTNDELTNIMMKTLEADHDGFNSIYMMANSGARGSRNQIRQLAAMRGLMAKPSGAIIELPIRSNFKEGLSVIEFFISTNGARKGLADTALKTSEAGYLTRRLVDIAQDVVVNENDCGTINGISYTAVKEGEDIVEPLSDRIIGRYTIEPVKHPFTGEIIVDVNEEITEEIAKKITAAEVNSVRIRTVLTCEAKHGVCRMCYGRNLATNRTVEIGEAVGTIAAQSIGQPGTQLTMRTFHIGGTATKLSEENRIFLKYPVYISDVIGTHVVLDDGRWLFTRRGHAIVNKVMHEYPIEDSDQIMVESGQRVNPDAVIIKRGSVDIKAPDSTYVQILNSPDGHSRILYLIGKEQKIEIRNGSDFLVKKGTVVEKEKTIATFDPFSDPIIAEHSGTVKYEDIISGTTLKEEMDEVTGNIEKRITEFQLENKQPRIHILDDNDNELISYHLPGGSILQVEDGDRIKAGRTIAKILKESARAMDITSGLPRVSELFEARKPRSPAELANVSGVVLFEGIAKGKRKITVKDTLDREYHHFIPMVKRLLVRDGDTVEAGEPLCAGNINPHDILSIMGESYLQTYLMDEIQQVYRLQGVSINDKHIGVIVRQMMRKVEIRFVGDTRFIYGQMVDKYRFHEENARVIKEGGQPAIAQPLFQGMTKAALNIDSFLSAASFQETTRVLTNAAIAGSTDYLRGLKENIIIGHPIPAGTGMKRYQDIKLFDEDSQDLEKQMQEILEQRRLEAEFAAEAAKAAEMMPVEDVEED

SEQ ID NO: 67333 - DNA, 1335 bp, Unknown
  Obtained from environmental sample
  misc_feature (1)..(1335): n is a, c, g, or t
gtgaattatttaattcccgtaggagcgaacatccccagcgaaaattttctgcgggaacgcgcggtttccgtccagtcaatgctggatgaattgaacgacgcggggaacgcgcttaacgtggtggtgcttgacgcgtgcagagacaacccctttagctggaaaagaagcggcagtcggggtcttacggtagttgcaaaccagcccgcggacagtattatcgtatacgcgaccagcgcgggttccaccgccgcggacggaaccggcagaaacggactttttaccagccacttgctaaacaaccttaaaacgcccggacttgaagtaaaagaggtatttaaccgcaccggcgcggatgtcgcccgcgcaagcaacagaacgcagatacccgccatatacagccagtattttgataccgcgtatcttggcagtaagccgcaggttgccacggtgcatacaacacagccctcacaaacaacgcaacctcagcagactactacgcaacccgcgcaaaccacacagccgcaacaaacaacgcagacaactacaacgcaacagaccgcgtccgtacccgccaacatggtacgcatacaaggcgggacattcacaatgggcagtccctctaatgagccggggcgtttcagtgctgaaggcccgcaacatcaggtaacggtgagcggcttttacatggggaagtatgaggtaacgcaggcggaatggcaggaagcgatggggacgaaccccagccatttcaaaggggacagcctgccggtggagagcgtaagctggtttgaagcggtagagtactgcaaccgtttaagcctgcgggaagggctggctcccgcgtatgtagtgaacgggactgaggtggagtggaaccgcagggcaaacggctaccgcctgcctaccgatgctgaatgggagtacgcatgccgcgccgggacagcgacgccgtttaacacgggaaacaacatcgctaccggacaggcgaattacgacggcaactatccctacaacagcgtaaggggcctattgttctttttcccccgtaaatggctatgccgcgaaaggacaacgcctgtcgggagtttcgcgccgaacgcgtggggcctgtacgacatgcacggcaatgtctgggagtggtgctgggattattacagtaacccaaatacgacgccattgtcagacccgaccggacccgcttccggcacgcacaggataaaccgcggcggcggctggtcctctcccggaaagcttctgcgttcggctgttcgcgccagcgaccgccccgaaaccgcggggagtaatttggggttcaggctggcgaagaataaataa

SEQ ID NO: 67334 - protein, 444 aa, Unknown
  Obtained from environmental sample
  DOMAIN (189)...(442): Domain of unknown function (DUF323)
  misc_feature (1)..(444): Xaa is any amino acid
MNYLIPVGANIPSENFLRERAVSVQSMLDELNDAGNALNVVVLDACRDNPFSWKRSGSRGLTVVANQPADSIIVYATSAGSTAADGTGRNGLFTSHLLNNLKTPGLEVKEVFNRTGADVARASNRTQIPAIYSQYFDTAYLGSKPQVATVHTTQPSQTTQPQQTTTQPAQTTQPQQTTQTTTTQQTASVPANMVRIQGGTFTMGSPSNEPGRFSAEGPQHQVTVSGFYMGKYEVTQAEWQEAMGTNPSHFKGDSLPVESVSWFEAVEYCNRLSLREGLAPAYVVNGTEVEWNRRANGYRLPTDAEWEYACRAGTATPFNTGNNIATGQANYDGNYPYNSVRGLLFFFPRKWLCRERTTPVGSFAPNAWGLYDMHGNVWEWCWDYYSNPNTTPLSDPTGPASGTHRINRGGGWSSPGKLLRSAVRASDRPETAGSNLGFRLAKNK

SEQ ID NO: 67335 - DNA, 633 bp, Unknown
  Obtained from environmental sample
  misc_feature (1)..(633): n is a, c, g, or t
atgctggcttgctgcctgcactttatgcagggtacgccttacgtttatcagggcgaagaactgggtatgaccaacgccccctttacagacatcggcgattaccgcgatcttgaaacgattaatgcgtataacgccctggtggtacaggaaaaacgtattgcccaagcggacatgcttcgctatatgcgcctgaaaagccgcgataattcgcgtaccccgatgcactggaacagcgggcccaacgcgggatttacaaccggcgatccatggattatgctgaatcccaattatcgtgaaatcaacgctgaagaacaaacgcggcgtgccagttcggtttttttattttaccagaccctcattcaactgcgaaaaaaaatggatattataacactgggcaattttgaattactgctgtccgatgacccggatttatttgtatacacccgcgcttttcagcatgaggaattactcgttatctgtaatttttcatgcaaggaaaggacgttcacgccgccggaacgggttcaagaagcggaactgcttctgtcgaatgaggaagcggctttacaagctgtggattgtaaggctttagggcctttcgccgcgaccgtatattaccagataaaacaatag

SEQ ID NO: 67336 - protein, 210 aa, Unknown
  Obtained from environmental sample
  misc_feature (1)..(210): Xaa is any amino acid
MLACCLHFMQGTPYVYQGEELGMTNAPFTDIGDYRDLETINAYNALVVQEKRIAQADMLRYMRLKSRDNSRTPMHWNSGPNAGFTTGDPWIMLNPNYREINAEEQTRRASSVFLFYQTLIQLRKKMDIITLGNFELLLSDDPDLFVYTRAFQHEELLVICNFSCKERTFTPPERVQEAELLLSNEEAALQAVDCKALGPFAATVYYQIKQ

SEQ ID NO: 67337 - DNA, 861 bp, Unknown
  Obtained from environmental sample
  misc_feature (1)..(861): n is a, c, g, or t
atggcggattttgacaggctcttaaaagaagcgcatgaacttggtttgaaggttgtaatggatttggttgttaatcatacttccgatcagcatccttggtttatcgaaagccgaagcggcaaagataaccccaagcgggattattacatttggcgcgacggcaaaggcggcagaccgccgaataattggcaggcatggttcggcggatcagcgtggacattagacgaaacaacaggacagtactttcttaacattttttcaccgtatcagcctgatttgaattgggaaaatcccgttacacgatcctctatttacgatatgatgcgctggtggctggacaagggcattgacggttttcgaatggacgcaatcagtcttatttccaaacccaaagaatttattgacggcgatataaaaaaaattatccccaatggtcatagtgttcatgaatttttgcgggagatgaggcgcgaggtattatcaaaatacgacattatgaccgtaggcgaaacaggcggagtaactgctgacgaagcggtaaaatacgcaaacgccgacggcacggaactcgacatggtatttcaatttgaacaaatagaattggacggcggagaaacgtttaagtggaatgatcgcaaaatcaatcttgtcgaattaaaagaagtattttcccgctggcagacaaaattgcacgaccgcgcatggaacagcttatactggagcaaccatgatcagccccgtgttgtttctcggcttggaaacgacaaanagcaccgcgagaaatcggcaagatgctggcttgctgcctgcactttatgcagggtacgccttacgtttatcagggcgaagaactgggtatga

SEQ ID NO: 67338 - protein, 286 aa, Unknown
  Obtained from environmental sample
  DOMAIN (1)...(281): Alpha amylase, catalytic domain
  misc_feature (1)..(286): Xaa is any amino acid
MADFDRLLKEAHELGLKVVMDLVVNHTSDQHPWFIESRSGKDNPKRDYYIWRDGKGGRPPNNWQAWFGGSAWTLDETTGQYFLNIFSPYQPDLNWENPVTRSSIYDMMRWWLDKGIDGFRMDAISLISKPKEFIDGDIKKIIPNGHSVHEFLREMRREVLSKYDIMTVGETGGVTADEAVKYANADGTELDMVFQFEQIELDGGETFKWNDRKINLVELKEVFSRWQTKLHDRAWNSLYWSNHDQPRVVSRLGNDKXHREKSARCWLAACTLCRVRLTFIRAKNWV

SEQ ID NO: 67339 - DNA, 1173 bp, Unknown
  Obtained from environmental sample
  misc_feature (1)..(1173): n is a, c, g, or t
atgcgcctcatgcatagcctttcaaaatacaaagcaagcggtaaacgcgatgtatacccttatgacgaatatcaatacgataccgattctggcgtgcagtattattattctttcttacgtcgtttttttcaggaagaatatcaaaattgtaccgttgtttattatcgcgttgaccgtcgcgggctccagcctgcgcgacctttttgttctcaaagcggaacggtgccgctgttctggatggcgccctattctttcgttttcatggtaattatcatttacgcgatgctgatgaccgaggaaaattttattcagggcgctttttcccgctaccttgcgcccgaaattatttccgaaattgtcaaagaccccaacaaattgaatcttggcggcgaaaagcgcgaaatgaccgcgttatttacagacattcagggtttctccgcaatttccgaacagcttgatcccgctcaccttgttcggctcttaaacaagtaccttaccggaatgagcaacattatcatggaaaatcttggaaccatagacaaatacatgggagacgcgattattgcgttcttcggagctcctttgttcaatcccgatcacggcgctcttgcctgccgcagcgccctcgcgattaaggcggcggagaaggagttaaacgaaacaataatccgcgaaaagttgagtcccgttcccatttttacccgcataggaataaacaccggcgaaatggtcgtaggcaatatgggcgcagaaaaaaagatggattataccattatgggaaacgcggtaaatctcgcgtcgcgcattgaaggggtaaacaagtattaccatacaggcggcatattgataagcgaatacacccgcgcgaaaatcggcggcgaatttccgctgcgccgcatcgattgcgtccgcgtggtggggataaccgcgcctctgcgtctgtatgaattgctgcctatggatactgatcaaagcgcggtggaaatttgggagaaagcgcttgatttgtatgaacgcagggattttaaaaaagcttttagcctgtttatttcgctattaaagcgttatccgaaagacaatgccgccaaattttacgcgctgcgatgcaaggcgtttgttgaaactccgccgccggataattgggacgcggtgaggaatttgacgaataaatga

SEQ ID NO: 67340 - protein, 390 aa, Unknown
  Obtained from environmental sample
  DOMAIN (130)...(319): Adenylate and Guanylate cyclase catalytic domain
  misc_feature (1)..(390): Xaa is any amino acid
MRLMHSLSKYKASGKRDVYPYDEYQYDTDSGVQYYYSFLRRFFQEEYQNCTVVYYRVDRRGLQPARPFCSQSGTVPLFWMAPYSFVFMVIIIYAMLMTEENFIQGAFSRYLAPEIISEIVKDPNKLNLGGEKREMTALFTDIQGFSAISEQLDPAHLVRLLNKYLTGMSNIIMENLGTIDKYMGDAIIAFFGAPLFNPDHGALACRSALAIKAAEKELNETIIREKLSPVPIFTRIGINTGEMVVGNMGAEKKMDYTIMGNAVNLASRIEGVNKYYHTGGILISEYTRAKIGGEFPLRRIDCVRVVGITAPLRLYELLPMDTDQSAVEIWEKALDLYERRDFKKAFSLFISLLKRYPKDNAAKFYALRCKAFVETPPPDNWDAVRNLTNK

SEQ ID NO: 67341 - DNA, 1023 bp, Unknown
  Obtained from environmental sample
  misc_feature (1)..(1023): n is a, c, g, or t
ttgaaaatttctactttccacattatgtcaaaacccatatcattaacaggcattaaaccaacaggcactccgcatttaggaaattatttaggtgctataaaacccgctctggaattgagggaaaagtacagcaccgtttattttatagcggattaccacgccttgacttctgtacacaacagagaggaaatgcgaagcaacacttacaaggttgcagcaacttggctcgctctagggcttaatccagaagagggtttattttacaagcaaagcgacattccagaaatttttgaactttcgtggctgctctcgtgctttacgcccaaaggttttatgaaccgcgcccacgcttacaaagacaaggtggcaaaaaaccaagcggctggcacagaccccgatgatggcgttaatatggggctttacagctatccgtgccttatggacgcggatattctaatgtttaaatccgatattgttccagttggcaaagaccaaaagcagcacgttgaatttagccgcgacattgcggagcgtttcaacaagcattatggcaaaaatgtttttgttttgccggaggcggtaatgcaagcggacaccgatataatccctggcttggatggccgcaagatgagcaaatcttatggcaataccatagaaatttttttagaaccaaaggaattgaaaaacaaaatcgggaaaatagtcacaaatagccaaccgatagaagagccaaaagagcctgagaaatgcaatgtgttcgcattgtataaactttttgcgagcgaagagcgagcagatgctttggcagctcgctatcgtgcgggcggcatgggctggggtcacgctaaagatgctttgagggaacttttggaagatcgttttgcaaaaccgagggaacaatacaaagcccttttagcagataccgcgcagatagataaaatcctcgcttatggcgcggaaaaagcaagggcaatagccaagccttttatgcaggaaattagggacaccgtgggggtggtttaa

SEQ ID NO: 67342 - protein, 340 aa, Unknown
  Obtained from environmental sample
  DOMAIN (11)...(295): tRNA synthetases class I (W and Y)
  misc_feature (1)..(340): Xaa is any amino acid
MKISTFHIMSKPISLTGIKPTGTPHLGNYLGAIKPALELREKYSTVYFIADYHALTSVHNREEMRSNTYKVAATWLALGLNPEEGLFYKQSDIPEIFELSWLLSCFTPKGFMNRAHAYKDKVAKNQAAGTDPDDGVNMGLYSYPCLMDADILMFKSDIVPVGKDQKQHVEFSRDIAERFNKHYGKNVFVLPEAVMQADTDIIPGLDGRKMSKSYGNTIEIFLEPKELKNKIGKIVTNSQPIEEPKEPEKCNVFALYKLFASEERADALAARYRAGGMGWGHAKDALRELLEDRFAKPREQYKALLADTAQIDKILAYGAEKARAIAKPFMQEIRDTVGVV

SEQ ID NO: 67343 - DNA, 1479 bp, Unknown
  Obtained from environmental sample
  misc_feature (1)..(1479): n is a, c, g, or t
gtgaaaaaagcgatggaagccgggcttaaaacattgatactcgtcccagaaataaatttaacaccgcaaacacaaaaacgctttgaagattttctaggcatagaaattccaattctgcactccggtcttggggcaaaacaaaaacgtaaaacatggcagggattgctggcacaagagacacagattttaatgggaacacgctccgccattctcgctccttttgaacctcagctaataattatagacgaggaacacgattcctcctataaacagcaagaccctgcaccccgctataacgttagggaaatggcttttcacattgcgcataaatatggagcgttggtggttttgggttctgcaacgccatctatggaaacttattacaatgcaaaaataggcaacctgaaactcatagagatgaaaacccgtccaggtggattgccgctcccgcaagttacgatagtggatattaaagaacagagaaaaaaacaggacaaagatttgatgttatcatcggttttgcgcgatgcgctttcaaaaaccattagcgagggcaatcaagcgataattctgatgaatcgcaggggctatagcacaaacagaatttgcgaggattgcggaaacccgcagagctgcacggattgcaatgttactttagtttatcacaggcaatacggtaaactcgtgtgccattattgcggaaaacttttccagttggatattcattgcaaatgcggttcagaaaaattcgcgtttttcgggaacggcatagaaaaagcggaagaggaacttagcgagtggctaccggatgcaaagattcttcgcttggattccgacaccacaagcgggattggggcaacggaaaaactcctgcaaaaattcagagataggcggtgcaacatacttttgggaacacagatggtggcaaaggggcacgacttccccggagtttctttagtaggggtgctttacgcagacatagggagcggcattcctgattttcgtgccggagaaaaatattttcaattgctgactcaagtcgctggcagagcggggcgttttttggaaaattcctctgtgataatacagaccttttgtccggaaaatccggttatgcaattcgccataaaacacaactacgcagatttttcaaaatgggaactaaaagaaaggcaagaggctttctaccccccgttctgcaaaataacccaaataaagatgcaatcaaaaaacaagaaaaaattagaggatacagcgagcgctctccattccctgctcttagcttgcaactctcagctcgtgattttaggcccagcggaaccttttatatccaaggtgcagaacagccaccgcatgattttgactttaaaagcagtcaacgccacggatataaaaaatgcgattaaaaatacgcttgcaaatccagattttataaaaaccgcaaaaggcgtggagattcgcatagatagggatgcttga

SEQ ID NO: 67344 - protein, 492 aa, Unknown
  Obtained from environmental sample
  DOMAIN (1)...(130): DEAD/DEAH box helicase
  misc_feature (1)..(492): Xaa is any amino acid
MKKAMEAGLKTLILVPEINLTPQTQKRFEDFLGIEIPILHSGLGAKQKRKTWQGLLAQETQILMGTRSAILAPFEPQLIIIDEEHDSSYKQQDPAPRYNVREMAFHIAHKYGALVVLGSATPSMETYYNAKIGNLKLIEMKTRPGGLPLPQVTIVDIKEQRKKQDKDLMLSSVLRDALSKTISEGNQAIILMNRRGYSTNRICEDCGNPQSCTDCNVTLVYHRQYGKLVCHYCGKLFQLDIHCKCGSEKFAFFGNGIEKAEEELSEWLPDAKILRLDSDTTSGIGATEKLLQKFRDRRCNILLGTQMVAKGHDFPGVSLVGVLYADIGSGIPDFRAGEKYFQLLTQVAGRAGRFLENSSVIIQTFCPENPVMQFAIKHNYADFSKWELKERQEAFYPPFCKITQIKMQSKNKKKLEDTASALHSLLLACNSQLVILGPAEPFISKVQNSHRMILTLKAVNATDIKNAIKNTLANPDFIKTAKGVEIRIDRDA

SEQ ID NO: 67345 - DNA, 3141 bp, Unknown
  Obtained from environmental sample
  misc_feature (1)..(3141): n is a, c, g, or t
atggtacaagaagctgtggcggcaggcggcaacatagtatttctgcagccctatgccgatatagcgactacctctgttatcatcacttacgccaaagccatgtttgacgatgagggaaccttgttaggcgtaatcgcgctgaacctgcggttcaacaggataatcgaatatatagtcaacgcgaacttcggcactttgggctacggtttcctgttaagcgaacagatggaactcctctcccattccaacgcgcaatttttcggcaggaaactcagcgaagtggacagcagcgccgccgtcattgagaataagctgaaaaggggagagaccattaccgaatacaagacaaaaaatcttgaaggcgattcttctgtcttttttatccggcagattgaaaacggctggtatataggcgttataacggctgaaaatgattattaccgggaactcagaaggataaggcttgtcctcatcattttgggaacgctgctggcgtccggcctaagcgccatcctgcttaagattatttcggcaagggcaaaaagcgaagaacgcgtgcggattatgtttgactccatgcctttaggagcgaatattcactatagatccggttttgttgactgcaatgagaacgcggtcaagctgttcgggttatccagcaaacaggaatactttgataaatttcaatatctctcgcctgagtaccagccggacgggagactgtcaagcgaaaagagagtggaatatatcgagaaggctttttccgagggttattgccgttttgagtggacgcaccaacaactcaacggagacccaatcccctgtgaaattacgcttgtgcgcgttaattatggcaatgaacttgccctggctgtctatatactcgatctgcgccaattaaaatctactattgaacaagtatccgaatctgaacaatcaatcagtattttgtcaaatatattgaacgggcttgatgccatgatctatgttaccattccggaaaccggcgagattctctttgtaaataataacatgagagaacatttcaatgttaaggatgacggcatcggccagctatgttataaggttttccagacaggaatgaacgaaaaatgcagtttttgtccctgccaccagcttgataaagacccggacagcattgtcgtatgggaagaacacaacgaattaacgaaacatatataccgcaacactgatcgttatatagagtggcagaagggcaagcttgcccatatccagcactcagtcgatataaccgaattgattgccgcaagagagagggctgaacagagcagccgcttcaagagccagttcctgtcgcgcatgagccacgaggtacgcacgccgatgaacgccattttgggaatcacggaaattcaaatgcaggatgagacgctttctcatgatatgcaggaagtttttggcaagatttacaattccggttatttactgctcggcataatcaacgatatattggatctttccaaaattgaggcgggcaggctggaattattaccggtcaactatgacgttccaagcctgatcaacgacaccgtttatctgaatatcatgcggttcgacagcaagccattcgcgtttgatcttgaagtggatgagaacattccgttaacgctgttcggcgatgaactgcgtatcaaacagattcttaacaacctgctttccaacgcattcaaatatacggataccggcgaagtttcgctgtcagttaacgccgagtattcatctcaacaatgggcgcagttaacgcttatattccgcattaccgatacaggacatggaatgtcagaagagcaggtggttaaattgttcgatgagtacacccgttttagcatggaagccaacaagaaagtcgaaggcgtcggccttggcatgagcattacaaaacaccttgtgcatatgatgaacggggaaattaaagtggaaagtaagttaggcaaaggttcggtttttaccgtaagcctgccccaggggattctgggtaccgaagtgttaggaaaagaattgtctgaaaacgcaagtaaattcactgtcggaagatccgcccaaataaataacgcgccgcaatttgtccgtgattttatgccttacggcaaagttctggttgtggacgacgtggaaacgaatttgtatgtcgcaaggggattaatggctccttacggcttgtcgattgaaaccgcctcaagcgggtttgaagcaattgaaaaaatcaagaacggcgcggtttttgacgttatttttatggatcattttatgccgaaaatggacggtatagaaacggtaaaaaaactgcgcaatatggattatacgcatccaatcatcgcgctgacggccaacgctctggcagggcaagctgaagtttttctggacaacgggttcgacgggtttatttccaaacccatagacataaggcagcttaacgcttcgctgaacaagtttatacgcgacaagtacccgtctaaggtgattgatacggcgcgggatcaggccgtaaagctcaatacgcccaaggctcanactacatttgccgcggatatacgcccggcatcaaatcctgaattatcagcaatatttataagagacgccgaaaaagctcttgacgagctgaaaaagatgttatctgacacattcagcgataaagacgactttctgcaatatgttatcagcgtacactcaatgaaaagcgcgcttattaacataggcgaatacgagctttccgactccgcgttaaaattggaactggccggccgcgcgaaaaatatatcggtaataatgacagaaactcccaggtttttggaacagcttgaggatgtaataaaaaagaacaaacctaaagaagatgccggcgccgcaaacggcgccgtaaaggaagataacagcaagttgaatttgaaagaaaaactgcgcgaaatccggacggcatgcggaaagaatgacggagtaagcgccaataaaattttgtctgaacttaggcggaaagaatggcccagatacacaagagatttacttgacactatcgcagaagatttattgattaatgactttgatgaagccgccaaacttattgaagattatgaattaataattaaatcaaaaaataaatga

SEQ ID NO: 67346 - protein, 1046 aa, Unknown
  Obtained from environmental sample
  DOMAIN (14)...(94): Cache domain
  misc_feature (1)..(1046): Xaa is any amino acid
MVQEAVAAGGNIVFLQPYADIATTSVIITYAKAMFDDEGTLLGVIALNLRFNRIIEYIVNANFGTLGYGFLLSEQMELLSHSNAQFFGRKLSEVDSSAAVIENKLKRGETITEYKTKNLEGDSSVFFIRQIENGWYIGVITAENDYYRELRRIRLVLIILGTLLASGLSAILLKIISARAKSEERVRIMFDSMPLGANIHYRSGFVDCNENAVKLFGLSSKQEYFDKFQYLSPEYQPDGRLSSEKRVEYIEKAFSEGYCRFEWTHQQLNGDPIPCEITLVRVNYGNELALAVYILDLRQLKSTIEQVSESEQSISILSNILNGLDAMIYVTIPETGEILFVNNNMREHFNVKDDGIGQLCYKVFQTGMNEKCSFCPCHQLDKDPDSIVVWEEHNELTKHIYRNTDRYIEWQKGKLAHIQHSVDITELIAARERAEQSSRFKSQFLSRMSHEVRTPMNAILGITEIQMQDETLSHDMQEVFGKIYNSGYLLLGIINDILDLSKIEAGRLELLPVNYDVPSLINDTVYLNIMRFDSKPFAFDLEVDENIPLTLFGDELRIKQILNNLLSNAFKYTDTGEVSLSVNAEYSSQQWAQLTLIFRITDTGHGMSEEQVVKLFDEYTRFSMEANKKVEGVGLGMSITKHLVHMMNGEIKVESKLGKGSVFTVSLPQGILGTEVLGKELSENASKFTVGRSAQINNAPQFVRDFMPYGKVLVVDDVETNLYVARGLMAPYGLSIETASSGFEAIEKIKNGAVFDVIFMDHFMPKMDGIETVKKLRNMDYTHPIIALTANALAGQAEVFLDNGFDGFISKPIDIRQLNASLNKFIRDKYPSKVIDTARDQAVKLNTPKAXTTFAADIRPASNPELSAIFIRDAEKALDELKKMLSDTFSDKDDFLQYVISVHSMKSALINIGEYELSDSALKLELAGRAKNISVIMTETPRFLEQLEDVIKKNKPKEDAGAANGAVKEDNSKLNLKEKLREIRTACGKNDGVSANKILSELRRKEWPRYTRDLLDTIAEDLLINDFDEAAKLIEDYELIIKSKNK

SEQ ID NO: 67347 - DNA, 534 bp, Unknown
  Obtained from environmental sample
  misc_feature (1)..(534): n is a, c, g, or t
atgccgggaagctttctgccttcaagcagttcaagcgacgcgccgccgcctgttgaaacatggctcatctttgaggcaagaccgaacttgtttacagccgcgaccgagtcgcctccgcctacaacggtaatggcgcccttgccggtcattccgccacaaagttttgcgacttttcggttcctttcgcaaaagcctcaaattcaaagacgccgacagggcgttccacacaatggtcttcgctccggcaagcacttctttgtatttggcgatagtctttggtcntacgtcaagcccgagcagattgtcgggaaggtcgaggctgtcaacctgaatgggagaagagttcgcgtcaaagcttgtcgcggcaacctgatcaagcggcagaacaatctgtacgttcgcgcttttggctgcgtccaggatttttttcgcggtatcaagctgatcgtcctcaacaagcgatttgcctatcttgtgtccctgagctttaaagaaggtatacgccatgccgccgccgataataagcgcggctga

SEQ ID NO: 67348 - protein, 177 aa, Unknown
  Obtained from environmental sample
  misc_feature (1)..(177): Xaa is any amino acid
MPGSFLPSSSSSDAPPPVETWLIFEARPNLFTAATESPPPTTVMAPLPVIPPQSFATFRFLSQKPQIQRRRQGVPHNGLRSGKHFFVFGDSLWSYVKPEQIVGKVEAVNLNGRRVRVKACRGNLIKRQNNLYVRAFGCVQDFFRGIKLIVLNKRFAYLVSLSFKEGIRHAAADNKRG

SEQ ID NO: 67349 - DNA, 936 bp, Unknown
  Obtained from environmental sample
  misc_feature (1)..(936): n is a, c, g, or t
atggcccctgtcgccgcctatcttgagaagaaactgggcaagcccgtaattttcgcgggagaagacagctgttacggcaagaaagcgtttatcgaaagccagcccgacggctccgttatcatgctggaaaacacgcgcttccacaaggaagaaaccgccaaagaaccggcggaattggacaagctggctaaagagcttgccacatacggcgaaatatttgtaaacgatgccttcggaaccgctcaccgcgaccacgcctcaaccgcctcaatcgcgaaatttgttcccgtgtccgtagccggcttcctgatggaaaaagaagtcaactaccttgaacctattgtaacaagcccgcaaaaacccttggtagctattatcggcggcgcgaaggtttcttcaaaaatagcggtgctggaaagcctgcttaaaaactcagccgcgcttattatcggcggcggcatggcgtataccttctttaaagctcagggacacaagataggcaaatcgcttgttgaggacgatcagcttgataccgcgaaaaaaatcctggacgcagccaaaagcgcgaacgtacagattgttctgccgcttgatcaggttgccgcgacaagctttgacgcgaactcttctcccattcaggttgacagcctcgaccttcccgacaatctgctcgggcttgacgtangaccaaagactatcgccaaatacaaagaagtgcttgccggagcgaagaccattgtgtggaacgccctgtcggcgtctttgaatttgaggcttttgcgaaaggaaccgaaaagtcgcaaaactttgtggcggaatgaccggcaagggcgccattaccgttgtaggcggaggcgactcggtcgcggctgtaaacaagttcggtcttgcctcaaagatgagccatgtttcaacaggcggcggcgcgtcgcttga

SEQ ID NO: 67350 - protein, 311 aa, Unknown
  Obtained from environmental sample
  DOMAIN (1)...(260): Phosphoglycerate kinase
  misc_feature (1)..(311): Xaa is any amino acid
MAPVAAYLEKKLGKPVIFAGEDSCYGKKAFIESQPDGSVIMLENTRFHKEETAKEPAELDKLAKELATYGEIFVNDAFGTAHRDHASTASIAKFVPVSVAGFLMEKEVNYLEPIVTSPQKPLVAIIGGAKVSSKIAVLESLLKNSAALIIGGGMAYTFFKAQGHKIGKSLVEDDQLDTAKKILDAAKSANVQIVLPLDQVAATSFDANSSPIQVDSLDLPDNLLGLDVXPKTIAKYKEVLAGAKTIVWNALSASLNLRLLRKEPKSRKTLWRNDRQGRHYRCRRRRLGRGCKQVRSCLKDEPCFNRRRRVA

SEQ ID NO: 67351 - DNA, 324 bp, Unknown
  Obtained from environmental sample
  misc_feature (1)..(324): n is a, c, g, or t
atgatcaagactgtaaaatcagttgatttgaaaggcaagcgcattataatgcgtgtggattttaacgttcctatgaaggacggggtagtgcaggacgatacgcgaattgtcgcggcgcttcctacccataagtatattctggagcagggntgtaaatccctcacgctcatgtcgcacttgggcgatccttccaagacgcgaagaaagcgcaggaaaaagccgagaaagacggtaagacatttgacaaggacgcgtacatcaaaggcaagcaccgcatggcccctgtcgccgcctatcttgagaagaaactgggcaagcccgtaa

SEQ ID NO: 67352 - protein, 107 aa, Unknown
  Obtained from environmental sample
  misc_feature (1)..(107): Xaa is any amino acid
MIKTVKSVDLKGKRIIMRVDFNVPMKDGVVQDDTRIVAALPTHKYILEQGCKSLTLMSHLGDPSKTRRKRRKKPRKTVRHLTRTRTSKASTAWPLSPPILRRNWASP

SEQ ID NO: 67353 - DNA, 543 bp, Unknown
  Obtained from environmental sample
  misc_feature (1)..(543): n is a, c, g, or t
gtggttcatgtaattcttaaggaaggctttgggattgaaaccggtcttatgaccacaattcactcctataccgccacccagaaaaccgtagacggcgtttcccagaaggactggagaggcggacgtgcggcggctatcaacatcattccgtcaacaaccggtgcggcaaaagccgtaggcgaagtgcttcccaccaccaagggcaaactcactggcatgagcttccgcgttcccacgcccacaggctccgtagtagacctgacattccgcgccgagaaagacacctccattcaagaaattgacgccgcaatgaaaaaggcttcagaaacctacatgaaaggtgttctggcttattgcaacgaagaaatcgtttcaaccgacatcattcacaatacccacacctcaatctatgacagtcttgctacccttgaaaataacctcaaaggcgaaaaacgcttctttaagatagtttcatggtacgacaacgaatggggctactcgaataaaattgtcgatttgttaatgtacataagtaagaaatag

SEQ ID NO: 67354 - protein, 180 aa, Unknown
  Obtained from environmental sample
  DOMAIN (1)...(160): Glyceraldehyde 3-phosphate dehydrogenase, C-terminal domain
  misc_feature (1)..(180): Xaa is any amino acid
MVHVILKEGFGIETGLMTTIHSYTATQKTVDGVSQKDWRGGRAAAINIIPSTTGAAKAVGEVLPTTKGKLTGMSFRVPTPTGSVVDLTFRAEKDTSIQEIDAAMKKASETYMKGVLAYCNEEIVSTDIIHNTHTSIYDSLATLENNLKGEKRFFKIVSWYDNEWGYSNKIVDLLMYISKK

SEQ ID NO: 67355 - DNA, 1395 bp, Unknown
  Obtained from environmental sample
  misc_feature (1)..(1395): n is a, c, g, or t
atgcatgattttgcggcgctttatacatcggtcaggaacaaggggaaatccattggatatgtcattgaatgttatgtgggcaaggcgggcaaacgcctttttttaatttttgtctggcttttctcgatacttatcgcggcggctttcgcggacatcgtagccggaacctttgccggttttaccggggagggcgcgcgcaacggcataaacgcttcggtagcttccagttcatgcctctttgtaatcgccgccatcatccttggtttctttatccgcaagcgcaaggcttcggggctggcaagcggcattatcgccatcgatctgcttattatctgcattgtcatggggttgttttttcctgttttcctgaataaaaacatttggctgtatctggtctttgcctacatttttatcgcctctgttgttcccgtgtgggctttggggcagccgcgtaattatcttaattccttcttgttattggcaatgatgctggcggcttctatcggggttgtttttaccgcgccgccaatttctatcccggccttcgccggatttaatatagacggcaattttctgttccccggcctttttgttactattgcctgcggcgcgatttccggtttccattcccttgttgttacgggagcgacctccaaacagataagcagcgaaaagcacatgctttccatttcttacggctcaatgctgttggaaaccatggtggcggtccttgcccttatcgcggtcggctctctggcgtggaacggaaaattgccggaaggcactccgccggttatcttcgctaccgccgtttccggttttctttcacagcttggactgccgcatcaggcgtcctttgtcattgtgtcgctggcggtttcatcgtttgtgcttaccacactggatacggttgcgcgtctggggcggctttcttttcaggaacttttttcagttgaagatccaaaatacgcggataaattttgggtaaagatattaaaaaacaaagccgccgcatcgctctttaccctgctgcccgcgtatcttctcgcgataatgggctatcagaatatttgggctttgttcggagccgccaatcagcttcttgccgcgcttacattgattgcctgtactttgtttttcaaaaaaacaggaaggcgtttttccatgcttttaattccaaccattatcatgcttgccgttacatatacttcgctttccttgagcataaaaaacaaaatcgtacttttaactaacagtaaatttaatctcgccgtagacggcattcaaatgtgcctagccgtcctgcttttggtattgggtatacttgtagcggtttcctgcgcaaaaaaattagtggaaaaagataaactcagtgtaacgccgggtgcggaataa

SEQ ID NO: 67356 - protein, 464 aa, Unknown
  Obtained from environmental sample
  DOMAIN (2)...(289): Carbon starvation protein CstA
  misc_feature (1)..(464): Xaa is any amino acid
MHDFAALYTSVRNKGKSIGYVIECYVGKAGKRLFLIFVWLFSILIAAAFADIVAGTFAGFTGEGARNGINASVASSSCLFVIAAIILGFFIRKRKASGLASGIIAIDLLIICIVMGLFFPVFLNKNIWLYLVFAYIFIASVVPVWALGQPRNYLNSFLLLAMMLAASIGVVFTAPPISIPAFAGFNIDGNFLFPGLFVTIACGAISGFHSLVVTGATSKQISSEKHMLSISYGSMLLETMVAVLALIAVGSLAWNGKLPEGTPPVIFATAVSGFLSQLGLPHQASFVIVSLAVSSFVLTTLDTVARLGRLSFQELFSVEDPKYADKFWVKILKNKAAASLFTLLPAYLLAIMGYQNIWALFGAANQLLAALTLIACTLFFKKTGRRFSMLLIPTIIMLAVTYTSLSLSIKNKIVLLTNSKFNLAVDGIQMCLAVLLLVLGILVAVSCAKKLVEKDKLSVTPGAE

SEQ ID NO: 67357 - DNA, 2541 bp, Unknown
  Obtained from environmental sample
  misc_feature (1)..(2541): n is a, c, g, or t
atgaaaaagatcaatgatcttataatatcaagcctgacaagcggtaaatactcaagcttggattacgaaacaaatatggacgccatactccgtcttatagttcttaacataacctatacaatagcctctgttgtaatcataaccatgggcgttatagatatgcagggcgggaatataaacgacggtcttcttcaaataattctgggctttatgatttttttgaatctttttttactgcgtacggaaatgccgtataacgcaagcggcttaattattaccgctgttttcggcgtcttttgcgggatctcggtttttattaaaaatgaaatgcagggactttccggtttgtggatatttacctatccgttaatgtccatttttacgctgggactgccggtcgggttcattccggctatacttgttttggtaactatcgcaatcgaaacatttggaggtttatcaaaattcgattataactttcaggaagcggttcttttatgcggcgtttatttctttataatgctccttaccgctgtatacgaatatgtacgttctataaaagaacgctggcttgcccgccaggacagttacatgaagttagtttttaataacagccccgatattatcatgcttctggataaaaacagcgctcttacccactgcgccaaagcttttttacaaagcgcgaaaattaaagaatttgatgaaatacgcaaaacaaattatgtagatgtttttggacgttttaccgattatgaaatgctgaatgatataaaatattattttgataaatcaataaataacaaaaaacctgttaaattagaaaaggttttggattttagcaatgagggaaataaccgtcattatgagattcattttaccccgatgtacaacagtaaaggtgaatttcagggcgcttttatacttttccacgacatgacagaaattctgaaaagcagggatcgcgccgaacaagcaagncaagcaaagtcgattttccttgccaccatgagccacgaaataagaacgccgatgaacgccataatcggcatgaccacgataggaaaatccgcgccgaccattaaacgcaaagattactgctttatgaaaatagaggacgcttcaaaccatttgctgggggtaataaacgatattctggatatgtcgaagattgaagcaaacaaatttgaacttgctcccgtggaatttgaacttgaaaaaatgctcaggcgcgtggtgaacgtgattaatttccgcatagatgaaaagcatcaggaactctccgtgaatatcgaccaatctattccccgcaccctcataggggacgatcagcgaatagcgcaggtcattaccaatctgttgggaaatgccgttaaattcactcccgaacatggcgctatcagcctggtcgtgcgccttgtggagaaaacggacaatctctgtaccctgcgaatttctgtgagcgacagcggaatcggcataacgcccgaacagcagaaaagattgttccagtcttttgaacaggcagaaatcagcacaacccgcaaatacggcggcaccggcttaggccttgcaatttccaaaaacattgtggaaatgatgggcggatcaatttgggttggatccagaccagggaaaggttctacatttatttttacgattcaattgggacgcggtaaggaagaaaagcaggaacttttgccggatgttaatttgaaagatgtccgtattttagccgttgacgatgaccctgttatattatctttcttcacggaagtaacgcagaggtttggcatatcatgcgacaccgccgtaagcgggaaaaaggcccttgaactcctggagcaaaatggcggttaccatatctattttatagactggaaaatgccggacatagacggcatagagcttgtccgtgaaataaaagcgcgaaggtccggaaattccgttgttaccatgatttccgccgccgaatggggcgcgattgccaaagaagcgaaagcggcgggcgttgataaatttttgtcaaaaccgcttttcccttctataatagtggaagtaatcaatgaatgtctgggcgtaaacaagcagcaaatagaagaagcgcaggcggctgatattaacggcatatttgcgggcaagcgcatactgctggctgaagacgtggaaattaaccgcgaaattgtacagaccttgcttgaaccgacaaagttggagatagactgcgccgaaaacggcgtagaagcagtccgtatattcagcagagccccggcccaatacgacttgatttttatggacgtacagatgccggaaatggacggctatgaagcgacacggcatattcgcgccgctgaagccgcgcgcaatgccagaaagagtaaaagcgggaaacctccaaaacgcgttccaataatagcaatgaccgctaacgtgttcaaggaagacattgaaaagtgcatagaggccggtatgaacgaccatgtggggaagccgttaaattttgatgaagttctggaaaaactaaagagctatctggggtaa

SEQ ID NO: 67358 - protein, 846 aa, Unknown
  Obtained from environmental sample
  DOMAIN (202)...(318): PAS fold
  misc_feature (1)..(846): Xaa is any amino acid
MKKINDLIISSLTSGKYSSLDYETNMDAILRLIVLNITYTIASVVIITMGVIDMQGGNINDGLLQIILGFMIFLNLFLLRTEMPYNASGLIITAVFGVFCGISVFIKNEMQGLSGLWIFTYPLMSIFTLGLPVGFIPAILVLVTIAIETFGGLSKFDYNFQEAVLLCGVYFFIMLLTAVYEYVRSIKERWLARQDSYMKLVFNNSPDIIMLLDKNSALTHCAKAFLQSAKIKEFDEIRKTNYVDVFGRFTDYEMLNDIKYYFDKSINNKKPVKLEKVLDFSNEGNNRHYEIHFTPMYNSKGEFQGAFILFHDMTEILKSRDRAEQAXQAKSIFLATMSHEIRTPMNAIIGMTTIGKSAPTIKRKDYCFMKIEDASNHLLGVINDILDMSKIEANKFELAPVEFELEKMLRRVVNVINFRIDEKHQELSVNIDQSIPRTLIGDDQRIAQVITNLLGNAVKFTPEHGAISLVVRLVEKTDNLCTLRISVSDSGIGITPEQQKRLFQSFEQAEISTTRKYGGTGLGLAISKNIVEMMGGSIWVGSRPGKGSTFIFTIQLGRGKEEKQELLPDVNLKDVRILAVDDDPVILSFFTEVTQRFGISCDTAVSGKKALELLEQNGGYHIYFIDWKMPDIDGIELVREIKARRSGNSVVTMISAAEWGAIAKEAKAAGVDKFLSKPLFPSIIVEVINECLGVNKQQIEEAQAADINGIFAGKRILLAEDVEINREIVQTLLEPTKLEIDCAENGVEAVRIFSRAPAQYDLIFMDVQMPEMDGYEATRHIRAAEAARNARKSKSGKPPKRVPIIAMTANVFKEDIEKCIEAGMNDHVGKPLNFDEVLEKLKSYLG

SEQ ID NO: 67359 - DNA, 705 bp, Unknown
  Obtained from environmental sample
  misc_feature (1)..(705): n is a, c, g, or t
atgaatcttaagcagttccattttattatcaaaaacgacactgagcttgatcttgtgcttaaagatagtgcgtgccgcttattgatgaccgagttaataaagattttgttgttctggcatggtctagaaggcgggtggatttacatattttcaaaagaaaaagtattaacgccggatgatttgcgcaaacaaagaatttcaacaagtcctgaacttcgtgatatgaatacggtattcagaactatgggtttccagcttgtagacactgattttacaaatatgggaaccaaactagcaagtaatgcgataaacgccatatacattattcccgcaggagtcgctcctttgggactgcacaaaaacttgagtcatatgcttgatgtacctattgctccaattttgggcgcaattgtaatgaaccgcgttacatggaataaaattagctctgaaaatcaacagaaaattgttgaagctactaaaaagattgccttggagtttgacgcttcagtgttaaaaacagaggcaaacgccattacggcaatgggtaaagacgggctaaccataaacaaaccgaatcaggctcagcaggatatgtggagtaatgaagtaaaaaataccatgccttcgcttgttggctctatttttgatcgcgatttatttaatcggcttaataatatactggaaaaggcaagaagcggaaaataa

SEQ ID NO: 67360 - protein, 234 aa, Unknown
  Obtained from environmental sample
  misc_feature (1)..(234): Xaa is any amino acid
MNLKQFHFIIKNDTELDLVLKDSACRLLMTELIKILLFWHGLEGGWIYIFSKEKVLTPDDLRKQRISTSPELRDMNTVFRTMGFQLVDTDFTNMGTKLASNAINAIYIIPAGVAPLGLHKNLSHMLDVPIAPILGAIVMNRVTWNKISSENQQKIVEATKKIALEFDASVLKTEANAITAMGKDGLTINKPNQAQQDMWSNEVKNTMPSLVGSIFDRDLFNRLNNILEKARSGK

SEQ ID NO: 67361 - DNA, 1935 bp, Unknown
  Obtained from environmental sample
  misc_feature (1)..(1935): n is a, c, g, or t
atgaattgtaatagtgaaaactgcgtcaataaagctttgttgtggtttaaaaatgaatttaaattatcatggcttgaaaatattatttgctttggctttctttcacttctttcgttaattccctttgttgaattggttttaaataaatttaaactgtcaatttccggttcaaaagatatattaacccacatttttttagtaacaggtttttttgccgctatgattacggcaagatcaggagagcatatatcaattaccgccgttcaatacattaaaaatgacaatataaaaaaaacgcttgtttttatatgcgcattagtttcagcttttttactgggaatttttttatgggacagtatttgctatattaaatacgccacgataggcaaaaaaataggttttataaatgagcaaatttacgggcttgccatgccccttggttttacagttattgctgtgcggtttatcttaaaacttcaaaacacgcgcgataaaatttttgcgtctgctgcgcttttgcttggttgtattgccgccttgcccgctatagcgaagattatatggggattagacgggaataatacgcccgaaccttttttttcatggattaattatttatacgatgccgctggggttatcaacatttctgtaataatattaatgattatcgcgggatttgccggaatgccgatttttgcggcgattggcggcattgccctgattatgcttcaagcggcggggcgtgaacctgagaccgcggtgagtcagattttttcagcgctgacagacgcggatttaattgcgatacccctgtttactcttaccggttttttcctttcagagagtaaggcgggagagaggcttgtccgcacatttaaaatatttttcggcggattgccgggcggcattattatcgctactgtaattatatgcgcgttctttacttcttttacaggcgcgtcaggggtaactattcttgctttgggcggaatactttataccattttgaatgaaaacaaatattcagagcgtttttccattgggcttttaacttccacaggcggtataggtttattgttccctccaagccttcctattatacttgttgcttcatcaaccaatacaatattgcattttatgaatttaccggtagagaatactattattcattattttatcggagcgataatacccggatttattctggtgattgcctcgattattgctggttttgttctttcttcaaaagtaaaaattcaaactgaaaaatttaacggcaagaacgcgttacattcgttaaaagaatctttttttgaaattttattgcctataattctggtgttagggtatttttcaggattactttctttaatagaagtaagcgcggtatctgtcatatatgtgttaattgtagaagtttttattaagaaagatattttatttaaggatatcccgaatgtttttcttaaagctgttcccataatcggcggaattctggcaattttggcgatggcaaaagccctatcctacgcgtttatctcctccggcgttcctgacagtttttctttctggatgcagggcgccgttaaatcaaaatatgtttttctgcttttattaaatcttgctttgcttgtgcttggctgtataatggatattttttccgcgatacttgttttccttccgttaattgttccgcttggattcgtctatggtatcgatcctgtgcatcttggaattatctttattgtaaatcttgaggcgggattccttacccctcctgtcggaatgaatcttttccttgcaagttatcgttttaataaaccgtttatgcagatatgcagttatatttctccgttcctgcttgtccgtttagtggttgtgcttcttgttacatatctgccctggcttactacctggcttgtaaagctattttaa

SEQ ID NO: 67362 - protein, 644 aa, Unknown
  Obtained from environmental sample
  DOMAIN (37)...(165): Tripartite ATP-independent periplasmic transporters, DctQ component
  misc_feature (1)..(644): Xaa is any amino acid
MNCNSENCVNKALLWFKNEFKLSWLENIICFGFLSLLSLIPFVELVLNKFKLSISGSKDILTHIFLVTGFFAAMITARSGEHISITAVQYIKNDNIKKTLVFICALVSAFLLGIFLWDSICYIKYATIGKKIGFINEQIYGLAMPLGFTVIAVRFILKLQNTRDKIFASAALLLGCIAALPAIAKIIWGLDGNNTPEPFFSWINYLYDAAGVINISVIILMIIAGFAGMPIFAAIGGIALIMLQAAGREPETAVSQIFSALTDADLIAIPLFTLTGFFLSESKAGERLVRTFKIFFGGLPGGIIIATVIICAFFTSFTGASGVTILALGGILYTILNENKYSERFSIGLLTSTGGIGLLFPPSLPIILVASSTNTILHFMNLPVENTIIHYFIGAIIPGFILVIASIIAGFVLSSKVKIQTEKFNGKNALHSLKESFFEILLPIILVLGYFSGLLSLIEVSAVSVIYVLIVEVFIKKDILFKDIPNVFLKAVPIIGGILAILAMAKALSYAFISSGVPDSFSFWMQGAVKSKYVFLLLLNLALLVLGCIMDIFSAILVFLPLIVPLGFVYGIDPVHLGIIFIVNLEAGFLTPPVGMNLFLASYRFNKPFMQICSYISPFLLVRLVVVLLVTYLPWLTTWLVKLF

SEQ ID NO: 67363 - DNA, 363 bp, Unknown
  Obtained from environmental sample
  misc_feature (1)..(363): n is a, c, g, or t
atgggatcaatagtgattgttgatgacaaccttgtcagcctcaagcagataagcgccctgctttccaatgattacgacgtttcactggcaaagtccggggagatggcgctgcagatttgcgcgcagaaacagccgaatttgatcctgcttgacgtggaaatgcccggcatggacggctttgaaacaataagccgtctgaaggcggacgggaacttaaagaacatcccggtgattttccttacaggcaacatcgatgccggaacacaggcgaaatgcctggaagccggggctgtggattttattaccaagccgcccgatgtcgaaatcctgcaaaacaggataaaaacgcatcttaaggcataa

SEQ ID NO: 67364 - protein, 120 aa, Unknown
  Obtained from environmental sample
  DOMAIN (2)...(115): Response regulator receiver domain
  misc_feature (1)..(120): Xaa is any amino acid
MGSIVIVDDNLVSLKQISALLSNDYDVSLAKSGEMALQICAQKQPNLILLDVEMPGMDGFETISRLKADGNLKNIPVIFLTGNIDAGTQAKCLEAGAVDFITKPPDVEILQNRIKTHLKA

SEQ ID NO: 67365 - DNA, 948 bp, Unknown
  Obtained from environmental sample
  misc_feature (1)..(948): n is a, c, g, or t
atgaaatcgatattgattgttgatgacaaccttgtcagcctcaggcagataagcgccctgctttccaaagattacgacgtttcactggcaaagtccggggagctggcgctgcagatctgcgcgcaggaactgccggatctgattctgcttgatgtggaaatgcccggcatggacggctttcagacaatagcccgcctgaatcaggacgaacgcttaaagcatataccggtgatttttctgacaggcaaccacgatgccgaaacagaggtaaaatgcctggaatccggagctatggattttatcaccaagccggccaacgcggagatcctgcaccacaggatagaggtgcatcttcagttttcactatatcagcttcaactggaacacatggtaaaagaactggaagacaatatcgggatttcattcgcggaattactggactgcaaagattataacgcggccatccatatgatacgttccggagaatatgttgagatgctggttaaagagcttgttaacgagggaactttcgggtccgcgcttacggcggatgacgcgaatttgataaagcgcgccgttcccttccatgacatcgggaaacttggggtaagtgacattatcctgctgaagcggaaccctctgacaaatatggaaatacaggaagtccggaagcatactgttatcggcggccaggtgttaaaggcaatttatgatcgcacccccagccagcaatatctgaaagttgcaatggttcttgccgaaggccaccatgagaattttgacggcacaggctatcccaagggccttgcgggagaggatattcccctgtactgcaggattttatcggtaattaatacatacgacgccctaatcaccgacagggtttaccgcaaagggatttcccacgaagaggcctgtcaaaaaatacttgacgggacggggcactaa

SEQ ID NO: 67366 - protein, 315 aa, Unknown
  Obtained from environmental sample
  DOMAIN (153)...(290): HD domain
  misc_feature (1)..(315): Xaa is any amino acid
MKSILIVDDNLVSLRQISALLSKDYDVSLAKSGELALQICAQELPDLILLDVEMPGMDGFQTIARLNQDERLKHIPVIFLTGNHDAETEVKCLESGAMDFITKPANAEILHHRIEVHLQFSLYQLQLEHMVKELEDNIGISFAELLDCKDYNAAIHMIRSGEYVEMLVKELVNEGTFGSALTADDANLIKRAVPFHDIGKLGVSDIILLKRNPLTNMEIQEVRKHTVIGGQVLKAIYDRTPSQQYLKVAMVLAEGHHENFDGTGYPKGLAGEDIPLYCRILSVINTYDALITDRVYRKGISHEEACQKILDGTGH

SEQ ID NO: 67367 - DNA, 1074 bp, Unknown
  Obtained from environmental sample
  misc_feature (1)..(1074): n is a, c, g, or t
atggatggagcgtgtacaatgaaacgaatactggtagttgatgataatctttctattctcaaacaaatatccgcccatctttcaggcgaatatgaggtttcgctcgcgaagtccggcctgttggccctgcagatatgcactaaagaaaaaccggatctgatcctgctggacgtagaaatgccggatatggacggttttgacgtcatttccaggttaaagcagaacccttatctgaaccggataccggttatcttccttacagccagccacagccatgaagttgagataaaggctttggaattgggcgcaagggattttatcatgaagccggcggaaaaaagcatactgctgcacagaattgaactgcatcttcgttttgcttcctatcaggtccagactgaagaaaaagtcacagccctttcagacaacattgcgatctcatttgcggagatgatcgaatgccgtgatgaaaatacgggcggccatgtaattcgcacgtcaaaatacgttgatatactgggcaaagagctgattagcaagggtgtttttccggatgaactcaatgaatccgaattgcagatgatggtgcgcgccgcgccgctgcatgatattgggaaaatcgccatcagcgaccgcgtgctgctgaaagccggacggcttgatgatatagaattttccattattaaacgtcacgcggaaattggcgctcaaattgtggaaaggatgtaccagcgtatgcccgcccagcggtatctttactatggcagccttattgccggatcccaccatgaacgttatgacggcaagggttacccaaaaggcctggaaaagaataatattccgctctgcgcgagaattatggcggtggcggatgtttatgacgcgcttatggaaacacgggtttaccgcaaggggctgggccatatccaggcaagcaatatcatttttgaaaacgaatggacgcagtttgatcccaaggttgttgaggcgttcagaaatgtcgaagagcaggtaaatgaagtggcaagcacatggaatggatctgcaatgaacagcggcggtatatatgcttaa

SEQ ID NO: 67368 - protein, 357 aa, Unknown
  Obtained from environmental sample
  DOMAIN (159)...(296): HD domain
  misc_feature (1)..(357): Xaa is any amino acid
MDGACTMKRILVVDDNLSILKQISAHLSGEYEVSLAKSGLLALQICTKEKPDLILLDVEMPDMDGFDVISRLKQNPYLNRIPVIFLTASHSHEVEIKALELGARDFIMKPAEKSILLHRIELHLRFASYQVQTEEKVTALSDNIAISFAEMIECRDENTGGHVIRTSKYVDILGKELISKGVFPDELNESELQMMVRAAPLHDIGKIAISDRVLLKAGRLDDIEFSIIKRHAEIGAQIVERMYQRMPAQRYLYYGSLIAGSHHERYDGKGYPKGLEKNNIPLCARIMAVADVYDALMETRVYRKGLGHIQASNIIFENEWTQFDPKVVEAFRNVEEQVNEVASTWNGSAMNSGGIYA

SEQ ID NO: 67369 - DNA, 1269 bp, Unknown
  Obtained from environmental sample
  misc_feature (1)..(1269): n is a, c, g, or t
atggccgagtcaaattgcgcgaatccgttttacatgaatgcagacgatttgaactatatgaatacttatgggtatagggaagaattcagaccggccgatttaacttttgagggtaaaagctataataggatagggattcgctataaaggctccgattatactcttccaagatgttttttccctgatcgcggcggtagcgttgacactaacggaacccccaataagacatgtaaaaaaatatcctataagttgaaattcacggagtacaataaagatacgcgtttttacggcatgaagaaaattaatttacacgcttttgccgcagacccaacaaaaatgcacgaaatactctcttatgaattgtttagagatatgggaattcacgccccgcgggtatcttatgccaatgtatatataaacaacaaccttataggtctttttttggctgtggaagagattgacggcaggtttaccaaatccagatggccagactacggcgatggaaacctttacaaggaagtatggccgcgtaccgccgatacgaaatattatttagacggcctcaaaaccaatgatagtccggaagataatcctaacgtacaaaaaatggtatcgtactacaatgcggttaattcttcgaccgaacaaaactttaaacaaaatctctcttcgtatatggattttgactatctcctgcgctacttggcggtggacgtagccattaagaattgggatggcatgcggtcgtggtattgggacagtaaaaagcagcagggcaataatcacaattatttcttttatgaagaggaagcaaagaaaacaaacggaaaaatttggattattccatgggatatggatcaagcgttgacgtcaagagacaactactttgatgcgggcggtatgggtggggggttcccgggtatggggggcggcggtcagccgctgccgcagtggaatgtgcctaccaccaactgcggagcccaatctgtcgccggcaattcttttatgccgccgaattgcgacaaacttactaaacttacggcggccaatttttggagccgttacgtgcagcttggagacttgtttttgagagacgtgttcgtaagtcagcggttaaatgacaaaataaccaaacattcaaatttgattaataacgccgtgcagcaggatcctaatataactcaaagcacatggacaaatgatgtcaatagccttaagaattatttgccgaataatatttcgtcgttcaagaattatttgcacccgtga

SEQ ID NO: 67370 - protein, 422 aa, Unknown
  Obtained from environmental sample
  misc_feature (1)..(422): Xaa is any amino acid
MAESNCANPFYMNADDLNYMNTYGYREEFRPADLTFEGKSYNRIGIRYKGSDYTLPRCFFPDRGGSVDTNGTPNKTCKKISYKLKFTEYNKDTRFYGMKKINLHAFAADPTKMHEILSYELFRDMGIHAPRVSYANVYINNNLIGLFLAVEEIDGRFTKSRWPDYGDGNLYKEVWPRTADTKYYLDGLKTNDSPEDNPNVQKMVSYYNAVNSSTEQNFKQNLSSYMDFDYLLRYLAVDVAIKNWDGMRSWYWDSKKQQGNNHNYFFYEEEAKKTNGKIWIIPWDMDQALTSRDNYFDAGGMGGGFPGMGGGGQPLPQWNVPTTNCGAQSVAGNSFMPPNCDKLTKLTAANFWSRYVQLGDLFLRDVFVSQRLNDKITKHSNLINNAVQQDPNITQSTWTNDVNSLKNYLPNNISSFKNYLHP

SEQ ID NO: 67371 - DNA, 1260 bp, Unknown
  Obtained from environmental sample
  misc_feature (1)..(1260): n is a, c, g, or t
atgagaattacttttcctgtttcttccgccaaaacgttgacggagaatggaaagttatcgccgagaaggtggagtagtttttatatggccggcacgaaaaacgacaccccgcgcccgcaatactctccatacgtggaggtctccctcgacaacctgctccacaacttggcgcagatacgcaaaattttgccgcgcgaagtaggcatcatcgccgtggtcaaggacagctcctacggttgcggcagtttgctgatcgccgaggcgtttgagcgcagcggcatggccgcgttttttgcggtcgcaagacctattgaggctatcgccctcaggaaacacgggataacgcttccggttttggtcttggggatggcgaccgaggaggaactgcgttacggggccgataacgggatcgtcttcgcgttaaacgatttgagcgacgttgacagatgggaatcatacggcgtgaacgtcaacttccatttgggcattgataccggcatgagccgtatggggcttctgccgtcggaaatcgatactttaatcaacaaattaaatactgcgcgtaacatacatataggcggagccttcacccacatggcaaacgcggacgagcctgacacgcagacggtagcccgtcaattggagaaattccgtgacggcatcggcaaactccgcagcggcgggcatcctccggcgcacgtccactacgggaacacggcgacatttctgcgctttccgttaagcgattgcacgctggcgcgtcccggaatcgcgctatacggatgcaagcccgatccggcgcaagagttcaatatagacctcaaacccgtcgcttcgctgatttctcatgtggtcaagatgaaaaaactccctgccgccgcgcccgtctcatacggaggaaactacgtcacccccgccgacacgtggatcgcgacgattcccataggctacgcccacggactgccgcgttacctaaacggcaaaggctctgtgctgataggcggaaagcgctaccgcatagccggaaacataactatggactacataatggccgacgtaggcgcggccccgtccgtatccgtgggcgacgaagcggtagccatagggtctcaaggcggcgagtccatcaccccggacgacgtcgcggtcataggcgatacaatcgggtacgaggtgctgtgcaacttggggacgacgatagaccgattctacacgcaaggcggtaaggttgttcaccgcgaacccggcgtcatttattag

SEQ ID NO: 67372 - protein, 419 aa, Unknown
  Obtained from environmental sample
  DOMAIN (277)...(405): Alanine racemase, C-terminal domain
  misc_feature (1)..(419): Xaa is any amino acid
MRITFPVSSAKTLTENGKLSPRRWSSFYMAGTKNDTPRPQYSPYVEVSLDNLLHNLAQIRKILPREVGIIAVVKDSSYGCGSLLIAEAFERSGMAAFFAVARPIEAIALRKHGITLPVLVLGMATEEELRYGADNGIVFALNDLSDVDRWESYGVNVNFHLGIDTGMSRMGLLPSEIDTLINKLNTARNIHIGGAFTHMANADEPDTQTVARQLEKFRDGIGKLRSGGHPPAHVHYGNTATFLRFPLSDCTLARPGIALYGCKPDPAQEFNIDLKPVASLISHVVKMKKLPAAAPVSYGGNYVTPADTWIATIPIGYAHGLPRYLNGKGSVLIGGKRYRIAGNITMDYIMADVGAAPSVSVGDEAVAIGSQGGESITPDDVAVIGDTIGYEVLCNLGTTIDRFYTQGGKVVHREPGVIY

SEQ ID NO: 67373 - DNA, 483 bp, Unknown
  Obtained from environmental sample
  misc_feature (1)..(483): n is a, c, g, or t
gtgggtagcggaaaacaaaatggcgaagccattttggttggagcgagggagggcgcagccctccccttatatgattttgatttttattatttgactttgactttacaaaggagacgccattacactatgggattgatcgacgccgtaaaattcaacgatgccggtttagtcaccgccgtcgcgcaagacatcaaaacaaaccaagtcttgatggtcgcctacatgaaccgcgacacgctctccgagacgctcggcagcggcgacatggtctattggagccgaagccgccaaaagcggtggaagaagggcgagacctccgggcatgtccaaaaagtgcgcgaggtgtatatcgactgcgacggcgacgcgctgttgttcaaaatagagcagtccggcgcggcctgccatgagaattacttttcctgtttcttccgccaaaacgttgacggagaatggaaagttatcgccgagaaggtggagtag

SEQ ID NO: 67374 - protein, 160 aa, Unknown
  Obtained from environmental sample
  DOMAIN (71)...(145): Phosphoribosyl-AMP cyclohydrolase
  misc_feature (1)..(160): Xaa is any amino acid
MGSGKQNGEAILVGAREGAALPLYDFDFYYLTLTLQRRRHYTMGLIDAVKFNDAGLVTAVAQDIKTNQVLMVAYMNRDTLSETLGSGDMVYWSRSRQKRWKKGETSGHVQKVREVYIDCDGDALLFKIEQSGAACHENYFSCFFRQNVDGEWKVIAEKVE

SEQ ID NO: 67375 - DNA, 678 bp, Unknown
  Obtained from environmental sample
  misc_feature (1)..(678): n is a, c, g, or t
atggcgagctttccccagactttctccgcgagcgacatgacgggaaaggccgtggcaaaggccgccctgcagaagcatttcgggcttcccgaaaaccccaaagtgccgcttgtcggcatgattacccggcttgtcgagcaaaaaggggtgggggagctgttcgggcccacttacggctccatgtggaacatctgcagggacatgaatctgcaagtcgtgcttataggcaccggcgagtcatggtgcgagcatgagataggcagcctttcatacaggctgccgaatttcaaggcgcacatcggctacagcgagaaaataagccaccttatagaagccggctccgatttcttccttatgcccagccgttatgagccatgcggccttaaccagatgtattcgctcgtctacggcacgcttcccatcgtaaggaggaccggcggccttgtggacacggtggagaattacgatgaaaagaagggaaccggcaccggctttatgtttgaccagcttaacccctcctcgatttacaacacggtaggctgggcggtctgggcctggtacaacaagccgggtcacatcaaggccatgcgcgccaaagccatgaagcaggacttctcctgggaaaaatccgcgcagaaatacgtggagctatacgagaagacgctggcgaaacagtaa

SEQ ID NO: 67376 - protein, 225 aa, Unknown
  Obtained from environmental sample
  DOMAIN (22)...(203): Glycosyl transferases group 1
  misc_feature (1)..(225): Xaa is any amino acid
MASFPQTFSASDMTGKAVAKAALQKHFGLPENPKVPLVGMITRLVEQKGVGELFGPTYGSMWNICRDMNLQVVLIGTGESWCEHEIGSLSYRLPNFKAHIGYSEKISHLIEAGSDFFLMPSRYEPCGLNQMYSLVYGTLPIVRRTGGLVDTVENYDEKKGTGTGFMFDQLNPSSIYNTVGWAVWAWYNKPGHIKAMRAKAMKQDFSWEKSAQKYVELYEKTLAKQ

SEQ ID NO: 67377 - DNA, 921 bp, Unknown
  Obtained from environmental sample
  misc_feature (1)..(921): n is a, c, g, or t
atgcaggctgaggatcagttgaaaaaagggatcaacctgtacgaggacgctatgtcacggcggctcttgtcaagttcgccccagtacggaagactctatgcggggcttggcgacctggagtattttgtaaagacaggggatatggaagccgccctgcgctattataacacggcgcagcagaacggatgggcgccgcctgacatgcagtaccgcatgggcgccgcttattatcagcttggcgactggcggaacgcgctggagaatttctttgccgcatcctcaaagctgcctcagaaccgcagaatattgtttgcgcttggaaactcggcccttaaacgcggcgattattttgccgcccagggttattacagccgcctgcttgacatgcttgaacgccatcgcacccgtctgcccctgctactgcccaatgaccgccccgaatacctggatcttgccgagcgtctgatgatggcccgcaacaatgccggcgttgccaacgagatgctcgccgcccggaccggaagcaggtcttaccattcgcgcgcaatgtctttatactcggagtcgcagcgcgcctgggattcccttacacgcgatcccagttcaatggttcgttcagccagcacgtctctgccatacctcaacatgaggaacgttctttatccgcggcaagattatgagcctcagatgtatatgcgtatagacagggaagcctcggaatcctcacgctgggagcagctagctccggctttcaggactagggaaaggattttactcgctattttccacgcaaaggcgcaaagacgcggaggacgccaaaggaagaagaaggggttgttgtatccgggctttgcgtgttgtaaccaagctttgattggttcgttctctaatcgtgaaagtataacgattatcgaatcttga

SEQ ID NO: 67378 - protein, 306 aa, Unknown
  Obtained from environmental sample
  DOMAIN (66)...(99): Tetratricopeptide repeat
  misc_feature (1)..(306): Xaa is any amino acid
MQAEDQLKKGINLYEDAMSRRLLSSSPQYGRLYAGLGDLEYFVKTGDMEAALRYYNTAQQNGWAPPDMQYRMGAAYYQLGDWRNALENFFAASSKLPQNRRILFALGNSALKRGDYFAAQGYYSRLLDMLERHRTRLPLLLPNDRPEYLDLAERLMMARNNAGVANEMLAARTGSRSYHSRAMSLYSESQRAWDSLTRDPSSMVRSASTSLPYLNMRNVLYPRQDYEPQMYMRIDREASESSRWEQLAPAFRTRERILLAIFHAKAQRRGGRQRKKKGLLYPGFACCNQALIGSFSNRESITIIES

SEQ ID NO: 67379 - DNA, 1146 bp, Unknown
  Obtained from environmental sample
  misc_feature (1)..(1146): n is a, c, g, or t
atggttgattttttcaggcgggcaataaaaaaaattaacaagctcaacgccgaacagcgcaaggagcttttagtttccgccgtagaagaaatcaacctgcttggcaatgtccttgactcgattgatatgggcattcttgtctgcgacaacaaagataatcttgtattggcaaacaagagcgcccttagaatgataccgatggattacattgaaggaataaaactggaagaggcggtattagacgatcagtttatggaaacttttaaggagataatcgccaaccgtgaaaaaataattgataaagagatagaaatagagcagcaggaacaaagaaaaatatactcgattaatgtggtccctcttgtgcataacaaaaaaattgcaggtacgcttatttatatagaagatattacggagaagcgaaagggagaagcccgtttaagaagagcggaaaatcttgccagtcttacaactttagccgccggcgttgcccatgaaattaaaaacccgctcggttcaatatcgatacatcttcagcttttacaaaaagcgctggcgaaaaaaagcgaagcctctgaaaagaaaacggaaaaatattttacggttataaaagaagaaattgacaggcttaaccgcattgttgtcgattttctttttgccgtacgcccgatgaaccttgaattgcgtgaaggcgatataaatgaattaatcacgcagataatggagtttgtgaagtttgagatgaagcagtcaaatattgtttgcatgctagagcttgacgataaacttccgaaaatattgatggatgagaggtatatgaaacaagctctgcttaatctgataaaaaacgctcaagcggcgatgcccaaaggcggagtttttaccgtagcaaccaatttcgccgataatgaaatcagaatatcgctttgcgatacagggataggcataagcaaggaaaatcttgcgaaaattttcgagccgtattttacaacgagggaaacgggaacgggtcttggacttacgcaggtttataaaattatcagggaacataaaggcgagataactgtcgattcgtcgccggggacaggagccgagtttaggataagtttgcccgtacctcaaagagatacgaggcttatgcattaa

SEQ ID NO: 67380 - protein, 381 aa, Unknown
  Obtained from environmental sample
  DOMAIN (155)...(226): His Kinase A (phosphoacceptor) domain
  misc_feature (1)..(381): Xaa is any amino acid
MVDFFRRAIKKINKLNAEQRKELLVSAVEEINLLGNVLDSIDMGILVCDNKDNLVLANKSALRMIPMDYIEGIKLEEAVLDDQFMETFKEIIANREKIIDKEIEIEQQEQRKIYSINVVPLVHNKKIAGTLIYIEDITEKRKGEARLRRAENLASLTTLAAGVAHEIKNPLGSISIHLQLLQKALAKKSEASEKKTEKYFTVIKEEIDRLNRIVVDFLFAVRPMNLELREGDINELITQIMEFVKFEMKQSNIVCMLELDDKLPKILMDERYMKQALLNLIKNAQAAMPKGGVFTVATNFADNEIRISLCDTGIGISKENLAKIFEPYFTTRETGTGLGLTQVYKIIREHKGEITVDSSPGTGAEFRISLPVPQRDTRLMH

SEQ ID NO: 67381 - DNA, 1071 bp, Unknown
  Obtained from environmental sample
  misc_feature (1)..(1071): n is a, c, g, or t
gtgtttgagaatataatcgaacaaagcgccgttctccagttacgcgatgatattctagcgaaacgaaacgctccaagtatgctgtttttcggtccgtcgggaagcggaaaaggcagcgctgcgctggaactggctcgtgttctctcttgcgaggaaaaagcggcgtggggctgtaaatgttcctcgtgtgaaaaacacaggcttttacagcatgacgatttattggttttgggaacacgttctttttctcctgaaatacttgcctgccaacacgcttttttacgaaatccgtcaaaggcgaaaattttatttttcaggtctctgcgaaaactgcaaattcgcttttctcctgtcttgttggaaaatgatacaaagaccgctaaagcggtgtcgtcaaatttgcagtctcttgacgaagggcttaatgagctactgtcgcttaacaccgaaacagccgaagaagccgctcttaaaaaactctgcgcttcccttgtaaaagacgctcttgcccttgaaagcgaaggaattaacggcattcccataggtcatataagaagcgcgtcttactggtgcagacttgcgcctaacggaaagcgtaagacgctgataatagaaaacgccgaagacatgagggacgacgcccgcaattcgctcttaaaattactcgaagaacctcctccttccgtcagcattgttcttacggcgcaaaggcgtgaggcgataatgcagacaattttatcccgtctgcgtccgtatcgtttcttgaaaaggagcgaggaaagcgagaaggaagttataaggagcgtgtttaaggaaaattctgaattaacgtatcccaatcaaaaaggttcgatactttcttcttaccttgattccttccttccgcaaagtacggaaaaattgtatccgcttgcggcgtggtttattgtttcttttgcgagaaccgcttccatttacgctaaaaacaaaggaaagccgcccgctttcttgatagcgttaggcgaacaatacgcccctggggcggaaacggcggggattggagcgttataccaaaaacgcccgccattgtaa

SEQ ID NO: 67382 - protein, 356 aa, Unknown
  Obtained from environmental sample
  misc_feature (1)..(356): Xaa is any amino acid
MFENIIEQSAVLQLRDDILAKRNAPSMLFFGPSGSGKGSAALELARVLSCEEKAAWGCKCSSCEKHRLLQHDDLLVLGTRSFSPEILACQHAFLRNPSKAKILFFRSLRKLQIRFSPVLLENDTKTAKAVSSNLQSLDEGLNELLSLNTETAEEAALKKLCASLVKDALALESEGINGIPIGHIRSASYWCRLAPNGKRKTLIIENAEDMRDDARNSLLKLLEEPPPSVSIVLTAQRREAIMQTILSRLRPYRFLKRSEESEKEVIRSVFKENSELTYPNQKGSILSSYLDSFLPQSTEKLYPLAAWFIVSFARTASIYAKNKGKPPAFLIALGEQYAPGAETAGIGALYQKRPPL

SEQ ID NO: 67383 - DNA, 453 bp, Unknown
  Obtained from environmental sample
  misc_feature (1)..(453): n is a, c, g, or t
gtggggttaatagggctttttatgatccgctgttatctgaaaggttttgtcagcgaaattttatcaatggcggcggtagtgcttgggcttcttgcggcgttattcttccataagagcggagccgagtatttaaaaaatcaattctggcacgatacaaatattacgcttctgaaaatagcggcgtttgccattttgtttatttttgtttttatagttgttaaaatagtagaaagaatgttaattaatataattgacgcggtaagtcttacaaacgccgacagttatcttgggataattttcggtttggcggaaggtctggcggtggtaagcctgataatttttttattgaagatacagccgctttttgattctactgcaatgttaaacgacagtattttcgctcggtatttactgcccttaattacgggaaaggagaaagtttcaagtgtttga

SEQ ID NO: 67384 - protein, 150 aa, Unknown
  Obtained from environmental sample
  DOMAIN (1)...(150): Colicin V production protein
  misc_feature (1)..(150): Xaa is any amino acid
MGLIGLFMIRCYLKGFVSEILSMAAVVLGLLAALFFHKSGAEYLKNQFWHDTNITLLKIAAFAILFIFVFIVVKIVERMLINIIDAVSLTNADSYLGIIFGLAEGLAVVSLIIFLLKIQPLFDSTAMLNDSIFARYLLPLITGKEKVSSV

SEQ ID NO: 67385 - DNA, 465 bp, Unknown
  Obtained from environmental sample
  misc_feature (1)..(465): n is a, c, g, or t
ttgaggagaaactttatgaaaaattattttttatgctttgtaatgattttgtcattactgacggctgtatgcggttgttctagcgatttaagcccccaacaagagacaaccgtaatccctgacaattcaatacaggggacggagcaagagccgaatgagcagccggaacatcaaggcgaaaaagagccgcctgtcatcgaaacgcctgaagttataccgccggaaacagaacagcctgaaactgtgccgccgattgtcgagccgcccgaaacagaaccgccggaaattgtaccgcccgaagtgataccgccgattgtcgagccgcccgaaacagaaccgccggaaattgtaccgcctgttgtcgagcccgcggaaaaagagccgcctgtcatcgaaacgcccgaagttgaaccgccggaaacagaacccgcccgaagttataccgccgatagtgccgccgaataa

SEQ ID NO: 67386 - protein, 154 aa, Unknown
  Obtained from environmental sample
  SIGNAL (1)...(25)
  misc_feature (1)..(154): Xaa is any amino acid
MRRNFMKNYFLCFVMILSLLTAVCGCSSDLSPQQETTVIPDNSIQGTEQEPNEQPEHQGEKEPPVIETPEVIPPETEQPETVPPIVEPPETEPPEIVPPEVIPPIVEPPETEPPEIVPPVVEPAEKEPPVIETPEVEPPETEPARSYTADSAAE

SEQ ID NO: 67387 - DNA, 786 bp, Unknown
  Obtained from environmental sample
  misc_feature (1)..(786): n is a, c, g, or t
ttgtcgagccgcccgaaacagaaccgccggaaattgtaccgcctgttgtcgagcccgcggaaaaagagccgcctgtcatcgaaacgcccgaagttgaaccgccggaaacagaacccgcccgaagttataccgccgatagtgccgccgaataatgccgtacttttaataaatgaattgaggacggaatactcaatttcgtctaaacgtgcggagtatatcgagttcaaagttttggcagagggtaatttaaatggtttaagcgttcacattatgaatgacgcaagtaatccgtttgtttataaccttccagatgtgaatgttaataagagcgaatatataacgcttcatctgcggacgcttgaaaaaaattgcgttaatgaattgggggataatctggcattatcaggcggtaatgacagttgccctaccgcaagggatttatgggtagagggtagtaataaatatctttataaaaccgatattgtttatttacaggacgcaagcggaaatatcatggacgctgttgtattaaatgaaaatccaaataagacgtgggataaagctgtttcacattttcaagcgataacggaatttttatttaatgttggggcatgggaaagcaaggacggagaaaagcctacgcctttagacgctgttgacacttcggctgtaagtacgagttacataaaatgcgtttgccgttatgaatggagagcaaaccattttaacgctacagactggtatataaacactacaatatcgacccctgggcttgcgaataattag

SEQ ID NO: 67388 - protein, 261 aa, Unknown
  Obtained from environmental sample
  misc_feature (1)..(261): Xaa is any amino acid
MSSRPKQNRRKLYRLLSSPRKKSRLSSKRPKLNRRKQNPPEVIPPIVPPNNAVLLINELRTEYSISSKRAEYIEFKVLAEGNLNGLSVHIMNDASNPFVYNLPDVNVNKSEYITLHLRTLEKNCVNELGDNLALSGGNDSCPTARDLWVEGSNKYLYKTDIVYLQDASGNIMDAVVLNENPNKTWDKAVSHFQAITEFLFNVGAWESKDGEKPTPLDAVDTSAVSTSYIKCVCRYEWRANHFNATDWYINTTISTPGLANN

SEQ ID NO: 67389 - DNA, 1005 bp, Unknown
  Obtained from environmental sample
  misc_feature (1)..(1005): n is a, c, g, or t
gtggcttcaactataggtattaaaatcgcaaacggagaattttattcaattattgaagaaaattcccaggtgaaaaaacggttggttttaactaccgttcataacaatcaacagagtgtacaaattgatctttacaggagttctacgggtaccatggccgatgccttttatgttggcagcctggttttggagaacataaaaaagcggtcaaagggcgagccttccatcgaacttgttattgcttctgactcagagggaaacgttacggcagatgcgattgatcttgacgcttccggagaacggcaaacccttaatgtgtctcttaagtccatggatgatgaaaatctgggcgctgacattcctgattttgaaattgacaataacgagaaagtgccgaaagggctttatgaaaaacctggagaatcaggtgaaaaaaagggaagaaaaagatttccgtggttattggtggtcttggccgctttggtattgacagccgctgctcttttgctctggctatttttctttcagggattgccccctgttgctgccattaaaaaactggcggcccccatattacagagctggtcggtcgaagccaccgccccagccgctcaaacggccgtcgctccggcatctcaacctactgccccggcggttcaaatgaccaccccagtggtagagtccgctccgcaaacgactcaacctaccgccccagcggttcaaatgccaccgccggttattcaggctccggcccaggctccggcaaatacagcctcggctaaccggcagcgacctcccgctccggtaacttcctataatgttccgtcggtaataccaaaggaaggggtttcttacaggatacgctacggcgatactctgtgggagattgccgacgctttttaccgcaatccatggctttttccccgcatcgctcaattcaataatatacgcaacccgaatctgataatctcgggaaccacgatcattgtcccgcccaggaattaa

SEQ ID NO: 67390 - protein, 334 aa, Unknown
  Obtained from environmental sample
  DOMAIN (285)...(331): LysM domain
  misc_feature (1)..(334): Xaa is any amino acid
MASTIGIKIANGEFYSIIEENSQVKKRLVLTTVHNNQQSVQIDLYRSSTGTMADAFYVGSLVLENIKKRSKGEPSIELVIASDSEGNVTADAIDLDASGERQTLNVSLKSMDDENLGADIPDFEIDNNEKVPKGLYEKPGESGEKKGRKRFPWLLVVLAALVLTAAALLLWLFFFQGLPPVAAIKKLAAPILQSWSVEATAPAAQTAVAPASQPTAPAVQMTTPVVESAPQTTQPTAPAVQMPPPVIQAPAQAPANTASANRQRPPAPVTSYNVPSVIPKEGVSYRIRYGDTLWEIADAFYRNPWLFPRIAQFNNIRNPNLIISGTTIIVPPRN

SEQ ID NO: 67391 - DNA, 2259 bp, Unknown
  Obtained from environmental sample
  misc_feature (1)..(2259): n is a, c, g, or t
ttgtcccgcccaggaattaacggcattagccgcgtcttttttcaaatcttttttttattcttttttactctgtttcctcttgcttgtgctggaacaaccccaattctgggtataccccaggacgaagcggcggcgtatctgaaaaaaggagacatgagttttatacgtcaagcgcaattgccggataatttcgctgaagccgagtcccgtctaaagcagttgagtgtaattcacagcgccgctcctttttacgcggggcttttaattggcggcagctctaacaaccttgaaatccttcttttttgcgccgccctggaaagctcctcgttccctgtaaggcgtgaagcggcgttaaaattggttacgctgatttttgaaatagaaaatgaaaaagatgtcagggatatccataattttttaagttcatcaaaattaacagacagggcggaaataaaaacaacccttgccgcctgtctttacaggctgggccgttataatgatgccgcgaaaatagatttgacacagcctgcatcggagaaactggcagaatggaaccgggcgctttcgcttttttcatcattaaaaaagggggcttccgccgaaaacacgcaggaaataaaacccgggattacagcttttcttttcggaaatctttcggatgatgttcgccgctggggcccttggggagcgctttcttcaacagggcttttggatagcgttgagctgtcagtcctttcggcaaggcccgcgcagggaaactatggagaagcactcttaaaactgcgccctgccttgtccgacggaggaagcctctttttcagccacccgaatttaatagcggatttgggcagggcataccagtatacaccctcattatgggaggaagggacaagtctcttcagaagctgggcagcgcttcttgacggacaaaaagaaggggaagcatccaaagaactaaaattttttgtcaatttttacgctggcagaattgagcgggcagggacacaatacgccgaatcaacggaatattttaagcgggctctggaattcgcgcctgacgaattgcagtccgacgcctgtcattggtatgtgctgatgaatgacctcgccgtaagtcccgaagccgcaatgcggcaggctttggctaccatgtcccaatggaatgatgtaaattacttttctgatgttttggacagcctggcctgcaattttaccggcaggcggcagtggaacaatatattggaactgttttccggtcttgaaaaaatcggcacaggcagctctcttgcccaatacgcatggatacttggcagggctgcacaggaagggtacatcaaaacagagcgaagcgcggtaaattttttcagaatcgcttttgataaaggaaatgattctttttactatcgggctatggcggccgccgctctaggggaatcccttggtgaatcttttgctttcgaaggagacaattcttcctcgaaaacacaggatgattcagtgccccgttccgagctggaatttcttttgggtttttttgagtacggcgcgtcttcgtttgcgcttccatacatacgagatgccgagaaagatctttctgtcgccgaactcagaaaggccgcggaagccctcgatgcttccggccgctggaaggattcccttgaccttgtctccagatacaccagccgaaaaaattttgagtttaccaggcaggacctctttttgttttttccccggccgtatagggaactgatagaaaaatacgccggagaagcagaactgggagcggaaatactctacggacttatccgcacggaaagctactttatgagcgacgcggtttcccgctccggggcggtgggtcttgtccagctcatggctcccactgccgaagatatggccggtcggatagccagaagcggcggaccggattaccgcagtccggcgataaacctgaaagacccggagacaagtattcacatcggttcctattatctgcgttaccttatcgtgcaaatgggaaacccgatgctggcgcttctggcgtataacggcggcatgggcagagtacggcgctggattaccgcggacagccggcaggcaggcggcggacttccacatgatctttttcttgaaactatagagttcagtgaaacccgggaatacggacgccgggttttatacgccgcctctgtctatggctatctttactacgggatgagcatggaagaaacagcggcggatatttaccggcagcgttaa

SEQ ID NO: 67392 - protein, 752 aa, Unknown
  Obtained from environmental sample
  DOMAIN (582)...(705): Transglycosylase SLT domain
  misc_feature (1)..(752): Xaa is any amino acid
MSRPGINGISRVFFQIFFLFFFTLFPLACAGTTPILGIPQDEAAAYLKKGDMSFIRQAQLPDNFAEAESRLKQLSVIHSAAPFYAGLLIGGSSNNLEILLFCAALESSSFPVRREAALKLVTLIFEIENEKDVRDIHNFLSSSKLTDRAEIKTTLAACLYRLGRYNDAAKIDLTQPASEKLAEWNRALSLFSSLKKGASAENTQEIKPGITAFLFGNLSDDVRRWGPWGALSSTGLLDSVELSVLSARPAQGNYGEALLKLRPALSDGGSLFFSHPNLIADLGRAYQYTPSLWEEGTSLFRSWAALLDGQKEGEASKELKFFVNFYAGRIERAGTQYAESTEYFKRALEFAPDELQSDACHWYVLMNDLAVSPEAAMRQALATMSQWNDVNYFSDVLDSLACNFTGRRQWNNILELFSGLEKIGTGSSLAQYAWILGRAAQEGYIKTERSAVNFFRIAFDKGNDSFYYRAMAAAALGESLGESFAFEGDNSSSKTQDDSVPRSELEFLLGFFEYGASSFALPYIRDAEKDLSVAELRKAAEALDASGRWKDSLDLVSRYTSRKNFEFTRQDLFLFFPRPYRELIEKYAGEAELGAEILYGLIRTESYFMSDAVSRSGAVGLVQLMAPTAEDMAGRIARSGGPDYRSPAINLKDPETSIHIGSYYLRYLIVQMGNPMLALLAYNGGMGRVRRWITADSRQAGGGLPHDLFLETIEFSETREYGRRVLYAASVYGYLYYGMSMEETAADIYRQR

SEQ ID NO: 67393 - DNA, 849 bp, Unknown
  Obtained from environmental sample
  misc_feature (1)..(849): n is a, c, g, or t
ttgccgcctacagcccaaatggaagatctggttgacgcgggtgacgggaacaccttctttttcctgggaagcgatgaacgaagagagctgtttcttaaagatctggaaattattgaccggcctcagccgcgtattcgatatgatttgtttattatacaggtgcaggaaagcagtaacttaaactggagtgcacaggcggaagcaaggtttgtccggcccggcgacagaacaatggttacaggccaactgggaaatctgctcaatttaaattttgacatcataaccgtatttggctatcaattcgcggcgaagctgaaccttgccatatccgacaaccaggcaaacgtatttgccgacacaacgctctttggcctttcagggcaggaaattaaatttcagaataccagcacctaccgataccgggattccaacattgaccctgataccggcaagccgatttataccggcgttacaagggagattgtctctggtctggtgctggaaataaaaggctgggtttccggagacggaatgatcactaccactgtgacggcgtctgtgtccaggcgcggtgccgaggtttcttctgctatcggaaatccgccgcccacgtcggagagggttttaacaactcaggttcgcgccagatcgggtgaaacggttgttttaagcggtctgcggcaaaacgattccagcatcgtcgaacagcgactcccgctactttcaaagattcctttattaggctggcttttcaaaagcaaaaataattcgaccgaaaattcgcagatgataatttaccttgtgcctcatgttgatattgccaacgacgagtacacagtaagcggttaa

SEQ ID NO: 67394 - protein, 282 aa, Unknown
  Obtained from environmental sample
  DOMAIN (46)...(273): Bacterial type II and III secretion system protein
  misc_feature (1)..(282): Xaa is any amino acid
MPPTAQMEDLVDAGDGNTFFFLGSDERRELFLKDLEIIDRPQPRIRYDLFIIQVQESSNLNWSAQAEARFVRPGDRTMVTGQLGNLLNLNFDIITVFGYQFAAKLNLAISDNQANVFADTTLFGLSGQEIKFQNTSTYRYRDSNIDPDTGKPIYTGVTREIVSGLVLEIKGWVSGDGMITTTVTASVSRRGAEVSSAIGNPPPTSERVLTTQVRARSGETVVLSGLRQNDSSIVEQRLPLLSKIPLLGWLFKSKNNSTENSQMIIYLVPHVDIANDEYTVSG

SEQ ID NO: 67395 - DNA, 1110 bp, Unknown
  Obtained from environmental sample
  misc_feature (1)..(1110): n is a, c, g, or t
gtgcagtatataggcatgaagcgcataaggctgataataatactctttacattttcctgtattgccctgcatgggcaaagcaggaaaagtcagctcattagttttgattttgtcgatcagcagattcgggaaattttgtacgcgttttcttcttacgcgggcatttccattattggcgatgatacggtaacggggacagcgagttttcagtataacggcgcaagttttgaacaggcgtttgattcgtttctattaacaagccgtttgtttgttgaaaaaacaaacgaagtctgggatgtttcaaaaataaaaattacggctaataatgatgttattgtccttgattctctggatgcgactgcctcccagttgacggataaactgagccgtaaaaccaacgctaccattttaaaagacatactcccggaaacccgcctgtccgtgcatttggaaaccggaactactcgggaagcggtggaactgtatatgaaacctttctacgactataccgtagaggccgccgacaactatatacatatcaaaaaagcaaatgccctgccttttggttccttctcattnggcggcgcttcttcaattatcattaatgaaaatgaaggcgtctttgatgtcgacattgaacacgccggaattggcgaagtgcttaacaggctgtttcaggcagccgggcgggaatacatttctttcacacgtcccgatcaaatgatagagaggacaaaattttcgggcagaggatttaatgagacattgaaaataattctggaacagggaggaggtgagtataaagagataggtgatatgttttatatcttcccgcttcagcaaagtgaaataatcgcttcactgaaaaatgaggggaaaacctggcagtcttttgaagtactgtaccaccgaacggcggagattttaccgcttgttcagagccgctttacaggcatacaaaccgtttcgttgtctggcagcaataccttccttgctttagccggcagggaaacagcggaggaaatacgcgcctatatcacagcaattgatttacccaaacgccgcgaagctatcaggcttaaatttataaagactcgaggatctatatag

SEQ ID NO: 67396 - protein, 369 aa, Unknown
  Obtained from environmental sample
  SIGNAL (1)...(25)
  misc_feature (1)..(369): Xaa is any amino acid
MQYIGMKRIRLIIILFTFSCIALHGQSRKSQLISFDFVDQQIREILYAFSSYAGISIIGDDTVTGTASFQYNGASFEQAFDSFLLTSRLFVEKTNEVWDVSKIKITANNDVIVLDSLDATASQLTDKLSRKTNATILKDILPETRLSVHLETGTTREAVELYMKPFYDYTVEAADNYIHIKKANALPFGSFSXGGASSIIINENEGVFDVDIEHAGIGEVLNRLFQAAGREYISFTRPDQMIERTKFSGRGFNETLKIILEQGGGEYKEIGDMFYIFPLQQSEIIASLKNEGKTWQSFEVLYHRTAEILPLVQSRFTGIQTVSLSGSNTFLALAGRETAEEIRAYITAIDLPKRREAIRLKFIKTRGSI

SEQ ID NO: 67397 - DNA, 840 bp, Unknown
  Obtained from environmental sample
  misc_feature (1)..(840): n is a, c, g, or t
atgccaatgagcctgaatacgaacataagcgccttggcagtgaagctcggcatgagcaggcagaacttttacaaaggacggagggcaagggtaaaagaggaagcggacgctgaccttgtggaacagcttgtaagaggcgaacgctcactgcagcccaggcttggcggacggaaattattcaaaatccttgttccgctgcttgaaaatgaaggaataaagcttggcagggacagatttttcaatattttgcgcgaaaaagggctgttagtgcccccgctgccgaaaagccccagaacgaccaggttcgagccctgcctgccggtattccataacctggtagccgggcttgaattgaccgggccgaaccaggcatgggctgccgatataacgtatatccggactgatgaagggttcctctatttgagcctgattaccgacatgtggtcacggaagatagtagggcttcatgttggagacagccttgaaacagagggtgcgttagcagcattagccatggcgttagcgtcgctcagaagcggcacaaagccggtgcatcattctgaccgcggctgccagtatgcatcgcatctgtatgtcggtaaattgcaggaggcaggactgcaaatcagcatgactgaagaattgcattgttatgaaaatgcaatggctgaacgagtaaacgggatattgaaacaggaatattacattggttcttgctttaggaataaaaatcaggcgaaggcagcggtgaaagaggctgtgtatttatacaatacacggcgtccgcacatctcgcttgattatgagacaccggaaaaaatgcatgggactgcggcataa

SEQ ID NO: 67398 - protein, 279 aa, Unknown
  Obtained from environmental sample
  DOMAIN (117)...(276): Integrase core domain
  misc_feature (1)..(279): Xaa is any amino acid
MPMSLNTNISALAVKLGMSRQNFYKGRRARVKEEADADLVEQLVRGERSLQPRLGGRKLFKILVPLLENEGIKLGRDRFFNILREKGLLVPPLPKSPRTTRFEPCLPVFHNLVAGLELTGPNQAWAADITYIRTDEGFLYLSLITDMWSRKIVGLHVGDSLETEGALAALAMALASLRSGTKPVHHSDRGCQYASHLYVGKLQEAGLQISMTEELHCYENAMAERVNGILKQEYYIGSCFRNKNQAKAAVKEAVYLYNTRRPHISLDYETPEKMHGTAA

SEQ ID NO: 67399 - DNA, 681 bp, Unknown
  Obtained from environmental sample
  misc_feature (1)..(681): n is a, c, g, or t
gtgaaatcttttcagaccgacaacccggacaaacacattctggaaattcttgataagcataaaggcgcgaaaattgaagggcttcccccgtttacaggcggacttgtcggctacttcgcctacgattacgcgaaatacgccgagccgtcccttaaacttgacgctcccgacaaggaatattttcaggatgtcgatttaatgctctttgacaaggttatcgcgtttgaccactacaagcaaaaaatagttttaattgtcaatatcaacgttgaaaacataaaagcggaatacaagagcggcgttgaaaaacttgatgatttaaaaagcatgattaaaaacggtgttccccaacagccccagaaggctaaagtaaagtccgagcttaaatcgctgtttacaaaaaatgaatattgcgaaatggtaaagaaagcgaagggacatatcaaagagggcgatatttttcaagttgtgctttccaaccgttttgaagcggattttgaaggcagcctttttgacacctaccgcgtaatgcgtacgataaacccgtcgccgtatatgttttatttcagcggaagcgatcttgaaatcgccggcgcttcacccgaaacgcttgtaaaattgcatgacggaaaaattgttcacctacccgcttgccggcacacgtcccagaggcaaggatga

SEQ ID NO: 67400 - protein, 226 aa, Unknown
  Obtained from environmental sample
  DOMAIN (133)...(226): chorismate binding enzyme
  misc_feature (1)..(226): Xaa is any amino acid
MKSFQTDNPDKHILEILDKHKGAKIEGLPPFTGGLVGYFAYDYAKYAEPSLKLDAPDKEYFQDVDLMLFDKVIAFDHYKQKIVLIVNINVENIKAEYKSGVEKLDDLKSMIKNGVPQQPQKAKVKSELKSLFTKNEYCEMVKKAKGHIKEGDIFQVVLSNRFEADFEGSLFDTYRVMRTINPSPYMFYFSGSDLEIAGASPETLVKLHDGKIVHLPACRHTSQRQG

SEQ ID NO: 67401 - DNA, 360 bp, Unknown
  Obtained from environmental sample
  misc_feature (1)..(360): n is a, c, g, or t
atgccgcgcttgttctgttcaagttcattgatgatctgcatggcgcgtatcttcggcgctcccgagagagtgcccgcgggaagaatggcgtttatcgcgtccagccctgtttttccgccgatgatttccccgcttacggtcgagcctatgtgcataacgtgggaaaaacgcaagatagacatgtacttttctacttttaccgttccgaatttactgatctttcccaaatcgttacgtccgagatctaccagcatattgtgttcggcaagttctttctcgtccgcaagcagttctttttccagcgccaaatcttcgcgtcatccttgcctctgggacgtgtgccggcaagcgggtaggtga

SEQ ID NO: 67402 - protein, 119 aa, Unknown
  Obtained from environmental sample
  SIGNAL (1)...(19)
  misc_feature (1)..(119): Xaa is any amino acid
MPRLFCSSSLMICMARIFGAPERVPAGRMAFIASSPVFPPMISPLTVEPMCITWEKRKIDMYFSTFTVPNLLIFPKSLRPRSTSILCSASSFSSASSSFSSAKSSRHPCLWDVCRQAGR

SEQ ID NO: 67403 - DNA, 522 bp, Unknown
  Obtained from environmental sample
  misc_feature (1)..(522): n is a, c, g, or t
ttggcgctggaaaaagaactgcttgcggacgagaaagaacttgccgaacacaatatgctggtagatctcggacgtaacgatttgggaaagatcagtaaattcggaacggtaaaagtagaaaagtacatgtctatcttgcgtttttcccacgttatgcacataggctcgaccgtaagcggggaaatcatcggcggaaaaacagggctggacgcgataaacgccattcttcccgcgggcactctctcgggagcgccgaagatacgcgccatgcagatcatcaatgaacttgaacagaacaagcgcggcatttacggcggcgcggtgggctatcttgactttaccggaaacatggacacctgtatcgctatcagaatcgtgtacaagaaaaaaggcaaagtttttatccgctgcggggcgggaattgtcgcggacagcaatcccgaatccgagtatcaggaatgcgtaaacaaatcgaaggcggcgcaaaacgcgcttatgcagtcctcgggagggatagactga

SEQ ID NO: 67404 - protein, 173 aa, Unknown
  Obtained from environmental sample
  DOMAIN (1)...(165): chorismate binding enzyme
  misc_feature (1)..(173): Xaa is any amino acid
MALEKELLADEKELAEHNMLVDLGRNDLGKISKFGTVKVEKYMSILRFSHVMHIGSTVSGEIIGGKTGLDAINAILPAGTLSGAPKIRAMQIINELEQNKRGIYGGAVGYLDFTGNMDTCIAIRIVYKKKGKVFIRCGAGIVADSNPESEYQECVNKSKAAQNALMQSSGGID

SEQ ID NO: 67405 - DNA, 630 bp, Unknown
  Obtained from environmental sample
  misc_feature (1)..(630): n is a, c, g, or t
atgcgtaaacaaatcgaaggcggcgcaaaacgcgcttatgcagtcctcgggagggatagactgatgattctcttaattgataactacgacagtttttcatataacctgtaccagtgcatcggttcgattgacccggacataaaagttgtgcgtaacgatgaaatcaccgtggacgaaataaaaaatctctctccttcccgcatagttatctctccaggccccggcaaaccttcggacgcgggaatttgtatcgaagttataagaaatctcagttccatgtcgccgattatcggcatctgtcttggtcatcaagcgatcttcgaggcttttggagggactgtctcctacgcaagccgccttatgcacggtaagtcatcggaagtaaaagttgacacaagcaaccccctgtttaagggattgccgcagaaaatacaggcggcaaggtatcattcgcttgcgggaattaaatcgacactgccggatgttttgagcgttatcgcggaaaccgaagacggcgaaattatgggagtgtgccacaaagagtaccccatatatggcgtacaattccatcccgaatcaatacttactccggaagggaagacgataattaaaaattttatgaatggataa

SEQ ID NO: 67406 - protein, 209 aa, Unknown
  Obtained from environmental sample
  DOMAIN (22)...(192): Peptidase C26
  misc_feature (1)..(209): Xaa is any amino acid
MRKQIEGGAKRAYAVLGRDRLMILLIDNYDSFSYNLYQCIGSIDPDIKVVRNDEITVDEIKNLSPSRIVISPGPGKPSDAGICIEVIRNLSSMSPIIGICLGHQAIFEAFGGTVSYASRLMHGKSSEVKVDTSNPLFKGLPQKIQAARYHSLAGIKSTLPDVLSVIAETEDGEIMGVCHKEYPIYGVQFHPESILTPEGKTIIKNFMNG

SEQ ID NO: 67407 - DNA, 930 bp, Unknown
  Obtained from environmental sample
  misc_feature (1)..(930): n is a, c, g, or t
atgaatcctgccgatggaaaaacattaattcttggcagcggcggctcttccgtaacggtacaagccgtgttaaaaagccaaaactcgcgcgaaattgtcgtcatttccagaaccggcgaaaacaactatgaaaaccttgaaaaacactccgacgcgaaatggattgtaaacacgacgcctgtgggaatgtacccgaacaacggcatctcccctatccccgatcttaaaattttcaatgaatgtaaatgtataatcgatcttatttacaaccccgccagaacggaattgctcgcgcaggcgcaggatgccggaattcccgcttttaacggactggcaatgctgacagctcaggcaaaaaaagccgcggaatattttacggatacggacattgcgaatgaggaaatcgaaagaatcaattcaataattgcccgccaatctttgaacattgtcttgattggcatgcccggctgcggcaaaaccagcgtagggaacgccctcgcaaaaaaaatgggacgtgaatttatcgacaccgacaaactgataacgcatgccgccggcaaaccgatacccgaaatatttgcagataacagcggaggcacaaccggggaagaaaaattcaggacactggaaacaagtattttgcgggatgtatgcaaacagagcggaaagataatcgcaacaggcggcggcgttgtaacgcgggaagtgaaccgccgtattatcaggcagaacggcattgttgtcttcagggaaagggatatttctcttttatcggttaaaggccgccccgtttcccagcgcgacggcattgaggcgcttgcggcggcgcgtctgccgctttatcgcagttggagtgattatacagcgcaggggcacaacatagagcaaacggtggtagatatacagaaattatttgaagagaataattga

SEQ ID NO: 67408 - protein, 309 aa, Unknown
  Obtained from environmental sample
  DOMAIN (4)...(97): Shikimate / quinate 5-dehydrogenase
  misc_feature (1)..(309): Xaa is any amino acid
MNPADGKTLILGSGGSSVTVQAVLKSQNSREIVVISRTGENNYENLEKHSDAKWIVNTTPVGMYPNNGISPIPDLKIFNECKCIIDLIYNPARTELLAQAQDAGIPAFNGLAMLTAQAKKAAEYFTDTDIANEEIERINSIIARQSLNIVLIGMPGCGKTSVGNALAKKMGREFIDTDKLITHAAGKPIPEIFADNSGGTTGEEKFRTLETSILRDVCKQSGKIIATGGGVVTREVNRRIIRQNGIVVFRERDISLLSVKGRPVSQRDGIEALAAARLPLYRSWSDYTAQGHNIEQTVVDIQKLFEENN

SEQ ID NO: 67409 - DNA, 1371 bp, Unknown
  Obtained from environmental sample
  misc_feature (1)..(1371): n is a, c, g, or t
atgcgttttgaagaattattgcactggatcgacggccaatttttacagccccaccattttcaatactttcaacgtcagaaccttgcgtttatgcaaaacaaccgggttctgtccatcccttacccctggggtcttattgattttgaagttgacgaagacagcctggccgcgggccggctggtagtcaggcgtttttccgcgattatgggggacgggaccgccttgtccatgcccggcaactgcctcctttcccctctggatttgacggaaaccctgaaggctaaccctaacgagataaccgtatatatagcattgccgcactggtcggaattcgaggcgaacatggccgaggacggagtttcggcggaacggaggcgcttccttccccaaaaaaaacaactccgtgatgaaaataccggggacaatgaaatcatcctgatcacgcggcggctcaacgcgtggctgactacggatctggccgataacaaggacgccgtgattatgccggtattgaagctcaacgtgttaagccatgacaaggaggaaagggctctggagatcaatgaaaaatattttcccccatatatcattttctccgccgagagcgccctctacggaatcatccagggactccttgtagacctgcgccgctgccgtaataaagccatagacatcctcacggggcttaattataaaaatgatgatctttcgggccgtaacgcatacacggtactgaggcttaaaaccctgaacctctacgaacagcgcataacaagcctgacagaatcgggaagcataagcccctatcatctttatctggaactcagctccctcttgtccgagttgatggcctatgaccccgtcaacagcatccgggggataaagccttataatcacgatgactgcgccccggtctttctggaaatcatcaaggatataagatcctttattctccgggaaggaagcgttgactttgtccgcctggatttcaagcccattgaagaaggcaaatatttgtattgtccgattaagccccaggaggtcttcagtaccgagagcgcctatcttgcgctccaatgctcaggtcaaagggacgcggtggttaaggccgtggaggaaggcgacacctttaaactgatcaatccccaatcgaagcatctgcgcatccgggggatcaaactcaacgaggagcattatccgccccgcttcctgccggttatacccaacacccgctggttcaaacttgatctggaggaatcttcgagtgtctggcgggagataaccgatgagaagggcatggtggtcgattatgtagcgggcattttccccggcctggcgctttccctgtacctggcattgggggataaataa

SEQ ID NO: 67410 - protein, 456 aa, Unknown
  Obtained from environmental sample
  DOMAIN (9)...(454): Bacterial protein of unknown function (DUF876)
  misc_feature (1)..(456): Xaa is any amino acid
MRFEELLHWIDGQFLQPHHFQYFQRQNLAFMQNNRVLSIPYPWGLIDFEVDEDSLAAGRLVVRRFSAIMGDGTALSMPGNCLLSPLDLTETLKANPNEITVYIALPHWSEFEANMAEDGVSAERRRFLPQKKQLRDENTGDNEIILITRRLNAWLTTDLADNKDAVIMPVLKLNVLSHDKEERALEINEKYFPPYIIFSAESALYGIIQGLLVDLRRCRNKAIDILTGLNYKNDDLSGRNAYTVLRLKTLNLYEQRITSLTESGSISPYHLYLELSSLLSELMAYDPVNSIRGIKPYNHDDCAPVFLEIIKDIRSFILREGSVDFVRLDFKPIEEGKYLYCPIKPQEVFSTESAYLALQCSGQRDAVVKAVEEGDTFKLINPQSKHLRIRGIKLNEEHYPPRFLPVIPNTRWFKLDLEESSSVWREITDEKGMVVDYVAGIFPGLALSLYLALGDK

SEQ ID NO: 67411 - DNA, 1629 bp, Unknown
  Obtained from environmental sample
  misc_feature (1)..(1629): n is a, c, g, or t
atgcctttggtgcagatgctcatgcttctcaagatttgtatgtccagtctcagacaggaacgggtaaaaccgccgncttttttaatcgtcatttttcaaagaatgctcacggaggaagccttatacaaacgcaaggcgctcatcatggctccgacaagggagttggcggtacagaccgaggaagaagccaaaaaacttggcaagtatctgccttttaaaactggatgtttttatggcggcgttgggtacgcgcaacaggaaaaattgttaaaggaaaacgcgcaaatcttggttggaactccgggaagggtgcttgaccttaacaagtccggcaaaatgaacttgatggagatttcatttcttgttcttgatgaggccgaccgtatgtttgacatgggcttttatcccgatttacgaaagctcattaaggtagtgccttcatctgaccgccgccagacgatgcttttcagcgcgacattaaacgcgtgggtaaaaaatctagcgtgggaatatacaaagtccccgtttgaaattgaggtaaaacccgaaatagtcaccgttgaagaaatcacgcaggttctctaccatgttccatcgggggaaaaaatgacccttcttcttgggattttaaaacgcgagaagcccgaaagcatattaattttttgcaacacaaaaaaacatactgagattgtcgcaaagcgcctcaaactaaacggctatccttgcgaatttattattggcgatcttccgcagataaaacggttaaaaattatcaatgacttaaaagccggaaaaataaaaactcttgtagctaccgatgtcgcggcgcggggtctggatattgagggcctggctatggtggtaaattatgatctgcccaatgaagcggaaaattatgtacaccgtatcgggcgcacggcgcgggcgggcaaaaccggcagggcgatcactctggcaagcgagcaggatgtgtacgaactgcccgccattgaacgctatatcggtaaaaagattccctcggaaattgcagcccaggaacttcatgccgaagataaaagcgccgggcagcagattcgcaccgagttttacgaagatcgcggcgagaagcgtcatccgcatattgctcataccgcgcacggcgctcatggcgcgtacagcggcgcgaaagccgcccggcccggctcccgccggcctgatagccgcggcgatagcaaaagccgcgcagtccgcccgcacggtaaggccgatgacaggccgcatgaaggccatcggcaaagtcacgcgccggttcccgccctcaaaaacgatgcgagccggggcggcaaaaaaggtgaaaaccaccggcaaggtcaacagcaagaacagcggcaagaccgccggcagggtacacaagatatgtcccatttgagttttgaagaacgaatggctttgtataaacagaagtacaattccgggactcctgcccccaaccggcaaaacaagcaggcgggcagaaaacatcccggcaaagcgcagaccccgccgcgcaagccggaaaacctcaaccgcccgcaaaaacagccggaacctgccccccccgccaaaaaaggtgtcttctcccgtttattgngagcattcaaaagaaagtga

SEQ ID NO: 67412 - protein, 542 aa, Unknown
  Obtained from environmental sample
  DOMAIN (234)...(310): Helicase conserved C-terminal domain
  misc_feature (1)..(542): Xaa is any amino acid
MPLVQMLMLLKICMSSLRQERVKPPXFLIVIFQRMLTEEALYKRKALIMAPTRELAVQTEEEAKKLGKYLPFKTGCFYGGVGYAQQEKLLKENAQILVGTPGRVLDLNKSGKMNLMEISFLVLDEADRMFDMGFYPDLRKLIKVVPSSDRRQTMLFSATLNAWVKNLAWEYTKSPFEIEVKPEIVTVEEITQVLYHVPSGEKMTLLLGILKREKPESILIFCNTKKHTEIVAKRLKLNGYPCEFIIGDLPQIKRLKIINDLKAGKIKTLVATDVAARGLDIEGLAMVVNYDLPNEAENYVHRIGRTARAGKTGRAITLASEQDVYELPAIERYIGKKIPSEIAAQELHAEDKSAGQQIRTEFYEDRGEKRHPHIAHTAHGAHGAYSGAKAARPGSRRPDSRGDSKSRAVRPHGKADDRPHEGHRQSHAPVPALKNDASRGGKKGENHRQGQQQEQRQDRRQGTQDMSHLSFEERMALYKQKYNSGTPAPNRQNKQAGRKHPGKAQTPPRKPENLNRPQKQPEPAPPAKKGVFSRLLXAFKRK

SEQ ID NO: 67413 - DNA, 618 bp, Unknown
  Obtained from environmental sample
  misc_feature (1)..(618): n is a, c, g, or t
ttgtttttcaacaaccacgacaatcccaaattcctgtccaaagtcgatcctgaaggcgcttatgcccaaccgcttgcccggtactgggctatattacaactaacgctccggggtacgccgtttctctatcagggggacgaggcgggtacgcaaaatcagccgtttacttccattgacgaaattcatgacgtagaaagcctgggcctctacgccgaactgattaaaaccatgccgccgaatgaagcattcaaacgaatattggcgggaacgcgcgatcacgcccgcgccccccttcgctgggaagaacttgaacgccagcaaagcgatccggattccgtgcggcaattttaccggaatctcatcgctctgcgccgtttttcaaaagcgttgatctacggcgctcttgtctttctgcgccccaaagacaaaaccttgctgagttatacccgcactctggcggatgaatgtttttacattgaagcgaacctcagccccgcaatccgccgcggcaaggctccgaaaggcgctgaattgctgtttggcaattacgccggatcatcgattgcgctacgcccttatgaagcacggatataccgtgtaaagaagaataaaaattaa

SEQ ID NO: 67414 - protein, 205 aa, Unknown
  Obtained from environmental sample
  misc_feature (1)..(205): Xaa is any amino acid
MFFNNHDNPKFLSKVDPEGAYAQPLARYWAILQLTLRGTPFLYQGDEAGTQNQPFTSIDEIHDVESLGLYAELIKTMPPNEAFKRILAGTRDHARAPLRWEELERQQSDPDSVRQFYRNLIALRRFSKALIYGALVFLRPKDKTLLSYTRTLADECFYIEANLSPAIRRGKAPKGAELLFGNYAGSSIALRPYEARIYRVKKNKN

SEQ ID NO: 67415 - DNA, 462 bp, Unknown
  Obtained from environmental sample
  misc_feature (1)..(462): n is a, c, g, or t
atgggaatccccgcgtacgtcgcggcggcgacggcggaggtaacgccgggcacgacttcaaaagggatgtcgttttcggctaatagttccaattcctccccgccgcgggcgaagacaaaggggtcgccgcctttcaatctgatcacgtttttcccctccctggctttttccagcaaaagcttgttgataacatcctgcggtaccggatggctgccggcgtgtttcccgacgtctatcttttcggcggaatcgggaatcacggcaagtatatcatcgcttacaaaacggtcgtacagcacgacgtcggcggcttgtaaggtttcaagccccctgacggtcaatagcccaatgccgcctggaccggctcctaccagagtgactttcatcgactgcccgccctatcttttaaacgcgtggcaagggtttctcctagccgctcgctcttgtctgcgcttccgctga

SEQ ID NO: 67416 - protein, 153 aa, Unknown
  Obtained from environmental sample
  misc_feature (1)..(153): Xaa is any amino acid
MGIPAYVAAATAEVTPGTTSKGMSFSANSSNSSPPRAKTKGSPPFNLITFFPSLAFSSKSLLITSCGTGWLPACFPTSIFSAESGITASISSLTKRSYSTTSAACKVSSPLTVNSPMPPGPAPTRVTFIDCPPYLLNAWQGFLLAARSCLRFR

SEQ ID NO: 67417 - DNA, 897 bp, Unknown
  Obtained from environmental sample
  misc_feature (1)..(897): n is a, c, g, or t
atgaatatgatgaacaggacaatacgaataggaagccgtaacggcccattagctctcgcgcagacgcaaatcgttatcaatgccgtcaagaaaactaatcctgatattgactttgagatcgttaccgtcaaaacaaccggcgataaaatattagacaaaagtttagacgctctcggcggcaagggagcgtttaccaaagagcttgaacaggcgctggccgacggttgcatagacatagccgttcacagttacaaggatatgcctattgatgaaacggacggcctgccagtagcggcgttgtccgtcagagaagcgcctttcgacgttctggtattgcctaaaggggccgccgctcttgaaaaatcaaaacccgtcggctcttcaagcctcagaaggacaattcagttcaaaaaactctatgacggggttgaggtaaaggcgatacgcggaaacgtgcccacccgcttgttaaaattggacgacggcgagtactccgcgctgatactcgctcaggccggtctaaaccgtctctcattgcaagaaaggatttcccgtgtgttcacgatcgacgaaatgattccggccgcctctcagaggattctcgccgttcagggcaggcgcggagaagactactccttccttgaccgctttcacaaccgcgagtcggaaatcgtatccnaggcggaacggctgttcctgagaacattgggcggcggctgcgcttctcccgtcgcggtctacgggcggatacataataatgaattattgcttaccggaatgtatattgatgcttacggcaatatcgagaccggaaatatcagcggaagcgcagacaagagcgagcggctaggagaaacccttgccacgcgtttaaaagatagggcgggcagtcgatga

SEQ ID NO: 67418 - protein, 298 aa, Unknown
  Obtained from environmental sample
  DOMAIN (223)...(295): Porphobilinogen deaminase, C-terminal domain
  misc_feature (1)..(298): Xaa is any amino acid
MNMMNRTIRIGSRNGPLALAQTQIVINAVKKTNPDIDFEIVTVKTTGDKILDKSLDALGGKGAFTKELEQALADGCIDIAVHSYKDMPIDETDGLPVAALSVREAPFDVLVLPKGAAALEKSKPVGSSSLRRTIQFKKLYDGVEVKAIRGNVPTRLLKLDDGEYSALILAQAGLNRLSLQERISRVFTIDEMIPAASQRILAVQGRRGEDYSFLDRFHNRESEIVSXAERLFLRTLGGGCASPVAVYGRIHNNELLLTGMYIDAYGNIETGNISGSADKSERLGETLATRLKDRAGSR

SEQ ID NO: 67419 - DNA, 468 bp, Unknown
  Obtained from environmental sample
  misc_feature (1)..(468): n is a, c, g, or t
atgtccaatcaaaaaacattcttcccgctgtttgttgatatgaacggcaagaaggtattgatagtcggcggtgggaatgtggctgagcggcgggtgaagatccttacctcattcggcgtcaagattaccgttatttcgccggaagttactgaatatattgaacgcattgcctcgtcaaataagatacgtctattaaaacgaaagtatgaaaatgacgatataatcgccgccaacccgtttttagttatcgcagcgactaacaataaacgtgtgaattatgatgtaatgacggaggctaagaacaaaaatatccttgtatctgtcgccaattgtcgtgatgattgtacgttttattttcctgcgattgcggaaaatgacgtctatatcgcggggcttgtgtcgaaatatggcggtaatcactcaggtgttaaacggatggctgaaaagttaagagaggttattaactga

SEQ ID NO: 67420 - protein, 155 aa, Unknown
  Obtained from environmental sample
  misc_feature (1)..(155): Xaa is any amino acid
MSNQKTFFPLFVDMNGKKVLIVGGGNVAERRVKILTSFGVKITVISPEVTEYIERIASSNKIRLLKRKYENDDIIAANPFLVIAATNNKRVNYDVMTEAKNKNILVSVANCRDDCTFYFPAIAENDVYIAGLVSKYGGNHSGVKRMAEKLREVIN

SEQ ID NO: 67421 - DNA, 414 bp, Unknown
  Obtained from environmental sample
  misc_feature (1)..(414): n is a, c, g, or t
ttgctgataagtgaaaacgtcagcgtaacggtcacccggcgctctcataaaagaggcgccgttcaaattcccgaacatgttaacgttatacactacgacgaacggtacaaggcgttagaaatgaccgacatcgtagtcagcgccacgacaagcccgcatataactctttccaaaaacgaaataatcgcacttccacgaataccggaatttattgttgatttggctgtcccaagggacgtagaaccctcggtcaagagcattaacggcattactttattgactatagacgacatatcaggcggagggctgcgtctttccacggaaagcgtttcaatgacggagagcattatcgccgaacatattgagaggtataataggtggctttcggttaaagatcaaaaatgtccgaattag

SEQ ID NO: 67422 - protein, 137 aa, Unknown
  Obtained from environmental sample
  DOMAIN (1)...(101): Shikimate / quinate 5-dehydrogenase
  misc_feature (1)..(137): Xaa is any amino acid
MLISENVSVTVTRRSHKRGAVQIPEHVNVIHYDERYKALEMTDIVVSATTSPHITLSKNEIIALPRIPEFIVDLAVPRDVEPSVKSINGITLLTIDDISGGGLRLSTESVSMTESIIAEHIERYNRWLSVKDQKCPN

SEQ ID NO: 67423 - DNA, 1263 bp, Unknown
  Obtained from environmental sample
  misc_feature (1)..(1263): n is a, c, g, or t
atgcctgacaaccctgaatatctgcctggcgcggataccgacgatttgaccaattcggcgtctcaaaatactttcgtagaagtagaatattttcaattttgcaaatataaacagaatgcgccgggagacgtgtttgtttctaaaaaaaaccccagcgacggacgggtaatcaccgtcctttccgacggactaggttcggggataaaagccggagtgcttgcgacgcttaccgcaactatggcggcaaaattcatttcaaataatattccgattaagagagcgtctaaaatcatcatggacaccctgcccgtatgcagtgtacggaaaataagttatgcgacattcacgcttgtcgatattgctcctgacgcatctgtaaaaatattggagtatgataacccgccctatatgtttataagaaaagaaacggcgcttgaaccttctaaaaaagcgactgcgtttgataagcgggacaaaccgacaggacctaagaatgacgctaaagtgctttattcgcattttaaggcgcaaagcggagatcgtctggtgtttttttccgacggggtaagtcaagccggcataggaaacaaagcttttcctttcggctggacaaccgcaaaagcccgagagttcgcccttcagagcgtccgtgaaaaacctgaaatcagcgcccgtgaattagcgcacgctgttgtccgccgggcttcgcagattgatcaatacaaaccaaaggacgatatatcctgcggcgttatttatttccgcagacccagaaatatgctgataattacgggaccgcccgttcaccccgaaagcgacaaagagattgcgaatattttttcctctttcaacgggaataaagttgtatcaggcggcactaccgccaccattatcagccgcgaacttaaccgtaagataaaagtgaacatgaaaagcttcgacaaaaatataccgccatggtcggagatggaaggcgcggacatggtaaccgaaggcatcatcaccctgggagcggttcaggcgatgctggagaaccgcagcgaactggaggcgcacgccggaggccgagacgccgcttcccgcatgatcgacctcctcttggacagcgaccggatcacatttatcgtgggcaccaagatcaacgaagcccaccaggatcctaccatgcctgtagagctggaaatcaggcgcaacgtgatcaagcgccttgcttcattgttgaaagaaaaatacctcaaagaggtacagatacgttatttttag

SEQ ID NO: 67424 - protein, 420 aa, Unknown
  Obtained from environmental sample
  DOMAIN (52)...(255): Stage II sporulation protein E (SpoIIE)
  misc_feature (1)..(420): Xaa is any amino acid
MPDNPEYLPGADTDDLTNSASQNTFVEVEYFQFCKYKQNAPGDVFVSKKNPSDGRVITVLSDGLGSGIKAGVLATLTATMAAKFISNNIPIKRASKIIMDTLPVCSVRKISYATFTLVDIAPDASVKILEYDNPPYMFIRKETALEPSKKATAFDKRDKPTGPKNDAKVLYSHFKAQSGDRLVFFSDGVSQAGIGNKAFPFGWTTAKAREFALQSVREKPEISARELAHAVVRRASQIDQYKPKDDISCGVIYFRRPRNMLIITGPPVHPESDKEIANIFSSFNGNKVVSGGTTATIISRELNRKIKVNMKSFDKNIPPWSEMEGADMVTEGIITLGAVQAMLENRSELEAHAGGRDAASRMIDLLLDSDRITFIVGTKINEAHQDPTMPVELEIRRNVIKRLASLLKEKYLKEVQIRYF

SEQ ID NO: 67425 - DNA, 1635 bp, Unknown
  Obtained from environmental sample
  misc_feature (1)..(1635): n is a, c, g, or t
atgaccgccgcaaaagcgcctgtttatacagagcttgccgaatgtcatgactgttacaagtgcattcgcaaatgtccggtaaaatctatcaaggtggagaagggacaggcgagcattctgtttgaccgatgtatttactgcgggcgctgtgttaaaagctgtccctcccatgccaagcattaccgcaacgatgttgaaaaagtaaaactgcttttaacaaacgaaaagaaagcggtggtttccctcgccccctcgtttgtttctgaatttaccgactggaaacaggaagaacttattgccgcgttaaaaaaattggggttcgccgccgtgtcggaaaccgctctcggcgcggattttctttccgcccgcattgccaaagatttagcgtcgctctccgcatcccgatcttcggacaaactgcccctgatgatttcttcggcgtgtcccgtcattgtcgattatataaaactctactatccggctcttgcgccctatgtttcgccgcacgcctcgccgcttcttgctcacgcccgtttccttcgttcaaattacggggcggttgtatttatcggaccgtgtaccgcaaagaaacacgaagccgatctttacagcgaagaaatttacgcctctattactttcacggaattgcgcgagtggctgaaaaaagagcgcataacgcctaagacagtttcatcttccgcttcggagaactatgcgtttgaacctcgccgcagcgctaagggggcgtttttcccctttgaaggcggagaaataaccgctttttccgcctatgttgcggaagcggcgaaaaaagagaaaggacttcagatacatactatctcagcttctggttttcacgcggctggggatttgttagatgaatttgatccctctatgcatctggaagctccggtgtttctggaactgcttgcctgtcccggcggctgtctcaacggtcccggaacaaccgacacaacgcctggcattatccgccatgtgcgtctgaaggattacgccgacagcgccgacaataccctcgacagcggaatgctttctcaatcgcccgtaattgacgttaattacccgctggctcctctgccggaattaaaacatacggaacaagaaatcaccgaagcgctttggaaggtgggaaaagacagccttgccgacagacttaactgcgcaagctgcggttataatacctgccgtgatttcgcactagctctattagacggacgggcggaaaaatatatgtgcgcatcgtatatgcgcaaacttgcaaacaaaacagccaacagtcttatcaaagctattccttcaggcgttgtcatcgttgaccgtgacttgaaaattatcgactgcaacgaacggtttgcccatcttctgggaggcgaagccgaagaactgtacgcccttatgccgggaatggaaggggcggaactcgctaaaatatcgtcttttacgcagtatttccaaacgattattgatccgtcaggaccggaaattgcgacttccgatgtgcgcgtaggcagtaaaatatttcacctaactgtttcgccgggaaaaaggtattgcggcggcgggtgttgtggaagatattactgcgccgagagtgcaaatagaaacaaccgttga

SEQ ID NO: 67426 - protein, 544 aa, Unknown
  Obtained from environmental sample
  DOMAIN (388)...(422): Putative Fe-S cluster
  misc_feature (1)..(544): Xaa is any amino acid
MTAAKAPVYTELAECHDCYKCIRKCPVKSIKVEKGQASILFDRCIYCGRCVKSCPSHAKHYRNDVEKVKLLLTNEKKAVVSLAPSFVSEFTDWKQEELIAALKKLGFAAVSETALGADFLSARIAKDLASLSASRSSDKLPLMISSACPVIVDYIKLYYPALAPYVSPHASPLLAHARFLRSNYGAVVFIGPCTAKKHEADLYSEEIYASITFTELREWLKKERITPKTVSSSASENYAFEPRRSAKGAFFPFEGGEITAFSAYVAEAAKKEKGLQIHTISASGFHAAGDLLDEFDPSMHLEAPVFLELLACPGGCLNGPGTTDTTPGIIRHVRLKDYADSADNTLDSGMLSQSPVIDVNYPLAPLPELKHTEQEITEALWKVGKDSLADRLNCASCGYNTCRDFALALLDGRAEKYMCASYMRKLANKTANSLIKAIPSGVVIVDRDLKIIDCNERFAHLLGGEAEELYALMPGMEGAELAKISSFTQYFQTIIDPSGPEIATSDVRVGSKIFHLTVSPGKRYCGGGCCGRYYCAESANRNNR

SEQ ID NO: 67427 - DNA, 837 bp, Unknown
  Obtained from environmental sample
  misc_feature (1)..(837): n is a, c, g, or t
atgtcgacgcatgacgcgcttgtaaagatttatcaatctgttcacgccattaaatcaaatgcggttatcctcggattaaatgtattcggcaacaaggtgcacgctctggaatcaaaaataaagaaattacgcgaaataccgaacgtgcctttcagtgaaatgttaaatctgactatggaaatagaaaaaatttccaaagaaaaagacggatttgcggacatcctcagcaagatacaaagttacgcgggcggcggcaagaacaaaagcggcggcgaaaaacaaaatatcaaagtccttattgaatctcttgcgaaaacaacgtccagagtcgccgaagatttggaaaaacaaattaaatttatttcctccgatattgatcctgaagccattgataaaggtccaagacgcataataaaagaaatactaatgcagttaatccgcaactccgctctgcacggcatagaaatgcccgaggaaagaaaagccaaagggaagaatgaaactggtgtcataaaacttaccattaagatgacggaagatcataaaaacattcatataaaacttattgacgacggcggaggtcttaattacaagaaaatcgccgaaagggctttagcaaaaaaattaattaaaccggaagatgcgaaaaatcccgatgttttaatgaaagtaatattcatgcccggcttcagcactgcggatacggaaacagttcacggcggaagaggcatcggtttaaatcttgtacgcgatcgtataaaagaagtaaaaggcgctattaaagtcaaatcggaaaccgacaagggaacgatgttctttatatcacttcctgtttga

SEQ ID NO: 67428 - protein, 278 aa, Unknown
  Obtained from environmental sample
  DOMAIN (133)...(278): Histidine kinase-, DNA gyrase B-, and HSP90-like ATPase
  misc_feature (1)..(278): Xaa is any amino acid
MSTHDALVKIYQSVHAIKSNAVILGLNVFGNKVHALESKIKKLREIPNVPFSEMLNLTMEIEKISKEKDGFADILSKIQSYAGGGKNKSGGEKQNIKVLIESLAKTTSRVAEDLEKQIKFISSDIDPEAIDKGPRRIIKEILMQLIRNSALHGIEMPEERKAKGKNETGVIKLTIKMTEDHKNIHIKLIDDGGGLNYKKIAERALAKKLIKPEDAKNPDVLMKVIFMPGFSTADTETVHGGRGIGLNLVRDRIKEVKGAIKVKSETDKGTMFFISLPV

SEQ ID NO: 67429 - DNA, 414 bp, Unknown
  Obtained from environmental sample
  misc_feature (1)..(414): n is a, c, g, or t
ttgcaaaaaaacttctgtcctactgcggagttccacgatatcatggagttggcaaaaaacggaaaattaggccaggttgatcttttaatcggtgatattacggatacaagccttagttttttaaacggcgaaagcacagcttccaatttcggaaaaatgctggataccgccacccatagcgatatcgcccttgcgattatcaatatggtatatcaggtaataggcgtgctttctgtttttgcggcaagagcgaaaaattacagccgtgttattgttacgggaaacggcaataaaaatccgataggaaaaaaagtgcttaccgatgtttctgccatgtacggaattgaatttatttatcctgaatatgccgaatatactacggcaattggagccggattatcaaacaggaagtga

SEQ ID NO: 67430 - protein, 137 aa, Unknown
  Obtained from environmental sample
  misc_feature (1)..(137): Xaa is any amino acid
MQKNFCPTAEFHDIMELAKNGKLGQVDLLIGDITDTSLSFLNGESTASNFGKMLDTATHSDIALAIINMVYQVIGVLSVFAARAKNYSRVIVTGNGNKNPIGKKVLTDVSAMYGIEFIYPEYAEYTTAIGAGLSNRK

SEQ ID NO: 67431 - DNA, 471 bp, Unknown
  Obtained from environmental sample
  misc_feature (1)..(471): n is a, c, g, or t
atgatattgggaattgatattggtactaccaccacaaaggccgttaccattgaaggcggtaagctgacaagaaaagtcaagacaaaggcggtggacgcggttaccgccgctaccggtgcttttggaaaaatagtccttgaaaacggcatagatataaaatccatagaaaaaataaaaattacaggcgcgggcgcttcaaaaatcaaaaatgatattttcggtattcccacggacagaattaacgagatagacgctatcggtatcggcggaatgtttttgtcgggtgaaagaaatatcattattaccaatatcgggacagggacagttattatcgaagcgggggataaaggcatttctcactttggcggctccggtgtcggcggcggaacaatattgggggcttgcaaaaaaacttctgtcctactgcggagttccacgatatcatggagttggcaaaaaacggaaaattag

SEQ ID NO: 67432 - protein, 156 aa, Unknown
  Obtained from environmental sample
  misc_feature (1)..(156): Xaa is any amino acid
MILGIDIGTTTTKAVTIEGGKLTRKVKTKAVDAVTAATGAFGKIVLENGIDIKSIEKIKITGAGASKIKNDIFGIPTDRINEIDAIGIGGMFLSGERNIIITNIGTGTVIIEAGDKGISHFGGSGVGGGTILGACKKTSVLLRSSTISWSWQKTEN

SEQ ID NO: 67433 - DNA, 582 bp, Unknown
  Obtained from environmental sample
  misc_feature (1)..(582): n is a, c, g, or t
gtgttcccttttagagctatttgtattgatcttgagatagatgcttgcggaaatactaaagatgaagcatgggaaaatttgaaatgttctcttatcatgtattttaatatgtggaaaaaaattgccggtggttcaagtatagaagcactggaaaatttttttgatacgacttttttattaagtaaacaaaaggaagactattttaatctctacaaacaaaatagctttgatcgttccgcaaaaacaaaagtaatgtcgatttataaagtgttagttgcaggagaaaaattatcagaaatgtcagaaaaaaacaaacatattaaatctaaaataacatatacatatacagttaaagatttcatacttaaagatgaaccgagagcatcaaccagaccatacagtatcagacctgccgcgagagcggcatctacaggtagattagtcaaacttaaaaataatgctaagaaaccagccgctaagaagccggttgccaagaaaccagccgctaaaaaaccggttactaagaaattatccgctaaaaaaacagttgttaagaaaccagccgctaaaaaaaggtcttaa

SEQ ID NO: 67434 - protein, 193 aa, Unknown
  Obtained from environmental sample
  misc_feature (1)..(193): Xaa is any amino acid
MFPFRAICIDLEIDACGNTKDEAWENLKCSLIMYFNMWKKIAGGSSIEALENFFDTTFLLSKQKEDYFNLYKQNSFDRSAKTKVMSIYKVLVAGEKLSEMSEKNKHIKSKITYTYTVKDFILKDEPRASTRPYSIRPAARAASTGRLVKLKNNAKKPAAKKPVAKKPAAKKPVTKKLSAKKTVVKKPAAKKRS

SEQ ID NO: 67435 - DNA, 2832 bp, Unknown
  Obtained from environmental sample
  misc_feature (1)..(2832): n is a, c, g, or t
ttgaggacggcgtttcgttcatgctcatatatggcaattatctcaaatttttctataaatataaaggtatgttttatgccgataataaataatatgataaatttgttctttttcttaaaattcaagtcccaattacggcgaacaaggcccgatattgtcagccatgttgacgaatcccttgtacaggcgataaacgacgccggggggaaaatcacaggcgaccgatttgtaatttctgccgtttttaaggaagatacgattggtttttggctggatatgtatattttgattgaaaatctgaagacaagtatagagtcctcggaagaattctttggttattcgcttcttattacggccaaataccccgattccgccgaattactttgccgtttcttatctggaataagcggcatttttgttgatgataaagccgcaaaaaaattgataccttatgcttcttttgaaaaaccttccgaatggctgaaaaggataaaaaaacgtaaatacggctgcggcagttattttagaattagtaaattaaaagtttttaagaaacctacttttaatgaaattgatttacaaagcaatgtaattagagcttttgaacagggaaatggtaaaaacacactggcgctttgcccgttctatttaaagatccgaggcggattgtatgagtattatagtagtttaaataatacttttccggcgttgaccatttgttttgacagtatcggtattggttccctcgtcgatatatggtctttgaatatccgttcggtaattacggggcaatcaacggatgaaattgacaacctttgggaaactcttgtccgtgaacgcattcgcgacgaggtatcggaatatttagcgcgctgtgttaggcgatatttattcttgataatcaatctttatattgatatagccgccaagaaaaaaaggactcccgttttaatgctggaaaacgtacataatgccgaagataacacgtttaaattattgacagattcgttagccgaagttaaaagtcaaaataaagataatttattaattatgggaaccggcgaagacagtatttcaaaagaaaaattaaaccgatgggaagaagtttttgacacttgcaagaatatcgacggagttaatgtagacagaatacatttcccgaaactttctatcgatctttgggaaattatctacgcaatgtcgctttttaaccgttatttttccccggaactttttcagcgtctttttgaagaagaagggaaaaacccgataatgatagcaaaagctttttccatacttgataacatgggtgtaatagacaatgtccatgaaccgcgtcttatgaacaggtattttgaagatcatgccgctaatattttaaacgaaaaaacaaaaaaaataaaagaaattgtctgtgtccgtcttttagactggtgcataaaaagaaatttaaacccatgtttccgtttattaatgattatagccgatcttgaagggacaaaatacattgacgatcttttattgttaaaatcattttcttctgacattgtaaacaacacaatttcggcgatagagacggcgatgaaaaacggaaaatttgatgaaatggttaccgccaaagccgaagccataaggcatatttacagaacatcaaaagcgttaattacaggagatgaaaagaatatagagactgtatttaatgaaaacaaactggaagatttaagtacgttatgcgaacctttccctgttcttagagcgcagatacttgtaaattacagcgggtattatttaggcttgcacgatgaaaaaatagcggcggaaaaggcaaaagaggcgattttactagggcagagtaaaaattcattttgtattccgcaaggctatcgtttattctcgcttgtatgtttatccaaacagcaggttaatgaaacaattgagtatttaaattttgcgctttcaaacgcggaaaaaaacggtaattaccacgagcttgcggtttccgcctactacgccgccgccgctcaatttctatacggcgatgtttaccatgccgccgaccttgccgcaaagtcgattaaacaatcgcttgtagccggtcgtcctgattgggcggatcgttcccgctttttggaaggtcgcatagagttcgatcttgggcactacagcaaagccctcgacatttttgagcatctgctaaaagagccttacggcggaatgacatgtgaaaaagaaaacctaatggcggcgtggatatatcgatctaaaatatatttagaagtatcgaacttaaaaaaacccgaacccgcgaacaacgacgccgatttattcgagatagaagctgcgtttttatccggcgattatcaaagagccgtcgatcttgccgcctcgcataaaaatccgtttacggaagaaaattttctttactcggagcaagccgattggcgcagcggattcgctcaatgtgagcatttatatttcacgcacggcgagatacaaagcagaatgatatcgatttttcattctctcgcgttaagcaagctgtcaagagaaggatgtgaagaggcgcttcatgagattcaaaaaatactccgcgatgaaaaattatgcgaaatggatccatgggacgcgttttatttttacgcaaaataccgaatccttgaacaaacggaagccagtcttgtagacatgagcaccgccgtcagcatggcattcaagcgattacaacgcagagccggaagaatagacgacattgagacccgccgtcaatatttgaacggctccagatggaaccgcgaattaagcaaagccgcgaaagaattcaagcttatttag

SEQ ID NO: 67436 - protein, 943 aa, Unknown
  Obtained from environmental sample
  misc_feature (1)..(943): Xaa is any amino acid
MRTAFRSCSYMAIISNFSINIKVCFMPIINNMINLFFFLKFKSQLRRTRPDIVSHVDESLVQAINDAGGKITGDRFVISAVFKEDTIGFWLDMYILIENLKTSIESSEEFFGYSLLITAKYPDSAELLCRFLSGISGIFVDDKAAKKLIPYASFEKPSEWLKRIKKRKYGCGSYFRISKLKVFKKPTFNEIDLQSNVIRAFEQGNGKNTLALCPFYLKIRGGLYEYYSSLNNTFPALTICFDSIGIGSLVDIWSLNIRSVITGQSTDEIDNLWETLVRERIRDEVSEYLARCVRRYLFLIINLYIDIAAKKKRTPVLMLENVHNAEDNTFKLLTDSLAEVKSQNKDNLLIMGTGEDSISKEKLNRWEEVFDTCKNIDGVNVDRIHFPKLSIDLWEIIYAMSLFNRYFSPELFQRLFEEEGKNPIMIAKAFSILDNMGVIDNVHEPRLMNRYFEDHAANILNEKTKKIKEIVCVRLLDWCIKRNLNPCFRLLMIIADLEGTKYIDDLLLLKSFSSDIVNNTISAIETAMKNGKFDEMVTAKAEAIRHIYRTSKALITGDEKNIETVFNENKLEDLSTLCEPFPVLRAQILVNYSGYYLGLHDEKIAAEKAKEAILLGQSKNSFCIPQGYRLFSLVCLSKQQVNETIEYLNFALSNAEKNGNYHELAVSAYYAAAAQFLYGDVYHAADLAAKSIKQSLVAGRPDWADRSRFLEGRIEFDLGHYSKALDIFEHLLKEPYGGMTCEKENLMAAWIYRSKIYLEVSNLKKPEPANNDADLFEIEAAFLSGDYQRAVDLAASHKNPFTEENFLYSEQADWRSGFAQCEHLYFTHGEIQSRMISIFHSLALSKLSREGCEEALHEIQKILRDEKLCEMDPWDAFYFYAKYRILEQTEASLVDMSTAVSMAFKRLQRRAGRIDDIETRRQYLNGSRWNRELSKAAKEFKLI

SEQ ID NO: 67437 - DNA, 972 bp, Unknown
  Obtained from environmental sample
  misc_feature (1)..(972): n is a, c, g, or t
ttgtatgatatttgcgacgcgtcaggcgattacaaactcggcgattatattgatactcaaatcagaaaaatacgggaaaaagtcggcgataaaaaagttctactcgccctgtcgggcggggttgattcgtcggtatgcgcaggacttttatcaaaggcaatacccgggcagttaacctgcatatttgtcgatcacggtcttatgcgcttaaatgagggcgatgaaatagaaagagcgttttcaaaacgaaacctaaacttcatccgtgtgaatgcgcaaaaacgcttccttgccaaactggaaggcgtaaccgagccagagaaaaagcgaaaaattataggtgaggaatttatccgcgtgtttgaggaagaatccgcaaagttaggcgacattccatttctggcgcaggggacgatataccccgatgtcgttgagtcgggcggcaagcacggcgctgttatcaagagccatcacaatgtgggcggtcttcccgaaaacctgaagtttacagagatagtggagccgctgtcgcggcttttcaaggacgaggtgcgcgagcttggaaaaaaacttaaactgccgtcatcgcttgtaaaccgccaaccctttcccggtccggggcttgccatccgcgtcatgggtgaaataacggaacaaaaactggatgttttacgccacgccgacgcaatcctccgtgaagagctggacgctttgaaacgcagacccaatcaatacttttgtgttatgaccggcacgcgctctgtaggcgttaaaggggatgacaggacctacgactttgtaattgccgtaagggctgtaacgactgacgattttatgacttgtgaatacaccccgctaccgcacaatttattgagccgaatatcctcgaaggtcacgagcgagataccgcaggtgagccgcgttgtttacgatattacatcaaagcccccggcgacggtggaatgggagtag

SEQ ID NO: 67438 - protein, 323 aa, Unknown
  Obtained from environmental sample
  DOMAIN (232)...(322): GMP synthase C terminal domain
  misc_feature (1)..(323): Xaa is any amino acid
MYDICDASGDYKLGDYIDTQIRKIREKVGDKKVLLALSGGVDSSVCAGLLSKAIPGQLTCIFVDHGLMRLNEGDEIERAFSKRNLNFIRVNAQKRFLAKLEGVTEPEKKRKIIGEEFIRVFEEESAKLGDIPFLAQGTIYPDVVESGGKHGAVIKSHHNVGGLPENLKFTEIVEPLSRLFKDEVRELGKKLKLPSSLVNRQPFPGPGLAIRVMGEITEQKLDVLRHADAILREELDALKRRPNQYFCVMTGTRSVGVKGDDRTYDFVIAVRAVTTDDFMTCEYTPLPHNLLSRISSKVTSEIPQVSRVVYDITSKPPATVEWE

SEQ ID NO: 67439 - DNA, 1656 bp, Unknown
  Obtained from environmental sample
  misc_feature (1)..(1656): n is a, c, g, or t
ttgtttacgatattacatcaaagcccccggcgacggtggaatgggagtaggattatgaccaaatatgtttttgttacgggcggcgttgtatcggggcttggcaaggggatcaccgcggcgtctctgggaaggctgctcaaacaacggggcttaaaggtcgcggctcagaaactcgatccctatatgaacgtcgatccggggacaatgagtccgttccagcatggcgaagtttttgttacagacgacggcgcggagaccgatcttgacctggggcattacgagcgttttatagatgaaaacctgacgaagctcagtaatctgacatccggccaggtataccggaatgttcttgaccgagagcgcgcgggcggctatcttggcagtaccgttcaggttattccacatgttaccagtgaaataaaaaattttatttatgccggggcggaaaaaagcagcgccgatgtcttgattaccgagatcggcggcactaccggtgacattgaaagtcagccgttcctggaagccatccggcagatctaccttgaaaaaggccgtgaaaactgcctgtttatccatgtaacattgatcccgtatttaaaagcctcgggcgaacacaagtcaaagcccacacagcactcggtcaaggaattgcgcgccattggtatttcacctaacattatcatcgcgcgggcggacgagccgataagcgacggtattacggataaaatatcgcttttttgcaacgtgaagaccgattgcgtcatagaaaacattaccattccattcctttatgaagcgccacttctgctccatcaaaacggcctggacagggtcgtctgccgcgaacttggcattgacgccccggagcccgatttgaatgagtggggcgtcatggttaaaaaaatcggggaaaggaaacgggaagtcaatatcgcgattgtcgggaaatatgtccagttacacgacgcttatctttccattattgaaagcctgaaccacgcgggcattgaagccggatcgggggtaaacatccaatggattgacagtgaggacgtaacaaacgaaagcgcgggcgatctgttacgcgaaacagacggcatgatcattcccggcggcttcggtgaaagggggattgagggaaaaatcaccgcctgccgttacgcgagggaaaacgacataccgtatcttggaatttgtcttggaatgcagatcgccgtaattgaatttgcgcgtaacgtctgcggactgaagcacgcccattcaagcgaatttgacgaagtttctccccatcgcgtcattgacctgatgccggatcaggccggcatggtcggctcgggcggcaccatgcggctgggcgcgtatccgtgtaaagtcaaccagggaacgcttctgcacaggctgtacggcgcggatgaaataagcgaaaggcaccgccaccgctttgaattcaacaatgattaccgcgagaccctaacgggcaaaggaatggttatctgcggagtgtcacctaacggcagccttgtcgaggcgattgaactgccggatcgccgttttttcaccggggttcagtttcatcccgagttcaagagccgccccaataagccgcatccgttatttttggggctagttaaggcggcgattaagcagcggccttag

SEQ ID NO: 67440 - protein, 551 aa, Unknown
  Obtained from environmental sample
  DOMAIN (311)...(527): Peptidase C26
  misc_feature (1)..(551): Xaa is any amino acid
MFTILHQSPRRRWNGSRIMTKYVFVTGGVVSGLGKGITAASLGRLLKQRGLKVAAQKLDPYMNVDPGTMSPFQHGEVFVTDDGAETDLDLGHYERFIDENLTKLSNLTSGQVYRNVLDRERAGGYLGSTVQVIPHVTSEIKNFIYAGAEKSSADVLITEIGGTTGDIESQPFLEAIRQIYLEKGRENCLFIHVTLIPYLKASGEHKSKPTQHSVKELRAIGISPNIIIARADEPISDGITDKISLFCNVKTDCVIENITIPFLYEAPLLLHQNGLDRVVCRELGIDAPEPDLNEWGVMVKKIGERKREVNIAIVGKYVQLHDAYLSIIESLNHAGIEAGSGVNIQWIDSEDVTNESAGDLLRETDGMIIPGGFGERGIEGKITACRYARENDIPYLGICLGMQIAVIEFARNVCGLKHAHSSEFDEVSPHRVIDLMPDQAGMVGSGGTMRLGAYPCKVNQGTLLHRLYGADEISERHRHRFEFNNDYRETLTGKGMVICGVSPNGSLVEAIELPDRRFFTGVQFHPEFKSRPNKPHPLFLGLVKAAIKQRP

SEQ ID NO: 67441 - DNA, 426 bp, Unknown
  Obtained from environmental sample
  misc_feature (1)..(426): n is a, c, g, or t
atggataaacaggcagttttcacggcctttttcaaggtagatctgccggatggcttccaggaacggctgactttcaatgtcaccggtagtgccgccgatctcggtaatcaagacatcggcgctgcttttttccgccccggcataaataaaattttttatttcactggtaacatgtggaataacctgaacggtactgccaagatagccgcccgcgcgctctcggtcaagaacattccggtatacctggccggatgtcagattactgagcttcgtcaggttttcatctataaaacgctcgtaatgccccaggtcaagatcggtctccgcgccgtcgtctgtaacaaaaacttcgccatgctggaacggactcattgtccccggatcgacgttcatatagggatcgagtttctgagccgcgacctttaa

SEQ ID NO: 67442 - protein, 141 aa, Unknown
  Obtained from environmental sample
  misc_feature (1)..(141): Xaa is any amino acid
MDKQAVFTAFFKVDLPDGFQERLTFNVTGSAADLGNQDIGAAFFRPGINKIFYFTGNMWNNLNGTAKIAARALSVKNIPVYLAGCQITELRQVFIYKTLVMPQVKIGLRAVVCNKNFAMLERTHCPRIDVHIGIEFLSRDL

SEQ ID NO: 67443 - DNA, 579 bp, Unknown
  Obtained from environmental sample
  misc_feature (1)..(579): n is a, c, g, or t
ttgaaatcgggcacggaaatggaaaaaaaactattgtatgtccatcccatacacgccaacaggacgctcaaagcgttaaattttcccttgtcaatttgcgaagcggtgcttcagcaccatgaactggaagacggatccggcttcccccagcagcttaaaggaaacgctatcgacttgtatgggaaaattttggttgttgccggattttacgaagctttttcgacggaaaatgacgatgggataaagtgcagtcacagcgggatagtgcaagtattgaaaaacagcgggagttttgacatgtcggttatccgggctttggttaactcaatatcaatttacccggttggaatatatgttttattgtccaacgggaaacgcgggcaggtgacagacatagaccaggaaaatccgcgtttcccttttgtaaaaatatttggaaaacaatcgcctaacgaatacgctaaaacttcagatgagctttttatagtccgcccgcttaccagtgaagaagtcgaagattctgtcagaaaaaacaaggagcagcatctaaggccgctgcttaatcgccgccttaactag

SEQ ID NO: 67444 - protein, 192 aa, Unknown
  Obtained from environmental sample
  misc_feature (1)..(192): Xaa is any amino acid
MKSGTEMEKKLLYVHPIHANRTLKALNFPLSICEAVLQHHELEDGSGFPQQLKGNAIDLYGKILVVAGFYEAFSTENDDGIKCSHSGIVQVLKNSGSFDMSVIRALVNSISIYPVGIYVLLSNGKRGQVTDIDQENPRFPFVKIFGKQSPNEYAKTSDELFIVRPLTSEEVEDSVRKNKEQHLRPLLNRRLN

SEQ ID NO: 67445 - DNA, 1725 bp, Unknown
  Obtained from environmental sample
  misc_feature (1)..(1725): n is a, c, g, or t
atgaaaactttatggcgtatagcaaaagaagccgtaagatacaaaggctggctgctgctgtcgatttttggcactcttatgatgactacggtcaacctgattgcccctagaataatggcaagtatgacgggactcgtggcagccggtatgacgcgggaaaattttatcaccgtattatggatggcgggcggattgttgggcctgtacctgacacgcatcctgttccggtttttatccaattactgctcgcacagggcggcgtggcggcttgtgcttgagataaggataaaagtatataacgcgattcagtccttttccatggactattttcacaacaagcaaacgggcgaacttcttagccgcgtaatgaacgatgtggcgacatntgaattgatatacgcccatattacccccgatgttattacaaattttgtcaccctcaccggcgtaacaattatactttttaatttaaacgcccgtcttgcgcttatcacctgtatccccattccgttcattctgttatcgggatggtttttcagccgcaaggtgcgccccaactttcagaaaacgcaaaaatctcagggggagttatccgcccagcttcaggataatttatccggcatacaggaaatacaggcttttgggcggcaaacttacgcctcagaaaaagttctaaaaaaaggcaaagattttacacataacatgctgcgcgccctgaagttaagcgccatatttcacccgagtgtggagtttttaacttccattggcagcgttattgtcgtaggcttcggcggatttctggcgtataaagcccagctttccgtttctgaaattgtcgggtttcttctttaccttgcccttttttacgcgcctattacaggcattgcccagctccttgaatcggcccagcaatcgcttgcaggcgcggagcgggttatcgaaattttagacgcgccgcagagcgtcagggacaaacccgactccaaatcaatcggaaaagcgcaaggccgtattacttttgagaatgtcagtttttcctacattcagggcgttcccgttcttgacaacgtatcttttgacattaaacccgggcagatggcggcgtttgtgggggccacaggcgtagggaaaaccacgttaagcaaacttatatcaaggttttatgatcctacgggcggaagagtttgccttgacgggcatgaccttagggagattactttggaaagcctgagaaacaatatctctttggttttacaggatacgtttttgtttaacggcactatcgaggaaaatatcgcgtttgcaagatcggacgcttctattgaagagattaaaactgcggcgcagacggcgaggatacatgacgacataatgcaaatgcctcaggcttatcagacacaaataggggagcgcggagttaagctgtccggcgggcaaaagcagaggatagcgattgcgagagcgattctttgccgctctccggtgcttattcttgatgaggcgaccgcgtccgtggatgtgcacacggaggaacagattcagcaggcgatcaacgaaattgcgggaagcagaacaatcgtaacgatagcgcacaggctttctaccattcgaaacgcggatgttatttatgtttttgaaaaggggcgcattattcagtcggggagccatgatgagttgattgaacaggaggggctctaccggagtttgtgcaggacggggaaatag

SEQ ID NO: 67446 - protein, 574 aa, Unknown
  Obtained from environmental sample
  DOMAIN (18)...(292): ABC transporter transmembrane region
  misc_feature (1)..(574): Xaa is any amino acid
MKTLWRIAKEAVRYKGWLLLSIFGTLMMTTVNLIAPRIMASMTGLVAAGMTRENFITVLWMAGGLLGLYLTRILFRFLSNYCSHRAAWRLVLEIRIKVYNAIQSFSMDYFHNKQTGELLSRVMNDVATXELIYAHITPDVITNFVTLTGVTIILFNLNARLALITCIPIPFILLSGWFFSRKVRPNFQKTQKSQGELSAQLQDNLSGIQEIQAFGRQTYASEKVLKKGKDFTHNMLRALKLSAIFHPSVEFLTSIGSVIVVGFGGFLAYKAQLSVSEIVGFLLYLALFYAPITGIAQLLESAQQSLAGAERVIEILDAPQSVRDKPDSKSIGKAQGRITFENVSFSYIQGVPVLDNVSFDIKPGQMAAFVGATGVGKTTLSKLISRFYDPTGGRVCLDGHDLREITLESLRNNISLVLQDTFLFNGTIEENIAFARSDASIEEIKTAAQTARIHDDIMQMPQAYQTQIGERGVKLSGGQKQRIAIARAILCRSPVLILDEATASVDVHTEEQIQQAINEIAGSRTIVTIAHRLSTIRNADVIYVFEKGRIIQSGSHDELIEQEGLYRSLCRTGK

SEQ ID NO: 67447 - DNA, 909 bp, Unknown
  Obtained from environmental sample
  misc_feature (1)..(909): n is a, c, g, or t
atgctggatatattgtttctcgcgcttcgcggcgtaaacgtacaatcactggatgaaacaagaaaaagtatcgccgggtttcaaaggtgtatttccattggttataatatggaaagcagtcatattgtcggactgaaaacggacggcgaagttgtcgccgtagggtctaatgcctacggtcaatgcgatacccggcaatggcggaatattatcgcggtttccgccggttccagagttaccgcgggtttaaaatcggacggctcgcttgtcattgccgggggtagtgttgccggttccgcgcaaagcagctccagggacattacctctttttccattggcagtagtcatattgtggttttaagaaaaggcgggtttgtgaacgcgcttggagacaatgatttcggtcaatgtgatattcagggatggcgtgatattgccgcggtttttgccggccaatttcacactgtcggcttgaagtgggacgggacggttgccgcggttgggcataatgattacggtcaatgcgaaactcaggagtggcgggatattgtagatatttctgccggatttgcccatacggtcggtataaaagcggacggcactgttataacagccgggagtaagggcatggcgcaatgcgcgacacagcactggcaggatattgtcgcggtttccgccgggctggctcatacagttggtttgaaagttgacggaacagttattgtagccggaagcaatgatttcggccaatgcaatgtccagggctggcgaaactatattgcgattcgcgccggaatgtccaatactgcgggcttgaaagcggacggcacggtcgttgtatgcggtgacaataaattcggtcaatgtaacactcaaagctggcggaatatcgggctaatgcctgaataa

SEQ ID NO: 67448 - protein, 302 aa, Unknown
  Obtained from environmental sample
  misc_feature (1)..(302): Xaa is any amino acid
MLDILFLALRGVNVQSLDETRKSIAGFQRCISIGYNMESSHIVGLKTDGEVVAVGSNAYGQCDTRQWRNIIAVSAGSRVTAGLKSDGSLVIAGGSVAGSAQSSSRDITSFSIGSSHIVVLRKGGFVNALGDNDFGQCDIQGWRDIAAVFAGQFHTVGLKWDGTVAAVGHNDYGQCETQEWRDIVDISAGFAHTVGIKADGTVITAGSKGMAQCATQHWQDIVAVSAGLAHTVGLKVDGTVIVAGSNDFGQCNVQGWRNYIAIRAGMSNTAGLKADGTVVVCGDNKFGQCNTQSWRNIGLMPE

SEQ ID NO: 67449 - DNA, 468 bp, Unknown
  Obtained from environmental sample
  misc_feature (1)..(468): n is a, c, g, or t
atgaacgaatatgtaaaatctataagaaaatatattggaaatgaacgtttattattagtaggggctggcgtactaatatataaggatggtagaattttattgcaaaaaagacgtgataatgggttatgggctgatcatggtggatgtgttgagattggtgaaactatagaagaaacggctaaaagggaattatttgaagaaacaggattgacggcaaataaacttaatttctttaaaatttattccgggaatgatatgctgtatacttatccaaatggggataaagtatatttaataataacattatttatatgtgaggatttttccggagatataagaatagatacaaatgaagttattgaattaaagtggtttaatataaatgaaataccaaatgaaattacacccacattgaaaaaagcatttgaggattttgtaaaatatataaaggaaagagataaaatataa

SEQ ID NO: 67450 - protein, 155 aa, Unknown
  Obtained from environmental sample
  DOMAIN (18)...(148): NUDIX domain
  misc_feature (1)..(155): Xaa is any amino acid
MNEYVKSIRKYIGNERLLLVGAGVLIYKDGRILLQKRRDNGLWADHGGCVEIGETIEETAKRELFEETGLTANKLNFFKIYSGNDMLYTYPNGDKVYLIITLFICEDFSGDIRIDTNEVIELKWFNINEIPNEITPTLKKAFEDFVKYIKERDKI

SEQ ID NO: 67451 - DNA, 456 bp, Unknown
  Obtained from environmental sample
  misc_feature (1)..(456): n is a, c, g, or t
atgaaatcaaaaaatggtgggataaaaacaaggaaaaaacagtttgggataccaataaatataggtataaatggaaataaatatgattcaagtaatattgaaaaactggcagcccgggcaggtttttctatcaaaacaaaaacaaaagaaggagaaaattctaaagccatcccaaaatttttgcatgattactgcaccgatggcaggcaggaaaaactacataaagaattattccttaaaagccgcgaaaagtacggcgcttgttttcctgaaaatcctgaaaatggcgagtttgaatatgttatcgggcttgaagttaaagacgggctcgatattccaaaagaataccgtgtttgtattattccggaagccttgtatgcggtattctctacgcctcccgccgatgaagcaaatttttcttccctcattcaaggcacatggaaatacattaagtga

SEQ ID NO: 67452 - protein, 151 aa, Unknown
  Obtained from environmental sample
  misc_feature (1)..(151): Xaa is any amino acid
MKSKNGGIKTRKKQFGIPINIGINGNKYDSSNIEKLAARAGFSIKTKTKEGENSKAIPKFLHDYCTDGRQEKLHKELFLKSREKYGACFPENPENGEFEYVIGLEVKDGLDIPKEYRVCIIPEALYAVFSTPPADEANFSSLIQGTWKYIK

SEQ ID NO: 67453 - DNA, 441 bp, Unknown
  Obtained from environmental sample
  misc_feature (1)..(441): n is a, c, g, or t
ttgatatttaacataattcatgttatattaacaaatatgagaaaaccaatattaataattatcctcctctcaataggcttaagcgcctgttcatcaaccgctccggcaaaaacggctgataattcaagaaccggccttgattgggatggcgtttacgcgggcacaattccggcggcggacgggccggggattaatgttcaaatcaccttgcgcgctgacgaaagctattcccttgtttataattatgttgacaggcagaataacgcggcggaaaacggtactttcagctggaatgaggcaggaaacataatcacattgaaaaatacgacttttcctccgtattacagggtgggcgaaaataaactgttacaacttgacatgacgggcaatataataaaaggcatctctgcggatctatatgtgttgaaaaagatgaattaa

SEQ ID NO: 67454 - protein, 146 aa, Unknown
  Obtained from environmental sample
  DOMAIN (13)...(145): Uncharacterized lipoprotein NlpE involved in copper resistance
  misc_feature (1)..(146): Xaa is any amino acid
MIFNIIHVILTNMRKPILIIILLSIGLSACSSTAPAKTADNSRTGLDWDGVYAGTIPAADGPGINVQITLRADESYSLVYNYVDRQNNAAENGTFSWNEAGNIITLKNTTFPPYYRVGENKLLQLDMTGNIIKGISADLYVLKKMN

SEQ ID NO: 67455 - DNA, 480 bp, Unknown
  Obtained from environmental sample
  misc_feature (1)..(480): n is a, c, g, or t
gtgtcaacgtatgacgagaaacacgggcggaaagagacccgcgattatgcggtaagcgacgatgtccagtggctgcacaagctgttcccgcagtggaagagcatcaaatcgataggggtggtggaatcgacgagggaaaccggcgagggggaggcaaaaacggaacggcggtattttgtttccagccttggcgccgatgagaaactgttcgcccatgccgtgcgggcgcactggggtatagagaaccagttgcattatatgcttgatgttgtatatcgggaggatacctgccgggtcaggaaggatcacagcccacggacactggggatgataaggaaaatagcgctcacggtagcaaggtctgacaaggaatcgaaaaccagcatcagaggccgcgtccaacaaatggcatggtcggaggattatctggaaagtctgctgttccgttcggatttcgcttcggcgcagaaaatttcatag

SEQ ID NO: 67456 - protein, 159 aa, Unknown
  Obtained from environmental sample
  misc_feature (1)..(159): Xaa is any amino acid
MSTYDEKHGRKETRDYAVSDDVQWLHKLFPQWKSIKSIGVVESTRETGEGEAKTERRYFVSSLGADEKLFAHAVRAHWGIENQLHYMLDVVYREDTCRVRKDHSPRTLGMIRKIALTVARSDKESKTSIRGRVQQMAWSEDYLESLLFRSDFASAQKIS

SEQ ID NO: 67457 - DNA, 909 bp, Unknown
  Obtained from environmental sample
  misc_feature (1)..(909): n is a, c, g, or t
gtggaggatgcccggcagcaggctaaagtaaaacacctgatgagggacataatcgccattgtgtttttcgcggaaatagcaaacgcaacagaatggattgagatacaactgtttgcggcaacccacgaggaagcgttacggaaatatctggaactgcccaacgggataccttcgcatgatacgatacagcgggtgattgcgatagtatcaccggaatacgtgcaagagtttcgcagggggtggaacgaaatcacggcaatccctgagcttttgaagcaattgaatgtacaagatgccattgtcacgaccgatgcaatgggctgccagacagacattgcaaggctaatcagaaagaaaaaggccgattatatgcttggcttgaagggcaatcagggtaatttgcatgatgacgttgagctgtacttcgatgatccgaagttacgcgcaggctgcgcgtaccacaaagcagtggacaaggctcatggtgcggtagaaacacgcgagtattggcaaacggaggacatagcgtgggtgcaacagggaaaggcatgggcgggactttcatccatcgtcatgacaaaaaacactattgtcagaggcagcaataccgcaacggaagtacggtactttatcagcagcctgcctttaaacgtgggggaggcggctcgtgcgatccgcggccattggatggtggaaagctatcattggcaccttgatgtgacttttcgggaagatgccaaccatacccttgataaggctgctgcatataatttgaacatcgtgaaaaagatggccattaacacgctgaggctggtggatgtcggcatggccagaataagcatgaaaaacaagcgttacattatcagcatgaattttaggcactatttggatattctcatgaccctttaa

SEQ ID NO: 67458 - protein, 302 aa, Unknown
  Obtained from environmental sample
  DOMAIN (35)...(268): Transposase DDE domain
  misc_feature (1)..(302): Xaa is any amino acid
MEDARQQAKVKHLMRDIIAIVFFAEIANATEWIEIQLFAATHEEALRKYLELPNGIPSHDTIQRVIAIVSPEYVQEFRRGWNEITAIPELLKQLNVQDAIVTTDAMGCQTDIARLIRKKKADYMLGLKGNQGNLHDDVELYFDDPKLRAGCAYHKAVDKAHGAVETREYWQTEDIAWVQQGKAWAGLSSIVMTKNTIVRGSNTATEVRYFISSLPLNVGEAARAIRGHWMVESYHWHLDVTFREDANHTLDKAAAYNLNIVKKMAINTLRLVDVGMARISMKNKRYIISMNFRHYLDILMTL

SEQ ID NO: 67459 - DNA, 1164 bp, Unknown
  Obtained from environmental sample
  misc_feature (1)..(1164): n is a, c, g, or t
ttgtgcctggtaaccggcttgaaccggagctgcctagtgtcggcgcttggcatctatggcaagaaagggaatttagaaaggccgcctgcaaaaggcaggagggagccgcgccctgcggggaaacgcgggggccgccctgtcaaatacggggaagacttcgtgaaggttctgaccaggatttgggacgagtacggcaaaccctgcgggaagcttttggttccgatgattcgcggcatgatagattttctaacggagtctgagagccccgattacggaataaccaaggaaatcaggaaactgcttttggaagtgagcgcggcggaagcggacatactgttgaagccggcgcggaaagcgcttgaaatcaagggcgcaagcacgacgagggccgttcaaacgcctttgagaagccaaattcctgtcaggacatactttgaccgggacacggttaagcctggaaagtttgcatttgacacggttgcgcactgcggaggctcctcaagcgggcagttttgcaagactttgacaggaacagacgtatattccgggtggtatgaaggacgcgccctgctaaacgcggctaactgctgggtgaaggccgccatttccgacatagatgccacccttcctttcccgatgacaggcgctcattacgacaacggcatggaattcataaacgaaccgctgcttagctggtgcattgatcggcacattgaggccactcgtaccaggccgtaccacaaaaacgataactgctacgcggagcagaaaaactacgacgcggtcaggaaaaccgtcggctacttccggtttgacactgccgaagagtgcgccgccctggctgaagtgtacctctggctttgccctttgtataattactggatgccttcgtttcgcctaacggacaaggaaaaacaggaggacggtcgctataagaaggtctatgaaaaagagcctaaaacaccgtacgaacggcttatggaatcgcctgatgtatcgtcggagtgcaaaacggaactggaacgcaggagggccgggcaaaaccctgttgagctgaaccggaaattgaatgaggctgtcgggctgctcttgaaaataaaccaagaaaaattgtacgttaaaaaagcctcctgtcagggggatggtcaggcacccgctgcctga

SEQ ID NO: 67460 - protein, 387 aa, Unknown
  Obtained from environmental sample
  DOMAIN (147)...(327): Integrase core domain
  misc_feature (1)..(387): Xaa is any amino acid
MCLVTGLNRSCLVSALGIYGKKGNLERPPAKGRREPRPAGKRGGRPVKYGEDFVKVLTRIWDEYGKPCGKLLVPMIRGMIDFLTESESPDYGITKEIRKLLLEVSAAEADILLKPARKALEIKGASTTRAVQTPLRSQIPVRTYFDRDTVKPGKFAFDTVAHCGGSSSGQFCKTLTGTDVYSGWYEGRALLNAANCWVKAAISDIDATLPFPMTGAHYDNGMEFINEPLLSWCIDRHIEATRTRPYHKNDNCYAEQKNYDAVRKTVGYFRFDTAEECAALAEVYLWLCPLYNYWMPSFRLTDKEKQEDGRYKKVYEKEPKTPYERLMESPDVSSECKTELERRRAGQNPVELNRKLNEAVGLLLKINQEKLYVKKASCQGDGQAPAA

SEQ ID NO: 67461 - DNA, 528 bp, Unknown
  Obtained from environmental sample
  misc_feature (1)..(528): n is a, c, g, or t
ttggaagtgagcgcggcggaagcggacatactgttgaagccggcgcggaaggcgcttgaaatcaagggcgcaagcacgacgagggccgttcaaacgcctttgagaagccaaattcctgtcaggacatactttgaccgggacacggttaagcctggaaagtttgcatttgacacggttgcgcactgcggaggctcagcgagcgggcagttttgcaaaactttaacaggaacagacgtttattccgggtggtatgaagggcgcgccctgctaaacgcggctaactgctgggtgaaggcagctattttcgacattaaagagcctaaaacgccgtacgagcgactgatggaatcgcctgacgtatcgccggagtgcaaagcggaacttgaacgcaggagggccgggcaaaaccctgtcgaactgaaccggaaattgaatgaggctgtcgggctgctcttgaaaataaaccgtgaaaaactgtaccttggaaaaacctcctgtcagggggatggtcaggcacccgctgcctga

SEQ ID NO: 67462 - protein, 175 aa, Unknown
  Obtained from environmental sample
  misc_feature (1)..(175): Xaa is any amino acid
MEVSAAEADILLKPARKALEIKGASTTRAVQTPLRSQIPVRTYFDRDTVKPGKFAFDTVAHCGGSASGQFCKTLTGTDVYSGWYEGRALLNAANCWVKAAIFDIKEPKTPYERLMESPDVSPECKAELERRRAGQNPVELNRKLNEAVGLLLKINREKLYLGKTSCQGDGQAPAA

SEQ ID NO: 67463 - DNA, 1722 bp, Unknown
  Obtained from environmental sample
  misc_feature (1)..(1722): n is a, c, g, or t
atggttggcacagatgcaaacaaaaaaccgttgccggtagacaagtctttatttgaccgcgtaatagaggacggttgttactatgttgataaaaccttgttcatcaaaaaccttatagatatgcgtgccgaagccgtcctctgcacccgcccgcgtcggttcggtaagaccctgaaccaaacgatgctaaaatgcttttttgaagatacgacgcagattggcggcagagatacacgaccgctgtttcgcggacttaaaatagaggatgccggggaacaatacatggaacatcaggggaagtatccggtaatatccctaaccctaaaagacgtgaagcgcgatacgtttgaggagtcgtacaatcagctgaaaaagctacttgcccatgaatataaacgtcatgcctacgcggtggagaaaatatccgatgatagtgaccgtgacttgtttaaaagactctcttccagcactggttctagtgacgattattccacatcgttattatttctttgtgagtgtttggaaaactgccacggcaaaaaagccataatcttgcttgacgaatacgacgttccattggaaaattcatggtcttgttccccacgcttttatgatgagatgatcgccttcatccgtccgcttttgagtagcgccctcaaggacaacccgcacctgcaattagccgtgatgacaggatgtctgcggatttccaaagagagcatatttaccgggctgaacaatttggaagcggtgtcgatcctaagcgattcttatagcgagcatttcggttttacgcagattgaggtggatgccatgcttaaatattacgatttagagagcaaaacgcagatactcaaggactggtacaacggctatttgtttggaaataccgaggtatacaacccgctaagtaccgtccgagtagttgaggcatggacgcaaaacataaaaagaaacccggagccgtattgggtaaacacaagcggtaacgatattgtccgcagattggtagacatcgccaacgccgaaatgaagaccgatttggaaaccctaatggccgccaaaacgatctcaaaaccgattcacgaggacgtcacgtatgaagaaataggcgacggtaatgacaaagaccccgacaacttttggaacttcttgttttttaccggctatttgaaaaaggtcggagaggagcgccaaaacgaaaacggcgaattgatattggatttgtcgattcccaacctcgaattaaagtatatctaccacacaaaaatacaagacaggtttaaagagaaggtcagccggaaagattttggcccattatatacggcacttttgggcggcgacgcggagacagtacagattgaactcggcaacttcctcgtggaaaccataagctatatggacgctaaagaggctttttatcacggagtattgctcggcgtactctccgggatgagcgaatttaccgcgaaatccaaccgtgagaccggtcttggccggggcgatattgttttgcggcatactagcggccgcggcaaggccgtcatactcgagcttaaatgtacgcccgatatgcgcgaaatagaaaaaaaatgcgaagaggccgtaagacagattgcggacggcaagtatgccaaagaactggagacggagtgctacaccgatattgtcaaatacgggattgcgttttgtaagaaaagctgcgaagtaaggaaaggatga

SEQ ID NO: 67464 - protein, 573 aa, Unknown
  Obtained from environmental sample
  DOMAIN (5)...(573): Protein of unknown function (DUF1703)
  misc_feature (1)..(573): Xaa is any amino acid
MVGTDANKKPLPVDKSLFDRVIEDGCYYVDKTLFIKNLIDMRAEAVLCTRPRRFGKTLNQTMLKCFFEDTTQIGGRDTRPLFRGLKIEDAGEQYMEHQGKYPVISLTLKDVKRDTFEESYNQLKKLLAHEYKRHAYAVEKISDDSDRDLFKRLSSSTGSSDDYSTSLLFLCECLENCHGKKAIILLDEYDVPLENSWSCSPRFYDEMIAFIRPLLSSALKDNPHLQLAVMTGCLRISKESIFTGLNNLEAVSILSDSYSEHFGFTQIEVDAMLKYYDLESKTQILKDWYNGYLFGNTEVYNPLSTVRVVEAWTQNIKRNPEPYWVNTSGNDIVRRLVDIANAEMKTDLETLMAAKTISKPIHEDVTYEEIGDGNDKDPDNFWNFLFFTGYLKKVGEERQNENGELILDLSIPNLELKYIYHTKIQDRFKEKVSRKDFGPLYTALLGGDAETVQIELGNFLVETISYMDAKEAFYHGVLLGVLSGMSEFTAKSNRETGLGRGDIVLRHTSGRGKAVILELKCTPDMREIEKKCEEAVRQIADGKYAKELETECYTDIVKYGIAFCKKSCEVRKG

SEQ ID NO: 67465 - DNA, 429 bp, Unknown
  Obtained from environmental sample
  misc_feature (1)..(429): n is a, c, g, or t
atggccgcaactaaaagactcctgcctataggcatccagtccttccccgatattcgcgagcggggttttgtctatgcggacaagaccgcccgcgcttacgagcttatcaccggctccgggaaagcgttcttcctttcgcgtcccagacgtttcgggaagtcgctgctttgttcgacgctcggggcgatcttcgacggccggcgggagctcttcggcgagatcgccggaaggccggcgttggcaatggactcgctcgacagggagtggaagaggtatccggtgattaggatcgatctgaactacggggagtaccacaagtacgggacggacgggctttacgagacatcgcgcgccgagttgcggagagcggcggaaaattttccgaacattggtacgaaacctccacgcccacattccttgcggatttaa

SEQ ID NO: 67466 - protein, 142 aa, Unknown
  Obtained from environmental sample
  misc_feature (1)..(142): Xaa is any amino acid
MAATKRLLPIGIQSFPDIRERGFVYADKTARAYELITGSGKAFFLSRPRRFGKSLLCSTLGAIFDGRRELFGEIAGRPALAMDSLDREWKRYPVIRIDLNYGEYHKYGTDGLYETSRAELRRAAENFPNIGTKPPRPHSLRI

SEQ ID NO: 67467 - DNA, 450 bp, Unknown
  Obtained from environmental sample
  misc_feature (1)..(450): n is a, c, g, or t
atgggagagaatcttaattatcagccgaagtctggtaactcgtggtgttataataatgataattccaactgtggtaagtacggtaggttatatgattggaatacggcgaagacgatatgtccggcaggatttcatttaccgtcgcgtcaggagtggaaagatttggtggctaataccggtggaaataaagcgggtaggaagctgaaatcgacgagcggttggaataaaggtaatggtaaggatacgtacggtttttcagccttgcccggcggcggtggggtttccaatggcggtttcagcaatgccggtaacttcggctattggtggacggccacggagcgcgagggcagatacgcatactaccgggacatgggctactactacggctacgtgattgagagtcgcgacaacaagagcaatgccttctcggtgcggtgtcttgaggattaa

SEQ ID NO: 67468 - protein, 149 aa, Unknown
  Obtained from environmental sample
  misc_feature (1)..(149): Xaa is any amino acid
MGENLNYQPKSGNSWCYNNDNSNCGKYGRLYDWNTAKTICPAGFHLPSRQEWKDLVANTGGNKAGRKLKSTSGWNKGNGKDTYGFSALPGGGGVSNGGFSNAGNFGYWWTATEREGRYAYYRDMGYYYGYVIESRDNKSNAFSVRCLED

SEQ ID NO: 67469 - DNA, 1491 bp, Unknown
  Obtained from environmental sample
  misc_feature (1)..(1491): n is a, c, g, or t
ttgggatttaaacccggaaacggaaatcaggcgctttcatggcttgcgggcaaagagttgttgtgcgaaatcaggcgagaaacagcggtgttttttgaattgacggaactcggtcgggaatggaaagagaagggcagtcccgaagaacgtatcattaaactcgtaaaaacaaagagcggagaacttaaactgcccgatattgcgaaggctcttaacattgaaaataaagatattggcagcgcgtttggaagtctttccaagctcggcatacttgcaatgaatgacgaaaaaaatgtagttgtattaaaagaaccttccgccgatcaatttgccgcgcttcgcggtctgctggaaaaaggcgtaaaaggcgcgatagcggaaagctctttaaacgctgcggaaaaaagcgtaatgtccggtatcgcgaaaaaacgaggagcggcagacgcgccgttccgtcaaatagatcgcgaaacagttttctttggttttaaagcggcggaagacggatcagttcccgcagtagaagcggcgcaggcgctcaaagaagcgggaatcacaggcgatgaaatcggcgcgttgacccaatcaatgcttgaggacggcagttggaaaggaaagacattccgctcttataatgttaaaacgccgcctgtccggctgactccgggcagaagcaacccctacgcaaaattcttggaaaatgtaaaagataaacttacttctctgggctttgaagaatttgacggtccgttagtcgaaactgaattctggaattcggacgctctttttatgccgcagtttcattccgcccgcgatattcacgacgcgtacagtattgccgacccgtcaaaatccacaaaagacggaattgcgcgggcaaaatccattagcgaaccatggctttccaatgtcgcgtccgctcacgaaaacggcggcgcaaccggaagccgcggctggaactacggttttgaccgcgattttacaaaacggcttattctgcgttcccaagggactgtgctttcagcgaaacaactgccgacggcgaaaatccccggcaagtatttcggcattgcgcgttgtttccgctacgaccgcgtggacgctacacacgggtctgatttttatcaaactgagggtattgtgttaggtgaaaacgttaaccttcgcacgcttttgggaatgttggaaatgtttgccgttgaagttgccggagcgaaagaagttaaatatgttcccggttatttcccattcacggaaccgtccgttgaagtgcatatcaagcacccaattctcggctggtttgaacttggcggctcgggtatttttcgccccgaagttacttccagtcttggagtgaacgtccctgtcgccgcgtggggtatcggcatagaccgcatggcgctgatggcgttgggattaaatgaccttagagagttattcagttatgatattgagaatgtaaggttaagaagagcgaaagcaagttaa

SEQ ID NO: 67470 - protein, 496 aa, Unknown
  Obtained from environmental sample
  DOMAIN (211)...(491): tRNA synthetases class II core domain (F)
  misc_feature (1)..(496): Xaa is any amino acid
MGFKPGNGNQALSWLAGKELLCEIRRETAVFFELTELGREWKEKGSPEERIIKLVKTKSGELKLPDIAKALNIENKDIGSAFGSLSKLGILAMNDEKNVVVLKEPSADQFAALRGLLEKGVKGAIAESSLNAAEKSVMSGIAKKRGAADAPFRQIDRETVFFGFKAAEDGSVPAVEAAQALKEAGITGDEIGALTQSMLEDGSWKGKTFRSYNVKTPPVRLTPGRSNPYAKFLENVKDKLTSLGFEEFDGPLVETEFWNSDALFMPQFHSARDIHDAYSIADPSKSTKDGIARAKSISEPWLSNVASAHENGGATGSRGWNYGFDRDFTKRLILRSQGTVLSAKQLPTAKIPGKYFGIARCFRYDRVDATHGSDFYQTEGIVLGENVNLRTLLGMLEMFAVEVAGAKEVKYVPGYFPFTEPSVEVHIKHPILGWFELGGSGIFRPEVTSSLGVNVPVAAWGIGIDRMALMALGLNDLRELFSYDIENVRLRRAKAS

SEQ ID NO: 67471 - DNA, 1146 bp, Unknown
  Obtained from environmental sample
  misc_feature (1)..(1146): n is a, c, g, or t
atggcagatgaaatatcagtattagttgtagacgactcagcgttaatgcgcaacttaatcggccgcatgatcgaagatacaccgggtttgaccgttgccgaaaaagcaatgaacggtaatttcgccctgcaaaaaatcgcccgtgttgaaccggatgttatttgtcttgatcttgaaatgccggaaatgaacggcattgaatttttaaaggaacgaaaaaaaaggggtatcgatatccccgtcgtaatactttcttccgttgccgcacgcggcgctgctattaccatggaagctctggatcttggagcaagcgactttatacaaaaaccgtcgggctcagtatcggaagatattcatatagtaaaagacacgctggtaagtaaacttttgggttacggcggatcataccgcaaatcgaaaggtaaaaaaattctcgctcctgcagaatataaagaaaagccagaagtaaaagaatcaaaaaatgtggatttggcggttcattttaaacttatatctgaaacgccctccgatcccgctcaagctccagtcagagcgcgtcatccggctaaaacggaaataatcgccatcggtatcagcacgggaggacccgacgctctgcgcgtggtattcgcaaatttagacgccgatttaaaagtgccgattgtcgtagtacagcatatgcccgcaggtttcacaaacgaatttgcaaagagccttgaccgtatttgcccgttagatgtaaaggaagcggaagaaggcgatgaaataataccgggcagaattcttatcgctcagggcaacaaacatcttgaagttgaaaagaaagcttccggcggactcgtccatctttccgacaatcctctggtttcgggtcacagaccttccgccgacgtgcttttcgcatctgtagcaatggcgtatacaaaccacgtccttggagtaatcatgaccggtatgggacgcgacggagcgcagcacctcggcacgatttacaaagaaggcggcataactcttgggcaggatgaaaaaagcgcagtcgtttacggaatgcctcgtgtcgcctacgaattgggtcatgttatggaacaagtttcattggataatatggctcgccgtatctgcgacgttgcaaaagaagctcgttaa

SEQ ID NO: 67472 - protein, 381 aa, Unknown
  Obtained from environmental sample
  DOMAIN (5)...(122): Response regulator receiver domain
  misc_feature (1)..(381): Xaa is any amino acid
MADEISVLVVDDSALMRNLIGRMIEDTPGLTVAEKAMNGNFALQKIARVEPDVICLDLEMPEMNGIEFLKERKKRGIDIPVVILSSVAARGAAITMEALDLGASDFIQKPSGSVSEDIHIVKDTLVSKLLGYGGSYRKSKGKKILAPAEYKEKPEVKESKNVDLAVHFKLISETPSDPAQAPVRARHPAKTEIIAIGISTGGPDALRVVFANLDADLKVPIVVVQHMPAGFTNEFAKSLDRICPLDVKEAEEGDEIIPGRILIAQGNKHLEVEKKASGGLVHLSDNPLVSGHRPSADVLFASVAMAYTNHVLGVIMTGMGRDGAQHLGTIYKEGGITLGQDEKSAVVYGMPRVAYELGHVMEQVSLDNMARRICDVAKEAR

SEQ ID NO: 67473 - DNA, 333 bp, Unknown
  Obtained from environmental sample
  misc_feature (1)..(333): n is a, c, g, or t
ttgctaaaagccttgctgccttcaagttgggcggcggcggcagttggaccaaaaatttgcattccctgttttttgaattcatcaaccacgcctgccacaagcggaatttctggacctataacggtgaaatccgctttttcgttttttgctatttctgctatggctttggggtttgctgcatcaacgggcaagcattttccaaggattgccataccaggattccccggtgcgcaaactaactccgtgcatagcggagatttttttaaactaagcgcaatggtgtgttccctgccgccgctgcctatcaaaagaactttcattttggaaatgtag

SEQ ID NO: 67474 - protein, 110 aa, Unknown
  Obtained from environmental sample
  SIGNAL (1)...(27)
  misc_feature (1)..(110): Xaa is any amino acid
MLKALLPSSWAAAAVGPKICIPCFLNSSTTPATSGISGPITVKSAFSFFAISAMALGFAASTGKHFPRIAIPGFPGAQTNSVHSGDFFKLSAMVCSLPPLPIKRTFILEM

SEQ ID NO: 67475 - DNA, 723 bp, Unknown
  Obtained from environmental sample
  misc_feature (1)..(723): n is a, c, g, or t
atgctccaccgcttgtgcgggcccccgtcaattcctttgagtttcacccttgcgggcgtactccccaggcggcgcgcttatcgcgttggctacggcacccaggggcataaacccccgggcgccaagcgcgcatcgtttacggcgcggactaccagggtatctaatcctgtttgctacccgcgctttcgagccgcagcgtcgatgattccccagctggccgccttcgccctcggtgttcttcccgatatctacgcattccaccgctccaccgggaattccgccagcctctggaacatccaagccccgcagtcccgggcgcaaggccggggttgggccccagcattgcacgcccggcttgcagggcagcctacgctccctttacgcccagtgattccgaacaacgctcgcacccctcgtattaccgcggctgctggcacgaagtttgccggtgcttcctctcggggtacgctcaatgcagccgaagctgcaggctgttcccccacgacagtggtttacacgcctaggcgctccttcccacacgtggcgtcgctgcgtcagggttgcccccattgcgcaatattccctgctgctgcctcccgtaggagtctgggccgtatctcagtcccaatgtggccgttcgccctctcaggccggctaccgatcgtaggtttggtgggcctttaccccgccaactgcctaatcggacgcgagcccatcccctag

SEQ ID NO: 67476 - protein, 240 aa, Unknown
  Obtained from environmental sample
  misc_feature (1)..(240): Xaa is any amino acid
MLHRLCGPPSIPLSFTLAGVLPRRRAYRVGYGTQGHKPPGAKRASFTARTTRVSNPVCYPRFRAAASMIPQLAAFALGVLPDIYAFHRSTGNSASLWNIQAPQSRAQGRGWAPALHARLAGQPTLPLRPVIPNNARTPRITAAAGTKFAGASSRGTLNAAEAAGCSPTTVVYTPRRSFPHVASLRQGCPHCAIFPAAASRRSLGRISVPMWPFALSGRLPIVGLVGLYPANCLIGREPIP

SEQ ID NO: 67477 - DNA, 354 bp, Unknown
  Obtained from environmental sample
  misc_feature (1)..(354): n is a, c, g, or t
ttgctacccgcgctttcgagccgcagcgtcgatgattccccagctggccgccttcgccctcggtgttcttcccgatatctacgcattccaccgctccaccgggaattccgccagcctctggaacatccaagccccgcagtcccgggcgcaaggccggggttgggccccagcattgcacgcccggcttgcagggcagcctacgctccctttacgcccagtgattccgaacaacgctcgcacccctcgtattaccgcggctgctggcacgaagtttgccggtgcttcctctcggggtacgctcaatgcagccgaagctgcaggctgttcccccacgacagtggtttacacgcctag

SEQ ID NO: 67478 - protein, 117 aa, Unknown
  Obtained from environmental sample
  misc_feature (1)..(117): Xaa is any amino acid
MLPALSSRSVDDSPAGRLRPRCSSRYLRIPPLHREFRQPLEHPSPAVPGARPGLGPSIARPACRAAYAPFTPSDSEQRSHPSYYRGCWHEVCRCFLSGYAQCSRSCRLFPHDSGLHA

SEQ ID NO: 67479 - DNA, 384 bp, Unknown
  Obtained from environmental sample
  misc_feature (1)..(384): n is a, c, g, or t
gtgtgtggcccaggatgtaagggccatgaggacttgacgtcgtccgcaccttcctccgggttgtccccggcagtccccctggagagccatattggcaaccaagggcacgggttgcgctcgttgcgggacttaacccaacatctcacgacacgagctgacgacagccatgcagcacctgtgcgggaagcccattgctgggcgcagccatctctggctacctcttccccatgtcaaaccctggtaaggttctgcgcgttgcgtcgaattaaaccacatgctccaccgcttgtgcgggcccccgtcaattcctttgagtttcacccttgcgggcgtactccccaggcggcgcgcttatcgcgttggctacggcacccaggggcataa

SEQ ID NO: 67480 - protein, 127 aa, Unknown
  Obtained from environmental sample
  misc_feature (1)..(127): Xaa is any amino acid
MCGPGCKGHEDLTSSAPSSGLSPAVPLESHIGNQGHGLRSLRDLTQHLTTRADDSHAAPVREAHCWAQPSLATSSPCQTLVRFCALRRIKPHAPPLVRAPVNSFEFHPCGRTPQAARLSRWLRHPGA

SEQ ID NO: 67481 - DNA, 399 bp, Unknown
  Obtained from environmental sample
  misc_feature (1)..(399): n is a, c, g, or t
gtgagatgttgggttaagtcccgcaacgagcgcaacccgtgcccttggttgccaatatggctctccagggggactgccggggacaacccggaggaaggtgcggacgacgtcaagtcctcatggcccttacatcctgggccacacacgtgctacaatggggggcacagagggaagccaggccgcgaggccgagcggatcccgaaagcctcccccagttcggataggagtctgcaacccgactccttgaagccggaatcgctagtaatcgcggatcagcatgccgcggtgaatacgttcccgggccttgtacacaccgcccgtcaagccatgggaggggagagcgctccaagacgtgcagccaacccgcaagggagcgggcgtccaaagcgagatccctga

SEQ ID NO: 67482 - protein, 132 aa, Unknown
  Obtained from environmental sample
  misc_feature (1)..(132): Xaa is any amino acid
MRCWVKSRNERNPCPWLPIWLSRGTAGDNPEEGADDVKSSWPLHPGPHTCYNGGHRGKPGREAERIPKASPSSDRSLQPDSLKPESLVIADQHAAVNTFPGLVHTARQAMGGESAPRRAANPQGSGRPKRDP

SEQ ID NO: 67483 - DNA, 399 bp, Unknown
  Obtained from environmental sample
  misc_feature (1)..(399): n is a, c, g, or t
gtgagatgttgggttaagtcccgcaacgagcgcaacccgtgcccttggttgccaatacggctctccagggggactgccggggacaacccggaggaaggtgcggacgacgtcaagtcctcatggcccttacatcctgggccacacacgtgctacaatggggggcacagagggaagccaggccgcgaggccgagcggatcccgaaagcctcccccagttcggataggagtctgcaacccgactccttgaagccggaatcgctagtaatcgcggatcagcatgccgcggtgaatacgttcccgggccttgtacacaccgcccgtcaagccatgggaggggagagcgctccaagacgcgcagccaacccgcaagggagcgggcgtccaaagcgagatccctga

SEQ ID NO: 67484 - protein, 132 aa, Unknown
  Obtained from environmental sample
  misc_feature (1)..(132): Xaa is any amino acid
MRCWVKSRNERNPCPWLPIRLSRGTAGDNPEEGADDVKSSWPLHPGPHTCYNGGHRGKPGREAERIPKASPSSDRSLQPDSLKPESLVIADQHAAVNTFPGLVHTARQAMGGESAPRRAANPQGSGRPKRDP

SEQ ID NO: 67485 - DNA, 315 bp, Unknown
  Obtained from environmental sample
  misc_feature (1)..(315): n is a, c, g, or t
gtggtccgggttgttcccctctcgtccgctgaccttatcgcccgcgggctgcctgcgcggctgaacttgcgcggtattcggagttcggttgggtttggtaggcgggtgcgccccctagtccatccggtgctctacccccggcaagcatcgccgcacgcaatacctaaatatttttcggagagaacaagctatcgcccagtttggttggcctttcacccctatccagagctcatccggacgcgtttcaatgcatatcggttcggccctccacggggtgtcacccccgcttcggcctggccctggatagatcactaa

SEQ ID NO: 67486 - protein, 104 aa, Unknown
  Obtained from environmental sample
  misc_feature (1)..(104): Xaa is any amino acid
MVRVVPLSSADLIARGLPARLNLRGIRSSVGFGRRVRPLVHPVLYPRQASPHAIPKYFSERTSYRPVWLAFHPYPELIRTRFNAYRFGPPRGVTPASAWPWIDH

SEQ ID NO: 67487 - DNA, 300 bp, Unknown
  Obtained from environmental sample
  misc_feature (1)..(300): n is a, c, g, or t
gtgcgcgggctttccacccgcgttttcgcatactcatgccagcattctcattcccgatgcctccagcggcaatcgcctgccgccttcccaggcatacgggacgctctcctaccactccatatcgctatggaatccacggcttcggcggcgcgcttagccccgataattttgggcgcggcagggcgtcgaccagtgagctgttacgctttctttaaaggatggctgcttctaagccaacctcctggctgtcaccgccccgccacttcctttctcactcagcgcgctctccggggcgcttag

SEQ ID NO: 67488 - protein, 99 aa, Unknown
  Obtained from environmental sample
  misc_feature (1)..(99): Xaa is any amino acid
MRGLSTRVFAYSCQHSHSRCLQRQSPAAFPGIRDALLPLHIAMESTASAARLAPIILGAAGRRPVSCYAFFKGWLLLSQPPGCHRPATSFLTQRALRGA

SEQ ID NO: 67489 - DNA, 606 bp, Unknown
  Obtained from environmental sample
  misc_feature (1)..(606): n is a, c, g, or t
ttgccgagttccttctcccgggttgtctcaagcacctcgggcttctcgcccagcccacctgtgtcggtttggggtacggtcggcatgaaagctcccttagcgggttttcctggcgcgggcacgggcagctcgggctcgggccgaagccctcccccggtcagtagtctcaggcttatgccagggggatttgccgccctgacgccttgctccacttccgcggcatatccatcagccgctatgccccgacccgcgcgtcgccgcatcggtcagacgcctccatgccggcgggggaatatttgcccccttcccatcggtcgcgcctctcggcttcgccttagggaccggctgaccccgggcggactaaccttccccgggaaccctcgggctatcggtgcgcgggctttccacccgcgttttcgcatactcatgccagcattctcattcccgatgcctccagcggcaatcgcctgccgccttcccaggcatacgggacgctctcctaccactccatatcgctatggaatccacggcttcggcggcgcgcttagccccgataattttgggcgcggcagggcgtcgaccagtgagctgttacgctttctttaa

SEQ ID NO: 67490 - protein, 201 aa, Unknown
  Obtained from environmental sample
  SIGNAL (1)...(23)
  misc_feature (1)..(201): Xaa is any amino acid
MPSSFSRVVSSTSGFSPSPPVSVWGTVGMKAPLAGFPGAGTGSSGSGRSPPPVSSLRLMPGGFAALTPCSTSAAYPSAAMPRPARRRIGQTPPCRRGNICPLPIGRASRLRLRDRLTPGGLTFPGNPRAIGARAFHPRFRILMPAFSFPMPPAAIACRLPRHTGRSPTTPYRYGIHGFGGALSPDNFGRGRASTSELLRFL

SEQ ID NO: 67491 - DNA, 513 bp, Unknown
  Obtained from environmental sample
  misc_feature (1)..(513): n is a, c, g, or t
ttggatgcctccgttactttttgggaggcgaccgccccagtcaaactggccaccaggcactgtcccggcgcctttgggggcgcgcggttaggcctcaggcgacgcaggggcggtatttcaaggacggctccccccggcccagaagccggggatcgtagcctcccgcctatcctacgcacgcggcgcctaaagccaacgccaagatgcagtgaaggttcatggggtctttccgtccaggcgcggggcgccggcatcttcaccggcactgcaatttcgctgagtctcgggaggagacagcgcaggagtcgttacacgattcgtgcaggtcggaacttacccgacaaggaatttcgctaccttaggaccgttatagttacggccgccgtttaccggggcttcggttcgccgcttcggggttgccccctgacgcctcccgttaaccttccggcaccgggcacgtgtcagaccatatacttcccattgctggttcgcatggccctgtgtttttggtaa

SEQ ID NO: 67492 - protein, 170 aa, Unknown
  Obtained from environmental sample
  misc_feature (1)..(170): Xaa is any amino acid
MDASVTFWEATAPVKLATRHCPGAFGGARLGLRRRRGGISRTAPPGPEAGDRSLPPILRTRRLKPTPRCSEGSWGLSVQARGAGIFTGTAISLSLGRRQRRSRYTIRAGRNLPDKEFRYLRTVIVTAAVYRGFGSPLRGCPLTPPVNLPAPGTCQTIYFPLLVRMALCFW

SEQ ID NO: 67493 - DNA, 366 bp, Unknown
  Obtained from environmental sample
  misc_feature (1)..(366): n is a, c, g, or t
ttggcgaacagccaaacccttgggaccttctccagccccaggatgcgacgagccgacatcgaggtgccaaacctccccgtcgctatggacgcttgggggagatcagcctgttatccccagagtaccttttatccattgagcaacggccgttccacgctgtgccgcgggatcactaagccctgctttcgcatctgcccggcccgtcggcctcgcagtcaagccaccttttgcctttgcgctcgcgggaccggttgccgaccggtccgaggtgacctttggatgcctccgttactttttgggaggcgaccgccccagtcaaactggccaccaggcactgtcccggcgcctttgggggcgcgcggttag

SEQ ID NO: 67494 - protein, 121 aa, Unknown
  Obtained from environmental sample
  misc_feature (1)..(121): Xaa is any amino acid
MANSQTLGTFSSPRMRRADIEVPNLPVAMDAWGRSACYPQSTFYPLSNGRSTLCRGITKPCFRICPARRPRSQATFCLCARGTGCRPVRGDLWMPPLLFGRRPPQSNWPPGTVPAPLGARG

SEQ ID NO: 67495 - DNA, 369 bp, Unknown
  Obtained from environmental sample
  misc_feature (1)..(369): n is a, c, g, or t
atgcattcagcgcttctccgcagggcgcgcggctacccggccgtgccgctggcgcgacagccggtgcgccggaggcgcccccgtcccggtcctctcgtactaaggacggcgtccctcaaacctactgcgcccgcgccggatagggaccgaactgtctcacgacgttctgaacccagctcgcgtgccgctttaattggcgaacagccaaacccttgggaccttctccagccccaggatgcgacgagccgacatcgaggtgccaaacctccccgtcgctatggacgcttgggggagatcagcctgttatccccagagtaccttttatccattgagcaacggccgttccacgctgtgccgcgggatcactaa

SEQ ID NO: 67496 - protein, 122 aa, Unknown
  Obtained from environmental sample
  misc_feature (1)..(122): Xaa is any amino acid
MHSALLRRARGYPAVPLARQPVRRRRPRPGPLVLRTASLKPTAPAPDRDRTVSRRSEPSSRAALIGEQPNPWDLLQPQDATSRHRGAKPPRRYGRLGEISLLSPEYLLSIEQRPFHAVPRDH

SEQ ID NO: 67497 - DNA, 1608 bp, Unknown
  Obtained from environmental sample
  misc_feature (1)..(1608): n is a, c, g, or t
gtgggaggcgtgggccttctttgtgttatagacgcaatacagccgacggtagcgaataccataaaaaccagggaagatattgccgcggcggtaatttattcaagcaacgggtttattatgggaagctatatgccggagcgcgtaggcaagatgatgaaagacgtagatgttatctatggtgaacatatggatgccgcttttaacgccgttcaaaagggcgaggatttttcctgctcaagttactcgccggctttgaagtcagacgtagaaattactgtagcgtctttcccaatgggcagttcgggcaaatcatggagcgtaatgatcgcggcgacgagatcttacatcttaagggaagtagatgagatgaccaaattcaccatcatcattgcgttgatagccattataatagcggcagtaattgtgtacattgtccttcacaccactacacaaccgatcgttaaggtagccgataccttaaaggacatctccgaaggcgaaggagacctgaccaagtccattaacgtcagctccaaagacgaggtaggcgaccttgccctgtacttcaacaaaaccctgcaaaaaatcaaaaacctggttttgataattaaaaatgaggcggcaagcctgagcagcgtaggcgctacccttgccagcaatatgacggaaaccgccgcggcgataaatgaaatcaccgccaatatccagagcatcaaggctcgcgtcattaaccagagcgccagcgttacagaaaccaacgccactatggaacaggttatcggcaacatcaacaaacttaacggccatgtggaaagccaaagccgcagcgtttcccaggcctcatccgccattgaggaaatggtagccaatatcagttcggttaccaacacgctggttaataacgccaccaatgtaaataccttaaaagaagcttccgaagtagggcgtaacggattgcaggaagtggcctcggacattcaggaaatagcccgcgagtccgaagggcttatggaaattaacgcggtaatggaaaacatcgcaagccagaccaatctgctttcaatgaacgcggcgattgaagccgcccacgcgggagaggcgggcaagggctttgccgtagtcgccgatgaaatccgcaaacttgcggagagttccagcgagcagtccaagaccatcggcaatgttttgaagaagataaaaacttcgatggacaagataacccactccacagagagcgtactggccaaattcgaagcgattgacacaggcgtcaagacggtggcggatcaggaagataacatccgcaacgcgatggaggaacagggcgaaggaagcaagcaaatcctgcaaggtatcagcactttgaacgaggttacccagaatgtaaagagcggttccgaggaaatgcttaacggcagccaggaagttatgaaggaaagccagcaccttgaaaaggtgacacaggaaataacaggcggcatgaacgagatggccctgggcgcggatcagatgaacacagcgataaataacgtcaaccagataagcggcaaaaaccgcgaagccattgaaattttgttaaaagaagtttctcgctttaaggtagactga

SEQ ID NO: 67498 - protein, 535 aa, Unknown
  Obtained from environmental sample
  DOMAIN (127)...(198): HAMP domain
  misc_feature (1)..(535): Xaa is any amino acid
MGGVGLLCVIDAIQPTVANTIKTREDIAAAVIYSSNGFIMGSYMPERVGKMMKDVDVIYGEHMDAAFNAVQKGEDFSCSSYSPALKSDVEITVASFPMGSSGKSWSVMIAATRSYILREVDEMTKFTIIIALIAIIIAAVIVYIVLHTTTQPIVKVADTLKDISEGEGDLTKSINVSSKDEVGDLALYFNKTLQKIKNLVLIIKNEAASLSSVGATLASNMTETAAAINEITANIQSIKARVINQSASVTETNATMEQVIGNINKLNGHVESQSRSVSQASSAIEEMVANISSVTNTLVNNATNVNTLKEASEVGRNGLQEVASDIQEIARESEGLMEINAVMENIASQTNLLSMNAAIEAAHAGEAGKGFAVVADEIRKLAESSSEQSKTIGNVLKKIKTSMDKITHSTESVLAKFEAIDTGVKTVADQEDNIRNAMEEQGEGSKQILQGISTLNEVTQNVKSGSEEMLNGSQEVMKESQHLEKVTQEITGGMNEMALGADQMNTAINNVNQISGKNREAIEILLKEVSRFKVD

SEQ ID NO: 67499 - DNA, 822 bp, Unknown
  Obtained from environmental sample
  misc_feature (1)..(822): n is a, c, g, or t
ttgatccatgcggccatccggccgcactacagaggagttatcatgggactaaggggagaacttttttcaacaagggtattgttgcagaatcgaacctactttttcaatgtaaaagagaaccgcttaggggatctttatttgaacattgtggagagcaagaaccgggaaacagggggctttgaacgccagtcggtaattctctttgccgatgatctaaaggaattccttgtgggcttcgatgagtccctgcgggttctggaaaaggcggttagggaaaaacgcaaaggcgagagtcccaggggcgacttcaggcatggaaaccctggagaagatccagatcgcaagagctacggccgacggcctgggcagcatcgggattccccaagggaagacgaggacgaaggccaagagcgcaggtcattcgaacgtaagtcaacggaccacaggtccgagaggacttttggttccgaacgcgaattttcagagcgcaggccaacggaccacaggtccgagcggactttttctgccgaacgcagattcgccgaacgcagatccacggatcgtaagccttcagaccgaaggtcagcggaccggaggtcagcggaccggaggtccgaaggttcctcacccccaggccgcagaccccgagtctcccgccgggccgaaggcacaggcaaaccaactggcgcgaggcccagaaccggggaacgtcctaaactaaggctcaggcaaaaacccggtgaaggcccaaggaggccgaggcctgatggagacaggcccgccggaaagccgcggaaacgggtggttagacggaaggactga

SEQ ID NO: 67500 - protein, 273 aa, Unknown
  Obtained from environmental sample
  misc_feature (1)..(273): Xaa is any amino acid
MIHAAIRPHYRGVIMGLRGELFSTRVLLQNRTYFFNVKENRLGDLYLNIVESKNRETGGFERQSVILFADDLKEFLVGFDESLRVLEKAVREKRKGESPRGDFRHGNPGEDPDRKSYGRRPGQHRDSPREDEDEGQERRSFERKSTDHRSERTFGSEREFSERRPTDHRSERTFSAERRFAERRSTDRKPSDRRSADRRSADRRSEGSSPPGRRPRVSRRAEGTGKPTGARPRTGERPKLRLRQKPGEGPRRPRPDGDRPAGKPRKRVVRRKD

SEQ ID NO: 67501 - DNA, 363 bp, Unknown
  Obtained from environmental sample
  misc_feature (1)..(363): n is a, c, g, or t
gtgttaaatgtcatcagttcggatcacggcgcgttgaaaagccgctatcaaaaaaattttctacgccagtgggaagagcgcgctaatgaattaaaggcccgctatggtatacaccgttgggaagtggcggcatataatggaatggaagaacgaaaaggcataaccgatttcggcgaggcgggcaagggcgggcttaaaatttgtttttatgatgcccataataaggccgttgcctggatatggatgcggggttccgccaccgagccggttttccgcatcatggccgatgcgtcagaccagtttattgaacgcgacttcattgactggcagcgccgtatggtaacggaagccgacagaaaataa

SEQ ID NO: 67502 - protein, 120 aa, Unknown
  Obtained from environmental sample
  misc_feature (1)..(120): Xaa is any amino acid
MLNVISSDHGALKSRYQKNFLRQWEERANELKARYGIHRWEVAAYNGMEERKGITDFGEAGKGGLKICFYDAHNKAVAWIWMRGSATEPVFRIMADASDQFIERDFIDWQRRMVTEADRK

SEQ ID NO: 67503 - DNA, 834 bp, Unknown
  Obtained from environmental sample
  misc_feature (1)..(834): n is a, c, g, or t
gtggtcgcccaaacggaaacattggaccgcctttattatcattcttgtcaccggaattttcactcatatatggaattattgcataaattaactgtcgttgcaaggttcgccagtcttgtgttagtatataatatgaaaaattccgctttgtctcccctttatttaattgacgcttatggccttatttaccgttcatatttcgcctttttaacccatcccctgcgcaataacgtcggcaaaaatgtttccgctttattcggatttgcccgtactgtaatttccctaattgatgatggcgctcctgtcgctgacaacgacggtaaagatcttaatcatttaaaacccgtccgccttgccgcggtttttgattcgcggactcccactttccgccacaaaatgtacagcgaatacaaagcaaataggcagaaagctcccgaagaccttcacgagcaggttccgttagttgaagaatttttaacggcgttaggcgttcaaagccttaaagttgaggggtttgaagcggatgatattatcgcgactcttgcggaaaaatgccgcgccgaaaaaaggcagtgttatattctctcatcggataaagatttgcttcagcttgttggcggcggagtatttgaacttcgtcccgcaaaaattaacagaaaaaatgaaactgccgccactccaggccccgcatgggaccttatcggctctgatgaagtaaaagaggaatggggcgtagaaccgctaaaagtgcttgatttactttcattgactggtgatagttccgacaatgttcccggtataaaaggaatggagaaaaaacagccgtcaaattaa

SEQ ID NO: 67504 - protein, 277 aa, Unknown
  Obtained from environmental sample
  DOMAIN (51)...(243): 5'-3' exonuclease, N-terminal resolvase-like domain
  misc_feature (1)..(277): Xaa is any amino acid
MVAQTETLDRLYYHSCHRNFHSYMELLHKLTVVARFASLVLVYNMKNSALSPLYLIDAYGLIYRSYFAFLTHPLRNNVGKNVSALFGFARTVISLIDDGAPVADNDGKDLNHLKPVRLAAVFDSRTPTFRHKMYSEYKANRQKAPEDLHEQVPLVEEFLTALGVQSLKVEGFEADDIIATLAEKCRAEKRQCYILSSDKDLLQLVGGGVFELRPAKINRKNETAATPGPAWDLIGSDEVKEEWGVEPLKVLDLLSLTGDSSDNVPGIKGMEKKQPSN

SEQ ID NO: 67505 - DNA, 873 bp, Unknown
  Obtained from environmental sample
  misc_feature (1)..(873): n is a, c, g, or t
ttgggggctggaaatccnntctgtctatgttgttatcctgattattggaatgagcctttttattatgtgtttctcaacaagatgaatccggcgatagatttttctgaattcaaatcccgtatttcaacaggtgaaattaaacgtgtggaaataacggattcttatattacaggttttacaagttccgacaaaaaagagtcttcaaggagtattacgcgttcttacggtccaactcagcacgataaagtgtaccgtactgtttcgattcttactgaaggtttttttgagtttttagacgcaaataatgtttcctacggcgcggtttcacgcgaaggcaacgctgttttaaattttctttttagctgggtattgccaatcgctttcttcatttttatctggcggtttgttttcaagcggttggggaatatgggcggcaatgtgctttccatcggacaaaaccgcgcgattattgtcgcggaaggtgacattgttacgcgctttagcgatgttgccggagtagatgaagccaaagaggagcttgttgaagttgtcgattttttaaagaatcctcagaagtacaaggagatcggcggcaagataccgaagggagtgcttttggtgggaccgccggggacgggaaaaactttgttggcgcgagccgttgccggagaggccagagttgcctttttccgcatgagcggagcagactttgtagaaatgtttgttggcgtaagcgcggcgcgtgtgcgcgatttattcaaacaggcaagaaacaaagcgccctgtattatttttattgatgagttagacgccatcggtaaaagcagaataaacaatatcggcggcggtaatgacgagcgcgacagacattaa

SEQ ID NO: 67506 - protein, 290 aa, Unknown
  Obtained from environmental sample
  DOMAIN (203)...(290): ATPase family associated with various cellular activities (AAA)
  misc_feature (1)..(290): Xaa is any amino acid
MGAGNPXCLCCYPDYWNEPFYYVFLNKMNPAIDFSEFKSRISTGEIKRVEITDSYITGFTSSDKKESSRSITRSYGPTQHDKVYRTVSILTEGFFEFLDANNVSYGAVSREGNAVLNFLFSWVLPIAFFIFIWRFVFKRLGNMGGNVLSIGQNRAIIVAEGDIVTRFSDVAGVDEAKEELVEVVDFLKNPQKYKEIGGKIPKGVLLVGPPGTGKTLLARAVAGEARVAFFRMSGADFVEMFVGVSAARVRDLFKQARNKAPCIIFIDELDAIGKSRINNIGGGNDERDRH

SEQ ID NO: 67507 - DNA, 972 bp, Unknown
  Obtained from environmental sample
  misc_feature (1)..(972): n is a, c, g, or t
ttgttgaaatggacggctttgacggtaccacgcggtcttataatactggccgcaacaaaccgtcctgatgtgcttgatcccgcgcttctgcgtccagggcgttttgacaggcaagtgcttgtggacaagcccgatgtaaaaggcagagaagcgattttaaaaattcattcaaagcaggtattgaaggatcccactgttgatcttgagattgtcgcacgcattacgtccggtttttcgggagcagaccttgccaacattgtaaacgaagctgcgcttcttgcggtaagagcagggcggaaaatggtaacgcagagagattttgacgaagcaattgaaaaaaccgttgccggtctgcagaaaaagacaagagtactcaaacagaacgaaagaaaacttacagcgtaccacgaagccggtcatgcgctgattgccgcatttacacctaactcggaccccgttcagaaaatttcgattattccgcgcggttttgcgcttggctatacattacagctgcctctggaagaccgttatacagttaccaaatccgatcttttgggacggattgatattcttttgggcggacgcatagcggaagaaatgatctcaggcgaatattccacaggcgcggcaagcgatttaaccaaggctacggacatcgcccgtaaaatgatcaccgattacggaatgagcgatcgtttcgccaatgttgcgctgacatcgcgcggcatgagcatgacagggcaggaaaggcaagaaccttcttttcagcgcgaatacgccgaaagtacccagcaatacattgatgaagaaattgcccgtgttatagagtgcgagtacgcgaaagccaaaaaaatcttggaagaaaaacgcgatattttgaatagcgtttccgccgcgttattggaaaaagaaactttagacgaaaaagaatttaaagcccttattggagagggaatatcaatagtggtataa

SEQ ID NO: 67508 - protein, 323 aa, Unknown
  Obtained from environmental sample
  DOMAIN (1)...(96): ATPase family associated with various cellular activities (AAA)
  misc_feature (1)..(323): Xaa is any amino acid
MLKWTALTVPRGLIILAATNRPDVLDPALLRPGRFDRQVLVDKPDVKGREAILKIHSKQVLKDPTVDLEIVARITSGFSGADLANIVNEAALLAVRAGRKMVTQRDFDEAIEKTVAGLQKKTRVLKQNERKLTAYHEAGHALIAAFTPNSDPVQKISIIPRGFALGYTLQLPLEDRYTVTKSDLLGRIDILLGGRIAEEMISGEYSTGAASDLTKATDIARKMITDYGMSDRFANVALTSRGMSMTGQERQEPSFQREYAESTQQYIDEEIARVIECEYAKAKKILEEKRDILNSVSAALLEKETLDEKEFKALIGEGISIVV

SEQ ID NO: 67509 - DNA, 537 bp, Unknown
  Obtained from environmental sample
  misc_feature (1)..(537): n is a, c, g, or t
atgatatattttactgcagatcctcattttaatcattcaaacattattgaacttaataaaaggccgtttgccaatattgatcagatgaataataaaataattcaaaattggaattcatgcgtaacccctgatgatgaaatatatattttgggagatttcatgtttaatggaagcggaaatgaggcgaataattttttaagcagattaaacggaacaaaatatttaataaaaggtaaccacgatgaaaaatacttaaaagacgaaatgttttatgaggataattttgaatgggttaaggattattatgttctgtactataataagataaagatagtaatgtttcattacccgatattggaatgggacggatactacaaagacgctattcatttgcatggtcatgttcataattgcagtaagtatccggatcagcaaaaaagagtaaaattattgggaaaaaaagcaattaatgtcggtgttgatgtaaataatttttttccgataagtattgaaaaagtaatgaaaatggctgaatag

SEQ ID NO: 67510 - protein, 178 aa, Unknown
  Obtained from environmental sample
  DOMAIN (2)...(138): Calcineurin-like phosphoesterase
  misc_feature (1)..(178): Xaa is any amino acid
MIYFTADPHFNHSNIIELNKRPFANIDQMNNKIIQNWNSCVTPDDEIYILGDFMFNGSGNEANNFLSRLNGTKYLIKGNHDEKYLKDEMFYEDNFEWVKDYYVLYYNKIKIVMFHYPILEWDGYYKDAIHLHGHVHNCSKYPDQQKRVKLLGKKAINVGVDVNNFFPISIEKVMKMAE

SEQ ID NO: 67511 - DNA, 321 bp, Unknown
  Obtained from environmental sample
  misc_feature (1)..(321): n is a, c, g, or t
gtggtgccagattggccggcttgttgcggaacgggttttctttcgccgcttgcgatgacgacacaggaggcggaagcggtactagtagcggcggctctggcgggggcggcggctctggcgggggcggcggctctggcgggggcggcggctctggcgggggcggcggctctggcgggggcggcggctctggcgggggcggcggctctggcgggggcggcggctctggcgggggcagcggctctggcggaggcggcggctctggcgggggtggcggcggaggaggagacggaaaagccccaacaatcacaactacgtcattga

SEQ ID NO: 67512 - protein, 106 aa, Unknown
  Obtained from environmental sample
  misc_feature (1)..(106): Xaa is any amino acid
MVPDWPACCGTGFLSPLAMTTQEAEAVLVAAALAGAAALAGAAALAGAAALAGAAALAGAAALAGAAALAGAAALAGAAALAEAAALAGVAAEEETEKPQQSQLRH

SEQ ID NO: 67513 - DNA, 1725 bp, Unknown
  Obtained from environmental sample
  misc_feature (1)..(1725): n is a, c, g, or t
ttggccggcttgttgcggaacgggttttctttcgccgcttgcgatgacgacacaggaggcggaagcggtactagtagcggcggctctggcgggggcggcggctctggcgggggcggcggctctggcgggggcggcggctctggcgggggcggcggctctggcgggggcggcggctctggcgggggcggcggctctggcgggggcggcggctctggcgggggcagcggctctggcggaggcggcggctctggcgggggtggcggcggaggaggagacggaaaagccccaacaatcacaactacgtcattgacatacggaacaaagggaattacatatagtcaaacattaactgcaacaggaaataatcctattacatggaaccttgacagcggcacattgccgaatggcttgactctttccgacacaggcgtaatttcaggaactccgacaacagagggaacatctacgtttaccgttaaagcaatcaacgccgcaggaagcaacgtcaagcagttgtcaattctcgtcaatttacctcacatatttaacagcattgaagactttgaaacatggctgaaagcgcaaccagaaaataccaattccactccttacggcgttaaattgaatgtgagcgatttaggcggttataactatactccaggaagccttggatatgtacttaatgaaaacgaaaaaaaatacgtttcttttgatctttctggcagtacttttaaaaataatatgactggcggttttaaccgttgcactagccttaccagcatatctttacccaacagcgttaccagaattgggagtaatgcttttcttgattgcacaagccttaccagcgtaaccataccgaacagcgttaccgaaattgggagttatgcttttcttggttgcacaagccttaccagcgtaaccataccggacagcgttaccgaaattgggcaagaggcttttatcaattgcactagccttactaccataaccataggaagcggcgttaccaaaattgtaaatattaatacatcggtttttaatagttgcaaagaactcagaaacattaccataaagacaaataaggtaacttttaaaagtagtgagaattggggaacaatatttcctgccgaaaacttggctgttacgtttgaagatgtagagtccattcctgtaaatgctttttacaattgcaaaagacttacaagtgtaaccataggaaacagcgttaccagaattgggcaagaggctttttccggttgcaccaaccttaccagcgtgaccataggaaacggagttaccaccattggggagtacgcttttagccgttgcaacagccttactaacctaaccataggaaacagcgttaccagtattgggtccaacgcttttgatggttgcaacagccttactaacctaaccataggaaacagcgttaccaccattggggagtacgcttttgcggtttgcaccagccttaccagcgtaaccataccgaacagtgttaccactattaggaattacgcttttcattatactagacttaccagcgtaacgtttgcaacaggaagcaacataccagacgattcttttcaaaacaacgcatttcctgaaggaacccaattccaaggcggaaataccttaaagaccgcatacagtacaggaaaagcgggaacttatacaagggtagcaaacggttctacgtggacgaaaacatctaactaa

SEQ ID NO: 67514 - protein, 574 aa, Unknown
  Obtained from environmental sample
  DOMAIN (125)...(166): Putative Ig domain
  misc_feature (1)..(574): Xaa is any amino acid
MAGLLRNGFSFAACDDDTGGGSGTSSGGSGGGGGSGGGGGSGGGGGSGGGGGSGGGGGSGGGGGSGGGGGSGGGSGSGGGGGSGGGGGGGGDGKAPTITTTSLTYGTKGITYSQTLTATGNNPITWNLDSGTLPNGLTLSDTGVISGTPTTEGTSTFTVKAINAAGSNVKQLSILVNLPHIFNSIEDFETWLKAQPENTNSTPYGVKLNVSDLGGYNYTPGSLGYVLNENEKKYVSFDLSGSTFKNNMTGGFNRCTSLTSISLPNSVTRIGSNAFLDCTSLTSVTIPNSVTEIGSYAFLGCTSLTSVTIPDSVTEIGQEAFINCTSLTTITIGSGVTKIVNINTSVFNSCKELRNITIKTNKVTFKSSENWGTIFPAENLAVTFEDVESIPVNAFYNCKRLTSVTIGNSVTRIGQEAFSGCTNLTSVTIGNGVTTIGEYAFSRCNSLTNLTIGNSVTSIGSNAFDGCNSLTNLTIGNSVTTIGEYAFAVCTSLTSVTIPNSVTTIRNYAFHYTRLTSVTFATGSNIPDDSFQNNAFPEGTQFQGGNTLKTAYSTGKAGTYTRVANGSTWTKTSN

SEQ ID NO: 67515 - DNA, 867 bp, Unknown
  Obtained from environmental sample
  misc_feature (1)..(867): n is a, c, g, or t
ttggggctgcgcgccgggctagacgttttcgctaacctccgtcccgccgccctgcttccccaattaagagcggcctgcccgcttaaagacgaagtgttagtcgcaagtaataacgggggaaaagccgcgttcgatttattgattgtaagggaattaacaggcggcctttacttcggcaagcgcggacgaattgacgaaccttcaaacggacacagccccggctccgcctttgacaccgaaacatattcatggatggaaattgagcgcgtgcttcgcgccggttatgaggcggcggccggccgccgaagaaaactctgcgtggtggacaaggccaacgtgcttgagtcgtcccgtttttggcgcgaagtcgcggcggtggtttcaaaagactatcccgatatagagacaagttacctttacgtcgacaacgcggcgatgcagttgatccgcgcgccgggccagttcgacgttattgttacgtctaaccttttcggggacatactttccgatgaggcgtccgtgcttacgggctcaatcggaatgttggcgtcggcgagccttggcgcggccgcgaagacagggacaaggcccggaatgtacgagccaattcacggttccgcgcccgacatcgcgggcaaggacatcgcgaatcccctcgcgacaattctttccgcggcgatgatgctccgctactccttcggccttgaaaaagaagctcgggcaattgaaacctcggtcaacaaggtgctggatcagggactaaggacaacagacatcgcgagccgcggctacgcgaacaacaatgaaaaaaatgtaggtaccaaagcaatgggagacgcggtactcaaagaattggagaaattatga

SEQ ID NO: 67516 - protein, 288 aa, Unknown
  Obtained from environmental sample
  DOMAIN (1)...(281): Isocitrate/isopropylmalate dehydrogenase
  misc_feature (1)..(288): Xaa is any amino acid
MGLRAGLDVFANLRPAALLPQLRAACPLKDEVLVASNNGGKAAFDLLIVRELTGGLYFGKRGRIDEPSNGHSPGSAFDTETYSWMEIERVLRAGYEAAAGRRRKLCVVDKANVLESSRFWREVAAVVSKDYPDIETSYLYVDNAAMQLIRAPGQFDVIVTSNLFGDILSDEASVLTGSIGMLASASLGAAAKTGTRPGMYEPIHGSAPDIAGKDIANPLATILSAAMMLRYSFGLEKEARAIETSVNKVLDQGLRTTDIASRGYANNNEKNVGTKAMGDAVLKELEKL

SEQ ID NO: 67517 - DNA, 822 bp, Unknown
  Obtained from environmental sample
  misc_feature (1)..(822): n is a, c, g, or t
gtggaacagcccagcgccatgtccagggccagggcgttcataaacgctttttgcgtgagtatgtttttggggcgcaggtcttttttcagaacgtccatgatcaacattccggtttttttcgcgagacggactcgctccgccattacggcggggatggttccgttgcccggtaaagccattccgagcgcctcggttacgcagttcattgagttggccgtaaacattccggcgcaggagccgcagcccgggcaggcgaggttttcaagttcttcaagttcctgttcgctgatctttccggcggcgaccgcgcctaccgcctcaaacatggttgtaagcgtaagcggtttcccgtccttgcgcccggcaagcatgggcccgcccgaaacaaaaacggagggaaggttaagccgcgccgaggccataagcatgcccggcactatcttgtcgcagttggggataaagacaagggcgtcaaaagcgtgggccatcgccatgcactcaaccgagtcggcgataagctcccttgtgggcagcgagtatttcatgccctcgtggcccatcgctatgccgtcgcatacgccgattaccggaaagatcaccggcgccccgcccgccatgcggacgccgtccgcggccgctttggcaatgttgtcaaggtgcagatggcccggcactatttcgcttttcgcgcaggcgatgccgacgagcggccttttaaattcttcttcgataaatcccagcgccttaaaaagggcgcggtggggcgagcgggcaatgcccttgtttacggaatcgcttttcataatttctccaattctttga

SEQ ID NO: 67518 - protein, 273 aa, Unknown
  Obtained from environmental sample
  misc_feature (1)..(273): Xaa is any amino acid
MEQPSAMSRARAFINAFCVSMFLGRRSFFRTSMINIPVFFARRTRSAITAGMVPLPGKAIPSASVTQFIELAVNIPAQEPQPGQARFSSSSSSCSLIFPAATAPTASNMVVSVSGFPSLRPASMGPPETKTEGRLSRAEAISMPGTILSQLGIKTRASKAWAIAMHSTESAISSLVGSEYFMPSWPIAMPSHTPITGKITGAPPAMRTPSAAALAMLSRCRWPGTISLFAQAMPTSGLLNSSSINPSALKRARWGERAMPLFTESLFIISPIL

SEQ ID NO: 67519 - DNA, 1674 bp, Unknown
  Obtained from environmental sample
  misc_feature (1)..(1674): n is a, c, g, or t
atgaaaagcgattccgtaaacaagggcattgcccgctcgccccaccgcgccctttttaaggcgctgggatttatcgaagaagaatttaaaaggccgctcgtcggcatcgcctgcgcgaaaagcgaaatagtgccgggccatctgcaccttgacaacattgccaaagcggccgcggacggcgtccgcatggcgggcggggcgccggtgatctttccggtaatcggcgtatgcgacggcatagcgatgggccacgagggcatgaaatactcgctgcccacaagggagcttatcgccgactcggttgagtgcatggcgatggcccacgcttttgacgcccttgtctttatccccaactgcgacaagatagtgccgggcatgcttatggcctcggcgcggcttaaccttccctccgtttttgtttcgggcgggcccatgcttgccgggcgcaaggacgggaaaccgcttacgcttacaaccatgtttgaggcggtaggcgcggtcgccgccggaaagatcagcgaacaggaacttgaagaacttgaaaacctcgcctgcccgggctgcggctcctgcgccggaatgtttacggccaactcaatgaactgcgtaaccgaggcgctcggaatggctttaccgggcaacggaaccatccccgccgtaatggcggagcgagtccgtctcgcgaaaaaaaccggaatgttgatcatggacgttctgaaaaaagacctgcgccccaaaaacatactcacgcaaaaagcgtttatgaacgccctggccctggacatggcgctgggctgttccacgaataccgcgcttcatctccctgcaatagccggggaagcgggcgtcaaactcgatctggagcttcttaacagggtaagcgcggttacgcctaacctctgccgcctcgcgccggcgggaaaggacgcgattgaggacctgcacgccgccgggggaattcccgcggttttaaaagagctttccaaaaagaacctgatcgatcttaaagccgcgaccgtatacggctgtctcggtgacgctttggaaaaggccgttaaccgcaatcccgatgtcataaggccgctggaaaacccttattcagcgacaggcgggcttgccgcgttaaagggaaacatcgcggaggatggctgcgttgtaaagcgcagcgcagtagcggattccatgctgaaacacgaggggccggcgagggttttcgattccgaggaagcggccttcgacgcgatcatgggaaagaagataaatgcgggggacgtagtcgttatacgttacgaagggcccaggggcggcccgggcatgaaggagatgctcgcgcccaccgcggccctcgccggcatgggccttgacgacaaagtggcccttatcacggacgggcgtttctcgggcgcttccaaaggcgcgtccataggccacgtttcgccggaagcggcaatgggggggaacatcggcatcataaacgaaggcgacatcatcgccattgacattgacgggctttccataaacgtaaaaataagcgaagaagaaatcgcgcggcggaggaaagaccggaaacctctttccaaaaattttacaggctaccttgcccgttacgccgcgcaggtcggctccgccgcttccggcgcagtttttgcctgcgaatcacaaaaaggaaactaa

SEQ ID NO: 67520 - protein, 557 aa, Unknown
  Obtained from environmental sample
  DOMAIN (31)...(550): Dehydratase family
  misc_feature (1)..(557): Xaa is any amino acid
MKSDSVNKGIARSPHRALFKALGFIEEEFKRPLVGIACAKSEIVPGHLHLDNIAKAAADGVRMAGGAPVIFPVIGVCDGIAMGHEGMKYSLPTRELIADSVECMAMAHAFDALVFIPNCDKIVPGMLMASARLNLPSVFVSGGPMLAGRKDGKPLTLTTMFEAVGAVAAGKISEQELEELENLACPGCGSCAGMFTANSMNCVTEALGMALPGNGTIPAVMAERVRLAKKTGMLIMDVLKKDLRPKNILTQKAFMNALALDMALGCSTNTALHLPAIAGEAGVKLDLELLNRVSAVTPNLCRLAPAGKDAIEDLHAAGGIPAVLKELSKKNLIDLKAATVYGCLGDALEKAVNRNPDVIRPLENPYSATGGLAALKGNIAEDGCVVKRSAVADSMLKHEGPARVFDSEEAAFDAIMGKKINAGDVVVIRYEGPRGGPGMKEMLAPTAALAGMGLDDKVALITDGRFSGASKGASIGHVSPEAAMGGNIGIINEGDIIAIDIDGLSINVKISEEEIARRRKDRKPLSKNFTGYLARYAAQVGSAASGAVFACESQKGN

SEQ ID NO: 67521 - DNA, 1812 bp, Unknown
  Obtained from environmental sample
  misc_feature (1)..(1812): n is a, c, g, or t
ttgcccgttacgccgcgcaggtcggctccgccgcttccggcgcagtttttgcctgcgaatcacaaaaaggaaactaaaatgttgttaacaggagcgcaaatattaatagaatcccttatcgagcagggagtggataccattttcggctatcccggcggaacggtattaaatatttacgatgaacttttcaaatacagcggcaggatccgccacatccttgtcagccacgaacagcacgccgcccacgccgccgacggttacgcgcgttccacgggaaaaaccggggtgtgcatagcgacatccgggcccggcgcgacaaaccttataacgggaatcgccacggcgtacatggattcgattccgttagtggcaattactggcaatgttccaaccggcattttgggcaaggacagttttcaggaagtggacatcaggggcatctccatgcccatagtgaagcacaactggattgtaaaacacgtcgagaaccttgcggaaataatccgcgaggcgtttgagcttgcctcctgtggccggcagggccccgtgttaatcgacattccaaaagatattaccgcgctgtccgccgaatggagcccctcaaagaaaattaagggcgagataaaagacaaggccctttccgcccgggcgaagcgtcttgacgaacgcacgacgagagtcacattcaccgatgaagaagttgaaaacgccgcaaaaatgatcagggaagccaggcgccccctgctctacgcgggagggggggtcatcagctccggcgcggaagaagagcttgtctctctcgccgaaaagcttaacgcgcccgtggcgctgagcctcatgggaataggcgccattccgaaagaccaccgcctctgcaccgggcttgtcggaatgcacggaaccgtggcgagcaacaaggcgacgcagaaagcggatctgctcatcgcgattggagcgcgtttttccgaccgcgtcacaagcaaggcggatatgttcgccaagaccgcgaaggtgattcactttgacattgatccggcggaggtgggcaagaacattgaaacccacgcgtgggtggtgggaaatttaaaagacacccttaaatgccttttgtcaaaacttcccccgcgccttaaaaccgaatgggacggagagattgacaaatggaaaacccacctgccccagacttacacccacgaggttaccttcgcgaagaacgcgcttcatccgcgttttattatcgaagaaaccgcgaaacaactcggccccgaaacaatcgccgtcaccgacgtgggccagcatcagatgtgggcggcgcagttttttcccgccgagaagccgagatcatttatcagctcgggcgggcttggaaccatgggcttcggcctcggcgcggcctgcggcgcgaaagtggcgaaccccgaaaaacccgtggcgctttttaccggcgacggcagtttcaggatgaactgcgcggagatggcgaccttaagcaacaataaaattccgcttttaataattctttttaacaacggagtcctgggcatggtaaggcaatggcagagttttttttacgaaggccgttactcgcagacaaccctgggcgcgtatcccgactttataaaactctgcgacgcctacggcatcaagggtttccgcgccggcaacagggaatctttcaggaaggctctccacgccgccgccgaagaactgtccgccggaagggccgctctgattgaagccgacatagaccgcgacgaaaacgttttaccgatggtcccgtccggcaaacccatagacgagcagatattgtaa

SEQ ID NO: 67522 - protein, 603 aa, Unknown
  Obtained from environmental sample
  DOMAIN (233)...(385): Thiamine pyrophosphate enzyme, central domain
  misc_feature (1)..(603): Xaa is any amino acid
MPVTPRRSAPPLPAQFLPANHKKETKMLLTGAQILIESLIEQGVDTIFGYPGGTVLNIYDELFKYSGRIRHILVSHEQHAAHAADGYARSTGKTGVCIATSGPGATNLITGIATAYMDSIPLVAITGNVPTGILGKDSFQEVDIRGISMPIVKHNWIVKHVENLAEIIREAFELASCGRQGPVLIDIPKDITALSAEWSPSKKIKGEIKDKALSARAKRLDERTTRVTFTDEEVENAAKMIREARRPLLYAGGGVISSGAEEELVSLAEKLNAPVALSLMGIGAIPKDHRLCTGLVGMHGTVASNKATQKADLLIAIGARFSDRVTSKADMFAKTAKVIHFDIDPAEVGKNIETHAWVVGNLKDTLKCLLSKLPPRLKTEWDGEIDKWKTHLPQTYTHEVTFAKNALHPRFIIEETAKQLGPETIAVTDVGQHQMWAAQFFPAEKPRSFISSGGLGTMGFGLGAACGAKVANPEKPVALFTGDGSFRMNCAEMATLSNNKIPLLIILFNNGVLGMVRQWQSFFYEGRYSQTTLGAYPDFIKLCDAYGIKGFRAGNRESFRKALHAAAEELSAGRAALIEADIDRDENVLPMVPSGKPIDEQIL

SEQ ID NO: 67523 - DNA, 1818 bp, Unknown
  Obtained from environmental sample
  misc_feature (1)..(1818): n is a, c, g, or t
atgttgaatctaaacagcaaaatccgcgaagtccgcgctcaccctttgggacgggacattgttgacaaattgctcctggaattgggaaaacccgtatggctcgttaacaatcccattgtgggcggtcttaccatcggcgcgataaaaaaaattctgcccaggcagacaggcccaggcttcattaacacattgcttgaccttttgaacagtgaacctgatacgcccgacaacaatcccgtaacatcaaagcccgcgtggtggaaagaggctgtattctaccagatttacccgcgcagtttcgggaataacggcacatccggcgtcctgcgcggggtactgtcaaagctggactatcttcgcgcccttggcgttgacgcgatatggttaagcccggtgtacgattcccccaatgacgacaacggttacgacattcgcgactattataaaattcagcctgagtatgggacaatggacgatatggacgcgctcatcgccggcctgcatgaacgcggcatgaagctggtcatggatcttgtcgtcaaccatacttcggatgaacacccctggtttcaggaagcgttaaacgatgaaaactcgccgtaccgcgatttctattatttccgtaaatcggacggcaaaccgcccaataactgggtttcttttttcagcggttccgcgtggaactactatccgaagcaggatatctgggcgctccatcttttctccaaaaagcaaatggacttaaactgggaatgtcntgcgttacgcgaagagatttacaaaatggtgcgctggtggctggccaaaggcgtcgacggcttcaggcttgacgttatcaattatatttccaaaacccccggccttaaaaacggcgatccgtttatcggctcgctgctgacatatacgggcattgaacattatttttacgggcccaaacttcacgaatacctgaaagagctccgcgccaaagcgtttgacccctacaacgcgttttccgtcggggaaacgcccggcatcggcgtaaggacggggcgtcttttaacggacgattaccggcatgagcttgatttgatttttatttttgatcatctggtatcgccgggccatacccgttttgacaaccaccgttacagcaaatcgtacttaaaacgtttttatcagacgcacctgaacgccgatctggggcacggctggaacacgctgtttttcaacaaccacgacaacccgcgcatggcgtcaaagattgatcctgagggcaagtacaccgcgccgctgacgaaacttctcgccgtattacagttaacgctccgcggcacgcctttcctgtatcagggtgatgaagccgcagtttgcaatgtaaagttcgcctcaattgacgaaattaccgacgtcgaaagcaggggcctttacgccgagctgataaaaaccatgccgcccgacaaggcgttcaaacaaatactggcgggaacccgcgatcacgcgcgcgcgcccatagactgggaggaacacgagcgccagcgcaacacggaggattcggtatggcgtttttacagggaccttatcattctgcgccgttcatcgcgggcgcttatttacggagagctggaatttcagcgcccgcatgacaaaaagatattatgttatacccgctgtttggggaacgaatgtttttacattgaagcaaacctcagccatgacaagggcagatgtaaagcgaaacctgacatggttctgctgttcggcaactacggcaagaccgcgagcaaagtcctgcgcccttatgaggcgcgtgtgtacaaaatagcaattagcaattag

SEQ ID NO: 67524 - protein, 605 aa, Unknown
  Obtained from environmental sample
  DOMAIN (94)...(495): Alpha amylase, catalytic domain
  misc_feature (1)..(605): Xaa is any amino acid
MLNLNSKIREVRAHPLGRDIVDKLLLELGKPVWLVNNPIVGGLTIGAIKKILPRQTGPGFINTLLDLLNSEPDTPDNNPVTSKPAWWKEAVFYQIYPRSFGNNGTSGVLRGVLSKLDYLRALGVDAIWLSPVYDSPNDDNGYDIRDYYKIQPEYGTMDDMDALIAGLHERGMKLVMDLVVNHTSDEHPWFQEALNDENSPYRDFYYFRKSDGKPPNNWVSFFSGSAWNYYPKQDIWALHLFSKKQMDLNWECXALREEIYKMVRWWLAKGVDGFRLDVINYISKTPGLKNGDPFIGSLLTYTGIEHYFYGPKLHEYLKELRAKAFDPYNAFSVGETPGIGVRTGRLLTDDYRHELDLIFIFDHLVSPGHTRFDNHRYSKSYLKRFYQTHLNADLGHGWNTLFFNNHDNPRMASKIDPEGKYTAPLTKLLAVLQLTLRGTPFLYQGDEAAVCNVKFASIDEITDVESRGLYAELIKTMPPDKAFKQILAGTRDHARAPIDWEEHERQRNTEDSVWRFYRDLIILRRSSRALIYGELEFQRPHDKKILCYTRCLGNECFYIEANLSHDKGRCKAKPDMVLLFGNYGKTASKVLRPYEARVYKIAISN

SEQ ID NO: 67525 - DNA, 3519 bp, Unknown
  Obtained from environmental sample
  misc_feature (1)..(3519): n is a, c, g, or t
ttgacaataggcggcgatttgcccacgctcaaaccgaatacgcaaatccccgctcccacgcttccggcggcgtactctgcgcccggcacagcggaaaatcccttcctcgttaccaacgaagccgatctccgcaaggtcggaaagggcgatgacggctggacgctttcggcgcactacaggcagacggcgaacatcacgctgaccagcaccttcacgaagattggcaatgacactaacaaattcacaggctcatataacggggacgggcataccattaaaggattgagcatgactcccgcttccagtcactcgggtttattcagttatatcggcgcaagcggcacggtgaaaaacatggacgttaccggcacgataacccaaaccggaagcggtcttgtcagtacgggcggcattgcgggcgataatgaaggcactattgacaactgcgtctttaggggaagcgtcaacaccggctcaagcagtgatcaagtcggcggcattgtcggacagaataacggcacggtgataaacagcagaagttatacgacagtagccggcaaaaatcaggtcggcggcattgcgggaacgaatcagggaaagatcgagaactgttacaacagcgattccgacggcgcttccaccaatagaaccgttaccggaagccagcaagtcggcggtatcgccggtactaatgtcggcagcggaaattatataaagaactcctataacacggcaaatgttaccagcaacgcaagcgcctctaatgtcggcggcattgtcgggtttaaccaagcaaacacaacgttagaatactgctacaataccggcattgttaccggctccagtgcggtcggcggtattgtgggtaacgtcgccgccggaagtaccgtgcggtactgcgtatcactcggcgaaagggtaaccggcagcggaactaatatcggtcgcatagcagggatttacaatgccacgctcaccggcaacgtagcccgtgaactgatgagaatcggcgcaagcggctcggagtcggtggtaacaggagcgacaactcaaggcaacggcttagacgtcagtttgggcgtgggacaacaaggctctgttttctccggttggaattattctaccatttggaatatcagcggtaatttggttgtgggcggcgatttgcccacgctcaaagataatccgcaaagccccgctcccactctgccgggatcgaacccggcgttaggcacggcggctaatcccttccttgttaccaacgaagccgatctccgcaaagtcggaaccggcactgacggctggacgctttcggcgcactacaaacagacacagaacatcaccatgacgacaagcaactttccgccaattggctacgtctccggtactggaaccactaaattctcaggcgtgtatgacggggacggaaaaaccatcaccggattgaacataaccggcacggctaattatttaggtttattcggctctatcgacgcaatcggcacggtaaaaaacatgaacgttaccggcacgataactcaaaacggggatacgtcgtataccggcggcattgccggtacaaactttggcacgattgaaaactgctcctttagcggaaccgttaccgcatcagcctgcgatatggtcggcggcattgtcggacagaataacggcacggtgataaacagcagaaacagcgcaacggtaagcggcaaaagtcaggtcggcggcattaccggaaggaatgagggcaaaatcgaaaacagttacaacacgggaaccgtcagcggaagccggtacatcgccggtatcgccggagttaataccaacaccggtatgtatataaagaactcctataacacgggcaatattaccgctaccccaattatcacaaccgaaagctccatggcaggaggcattgccgggcttaaccaatcaggcgcaacggtagaatactgctacaataccggcaacgttaccgcttcaactaacaacgtaggcggcatagtgggaagcaactccggaagcaccgtgcgatactgcgtatcactcggcgcaagggtaaccggcggaaacaatacctgccgtgtagtgggagttatgtcgggaacaacaactctcaccaacaacaaagcccgtgcggatatgaaagtcggcgtaagcggatcggaggcaataccaactacaaatataggagcaaatgaaagagagggcgagagtgtcagtttgggtgcggcacagaattctgttttcagcagtttctttactaccacaatttggactttaggcagtactttgacagtaggcggcaatttgcccatactccagatgaacacgcaaagccccgctcccacgcttccggcaacgtacactgcgcccggcacggcggctaatcccttcctcgttactaacgaagccgatctccgcaaggtcggcaaagaagacacccccggaggctggacgctttcggcgcactacaaacagacggcggacatcaccataacgggcggcagctttacgccgattggcacaaacgtcaacaagttcaccggcacgtatgacgggggcggatataccatcaccggctttgacatgaccctcgctggcaactatttagccttattcggcaatatcgacacaggcggcacggtgaaaaatattacccttaccggcacgataaccggaaacacaacagcattggcgtatatcggcggcattgccggacataataacggcagaatcgaaaactgctcctttagcggaaccataaacggcggcacaaccaacgatgatgtcggcggcattgtgggacagaataacggcacggtgataaacagcagaagcaacgcagcggtaagcggcaggacccggatcggcggcattgccggactgaataccggcaagattgataacagttacaacacaggagccattaccggtagtcaacaagtcggcggtatcgccgggggtaattcctccagcagcgcttatataaagaactgctctaacacgggcaatgttaccagtaccactgcttcttccaccgctaatgtcggcggcattgttgggcaatcaagcgcaacggtagaatactgctacaataccggcaatgtttccggtacaggtaatgtcggcggcatagtgggaaacaacaccggaagcaccgtgcaatactgcgtatcgctcggcgcgaaggtaaccggcactggtggaggcgcttcttctatcaatcgtgtgtctggaagtaatgccggctctctcgccaacaacaaagcccgtgcggatttgaaaatcggcgtaaccggatcagaggcggcattaccaacttcaagcggaacagcaaccaacggaaacggcttaaatatcactgtgggtagttcaacgacacagtcctctgttttcagcggctttgataccacggtcacaggttggactatcagcggcaatttgacagcgggcagtgatttgcccacgctcaagacaaacacgcaaagccccgcgcccactcggccgatctga

SEQ ID NO: 67526 - protein, 1172 aa, Unknown
  Obtained from environmental sample
  DOMAIN (1014)...(1039): The GLUG motif
  misc_feature (1)..(1172): Xaa is any amino acid
MTIGGDLPTLKPNTQIPAPTLPAAYSAPGTAENPFLVTNEADLRKVGKGDDGWTLSAHYRQTANITLTSTFTKIGNDTNKFTGSYNGDGHTIKGLSMTPASSHSGLFSYIGASGTVKNMDVTGTITQTGSGLVSTGGIAGDNEGTIDNCVFRGSVNTGSSSDQVGGIVGQNNGTVINSRSYTTVAGKNQVGGIAGTNQGKIENCYNSDSDGASTNRTVTGSQQVGGIAGTNVGSGNYIKNSYNTANVTSNASASNVGGIVGFNQANTTLEYCYNTGIVTGSSAVGGIVGNVAAGSTVRYCVSLGERVTGSGTNIGRIAGIYNATLTGNVARELMRIGASGSESVVTGATTQGNGLDVSLGVGQQGSVFSGWNYSTIWNISGNLVVGGDLPTLKDNPQSPAPTLPGSNPALGTAANPFLVTNEADLRKVGTGTDGWTLSAHYKQTQNITMTTSNFPPIGYVSGTGTTKFSGVYDGDGKTITGLNITGTANYLGLFGSIDAIGTVKNMNVTGTITQNGDTSYTGGIAGTNFGTIENCSFSGTVTASACDMVGGIVGQNNGTVINSRNSATVSGKSQVGGITGRNEGKIENSYNTGTVSGSRYIAGIAGVNTNTGMYIKNSYNTGNITATPIITTESSMAGGIAGLNQSGATVEYCYNTGNVTASTNNVGGIVGSNSGSTVRYCVSLGARVTGGNNTCRVVGVMSGTTTLTNNKARADMKVGVSGSEAIPTTNIGANEREGESVSLGAAQNSVFSSFFTTTIWTLGSTLTVGGNLPILQMNTQSPAPTLPATYTAPGTAANPFLVTNEADLRKVGKEDTPGGWTLSAHYKQTADITITGGSFTPIGTNVNKFTGTYDGGGYTITGFDMTLAGNYLALFGNIDTGGTVKNITLTGTITGNTTALAYIGGIAGHNNGRIENCSFSGTINGGTTNDDVGGIVGQNNGTVINSRSNAAVSGRTRIGGIAGLNTGKIDNSYNTGAITGSQQVGGIAGGNSSSSAYIKNCSNTGNVTSTTASSTANVGGIVGQSSATVEYCYNTGNVSGTGNVGGIVGNNTGSTVQYCVSLGAKVTGTGGGASSINRVSGSNAGSLANNKARADLKIGVTGSEAALPTSSGTATNGNGLNITVGSSTTQSSVFSGFDTTVTGWTISGNLTAGSDLPTLKTNTQSPAPTRPI

SEQ ID NO: 67527 - DNA, 411 bp, Unknown
  Obtained from environmental sample
  misc_feature (1)..(411): n is a, c, g, or t
gtgatacattcgcgccgcgcgatgcacaagatctttgcccatgccccggccttaaaaaaatgcagggcgcttgtgttccattcatggtcaggcacacaaggggagggcgaggcactgctcaaccggggcattaacgcctttttttcatttggcgcggcgataacgcttaaccacagggaaatgatgcgctgctgcgccgctttcccggcggaacgcctgctcaccgagaccgacgccccgttccagcctccccgcggcagggagttctcccgttatgcggatataagcgccgtacttgcggctatggaagccctgcgcgccggcagcggcgccgttagcggcggcgccgtcaacggcgggactaaaatggaaaaaatcattgaaacaaattttcgcgctgcgttctgttaa

SEQ ID NO: 67528 - protein, 136 aa, Unknown
  Obtained from environmental sample
  misc_feature (1)..(136): Xaa is any amino acid
MIHSRRAMHKIFAHAPALKKCRALVFHSWSGTQGEGEALLNRGINAFFSFGAAITLNHREMMRCCAAFPAERLLTETDAPFQPPRGREFSRYADISAVLAAMEALRAGSGAVSGGAVNGGTKMEKIIETNFRAAFC

SEQ ID NO: 67529 - DNA, 315 bp, Unknown
  Obtained from environmental sample
  misc_feature (1)..(315): n is a, c, g, or t
ttgtcgggcggtcagcagcagagggtcgccatagcgcgcgcgatggtaaacgatcccgcctttatcctcgccgacgagccaaccggcaaccttgataccggaatgagtcttgaaataatgggcctttttcagcaattaaacgacaagggaaagacaataatcatggtaacccacgaacccgaactcgcggtttttacaaaacgcatcatcaccctgcgcgacggagaacttgtttccgacaaacccgttaaagaaagacgcgacgcgtatgaagatttagccaaatggaacaaagatcacgcgcttttgtcataa

SEQ ID NO: 67530 - protein, 104 aa, Unknown
  Obtained from environmental sample
  DOMAIN (1)...(75): ABC transporter
  misc_feature (1)..(104): Xaa is any amino acid
MSGGQQQRVAIARAMVNDPAFILADEPTGNLDTGMSLEIMGLFQQLNDKGKTIIMVTHEPELAVFTKRIITLRDGELVSDKPVKERRDAYEDLAKWNKDHALLS

SEQ ID NO: 67531 - DNA, 852 bp, Unknown
  Obtained from environmental sample
  misc_feature (1)..(852): n is a, c, g, or t
atggaaaaactcaggatattgattccgaagggaagaatttttgacaatgtaagccgtcttttttctgaggcggggtttcccattgctttgagcgaccgcacctaccgtcccgcgctgggagtggattggcttgacgccaaaattatgaagccccaaaacgtgggggaacttctggaattgggaagccatgacgcgggttttaccggaatcgactggataaaggaaagcggcgcggacgtgcaagacgttcttgaccttggatttgacaaagtccgcattgtcgcggcggtacctcaggactatgacgaggcaaaactgcgttccaaaaaacttgtagtcgccaccgaatatgtaaatctggcggaagcgtggcttaaatcttccggttatcaataccaaatcctgcgcacttacggcgcgaccgaagttttcccgccggatgacgccgatatgattattgataacacttcttcgggacagacgctgaaagacaacggccttaaaattatcgctacattgcttgaatcttccacgcgctttgtagcttctaaaaccgcccttgccaataaggagaaaaaaagccgcatagaggagcttgacatgcttttccgcgccgttcttgacggccgtgatcgcgtaatgcttgaaatgaatatccccaaagagcagtttgagtctttgtcgagcctgcctgccatgcgaagcccgacggttgcgtctcttttcggggacgccggttacgccgtaaaaatcgccgtaaaaaaacatgaagtgccggatattattccaaaactgaagaaactcggcgcgctggatattgtggagtatgatctacggaaagtggtgctgtaa

SEQ ID NO: 67532 - protein, 283 aa, Unknown
  Obtained from environmental sample
  DOMAIN (208)...(281): HisG, C-terminal domain
  misc_feature (1)..(283): Xaa is any amino acid
MEKLRILIPKGRIFDNVSRLFSEAGFPIALSDRTYRPALGVDWLDAKIMKPQNVGELLELGSHDAGFTGIDWIKESGADVQDVLDLGFDKVRIVAAVPQDYDEAKLRSKKLVVATEYVNLAEAWLKSSGYQYQILRTYGATEVFPPDDADMIIDNTSSGQTLKDNGLKIIATLLESSTRFVASKTALANKEKKSRIEELDMLFRAVLDGRDRVMLEMNIPKEQFESLSSLPAMRSPTVASLFGDAGYAVKIAVKKHEVPDIIPKLKKLGALDIVEYDLRKVVL

SEQ ID NO: 67533 - DNA, 591 bp, Unknown
  Obtained from environmental sample
  misc_feature (1)..(591): n is a, c, g, or t
ttgaatattgacggcaggggggacgcgaaactggattatccggtaggatttatgtcccacatgcttgatacgtttgcgcgtcacgggttgtttgacattgaagtaagcgcgaaaggggatattgaggttgatcagcatcaccttgttgaagatacggggattgtgctggggcagtgtttcgcaaaggcgttaggtgaaaagagaggcataaggcgcagcggagactgtcttttccctatggatgagactcttgcccgcgccgccgtggatatgtcgggccgcccttttttgttttttgacggacaacttcctgattctcacataatttcgataaacaaagacgggaaagaatataagtttcaaacaggtttaacggaagatttttggcagggtttcacaaactcggcaggctgtaatcttcaccttgagattttacgcggcagaagcgatcatcacaagattgaagccatgttcaaagccgccgcccgcgccattcgcgccgcctgcgaaatagacggacgcgctaaagattctattccctcaaccaagggcgttcttcccggttttgacgcgccgagtgtccttgtatga

SEQ ID NO: 67534 - protein, 196 aa, Unknown
  Obtained from environmental sample
  DOMAIN (15)...(166): Imidazoleglycerol-phosphate dehydratase
  misc_feature (1)..(196): Xaa is any amino acid
MNIDGRGDAKLDYPVGFMSHMLDTFARHGLFDIEVSAKGDIEVDQHHLVEDTGIVLGQCFAKALGEKRGIRRSGDCLFPMDETLARAAVDMSGRPFLFFDGQLPDSHIISINKDGKEYKFQTGLTEDFWQGFTNSAGCNLHLEILRGRSDHHKIEAMFKAAARAIRAACEIDGRAKDSIPSTKGVLPGFDAPSVLV

SEQ ID NO: 67535 - DNA, 609 bp, Unknown
  Obtained from environmental sample
  misc_feature (1)..(609): n is a, c, g, or t
atgataggcgtaattgattacggcgcgggaaatctcggctctgttatgaacgcgttaaagcggctttccgttccggcgcgatttgccgaaggaccgcaggagctttcgctctcatctacgccgtttgaaaaaataattttccccggggacggccatttcgctaccgcaatggagtcgattaacaagtcaggttacgcgcaggcgataaaggaatggataaaagcggacaagccctttttgggaatctgtataggcttacagttgttgtttgaaacttccgaagaagcgccgaatacgcaggggctttctgttattcacggaacagtgcgccgctttcccggacgcaaggttccgcagattggctggaatcaaactaccgcgaagaccggttcattattgtttcgtaatataaatgaaaacagttttttttattatatacattcatactacgccgatcccgcggacgattcggtaaacgccgcgcagacggagtactatgtccgctactgctgcgccgttgaacgcggagccttagccgcggtgcagtttcatcctgaaaaatccggcgcggcgggtattgccctcttaaaaaactgggtggagggttaa

SEQ ID NO: 67536 - protein, 202 aa, Unknown
  Obtained from environmental sample
  DOMAIN (40)...(155): CobB/CobQ-like glutamine amidotransferase domain
  misc_feature (1)..(202): Xaa is any amino acid
MIGVIDYGAGNLGSVMNALKRLSVPARFAEGPQELSLSSTPFEKIIFPGDGHFATAMESINKSGYAQAIKEWIKADKPFLGICIGLQLLFETSEEAPNTQGLSVIHGTVRRFPGRKVPQIGWNQTTAKTGSLLFRNINENSFFYYIHSYYADPADDSVNAAQTEYYVRYCCAVERGALAAVQFHPEKSGAAGIALLKNWVEG

SEQ ID NO: 67537 - DNA, 807 bp, Unknown
  Obtained from environmental sample
  misc_feature (1)..(807): n is a, c, g, or t
atgcaggcaaaacgaatcattccatgccttgatgttgacgacggaagggtagtgaagggaattaaattcaagggcatacaggacgccggagacccaagagagctcgcgcgccgctacaacgacgacggcgccgatgaactcactttccttgacataggcgcgtcatacaaaagccgcgcgacactgcttgacgtggtgcggacagttgccgccgaagtttttatccccttatgcgtaggcggcggcatacgcgtcatcgacgacatgcgcgacgcgatgaacgccggcgcggataaagtttccgtctgcacttccgccttaagccgccctgaactgttacgcgaaatggcgaacgcctacggaagccagtgtgtcgtgctctcgatagacgcaaaacgcgttgagggcggcgaggagttgcgctggcacgcctattcacacggcggcagaaccgacacgggaattgacgcgattgaatgggcgattagggcggtagaactcggcgcgggagaaattttactcaattccattgacgcggacggaaccggcggcggttacgatcttgagcttaaccgtcgaatactgaacgccgtacctgttccggtaatagcctcgggcggcgcgggaacccttgaacagatagctgatgttttgctcagtaccgccagtccggagatggcctcagatagtgctgaagctcccggcgccgatgccgctctgctcgcgtcgcttttgcactttggcattactacaatcaaggatataaaaaagaccgcggaggcaaaaggcgtctgcgtcaggtggtag

SEQ ID NO: 67538 - protein, 268 aa, Unknown
  Obtained from environmental sample
  DOMAIN (5)...(251): Histidine biosynthesis protein
  misc_feature (1)..(268): Xaa is any amino acid
MQAKRIIPCLDVDDGRVVKGIKFKGIQDAGDPRELARRYNDDGADELTFLDIGASYKSRATLLDVVRTVAAEVFIPLCVGGGIRVIDDMRDAMNAGADKVSVCTSALSRPELLREMANAYGSQCVVLSIDAKRVEGGEELRWHAYSHGGRTDTGIDAIEWAIRAVELGAGEILLNSIDADGTGGGYDLELNRRILNAVPVPVIASGGAGTLEQIADVLLSTASPEMASDSAEAPGADAALLASLLHFGITTIKDIKKTAEAKGVCVRW

SEQ ID NO: 67539 - DNA, 513 bp, Unknown
  Obtained from environmental sample
  misc_feature (1)..(513): n is a, c, g, or t
gtggtctcttcgcaaaacaggcagacgcttgagaatctgtcagaccagcagaaacagggaaagttcataaaagagtacagcgcgatttgccaaaaacacgaacctcagccggatgccgcgctatttgatgtttccgccgctcccccgctgataattcaaagctatttccggccatacggcccgggcagaaaacgggtacgccctgttacaaaagaaaaaatgaaaggaaaagaaatcgccaaagacggcggaacatattacaaaacagaaattaccaacgttgaaaaaaaacaaattgacaaccgcgaagaactatatcatttcaccgtaagtctcaaacgcgggttcaggcatcaaatacgctgccaccttgcgtgggttggttttcctgtgttaaacgatccattatacgggaaaggagacggggacggtttccttgagctgcgggcaacggggctttttttcaacgatccaaaaagcaacgagtcggttcaatttcgcattgaaccatga

SEQ ID NO: 67540 - protein, 170 aa, Unknown
  Obtained from environmental sample
  misc_feature (1)..(170): Xaa is any amino acid
MVSSQNRQTLENLSDQQKQGKFIKEYSAICQKHEPQPDAALFDVSAAPPLIIQSYFRPYGPGRKRVRPVTKEKMKGKEIAKDGGTYYKTEITNVEKKQIDNREELYHFTVSLKRGFRHQIRCHLAWVGFPVLNDPLYGKGDGDGFLELRATGLFFNDPKSNESVQFRIEP

SEQ ID NO: 67541 - DNA, 1125 bp, Unknown
  Obtained from environmental sample
  misc_feature (1)..(1125): n is a, c, g, or t
atggcggctttaacaataccggctcaagccggaaaggttcatgatttattggcactgggggcgctggtaacccgtcttgatccgggtattattccctttgcgcaggctgacgactaccgtctccatgtatcgggtggagaatacaatgtcgcgtcaaacctttccacctgcttcggacagcggacagctattgccactgcaatcgtagactaccccattggccgcaaggttgagctttcggtacagagggcgggggtaacgccttactaccaacgctttaaacacgacggagtgcgcggtccgaatatggccattgtgtggagtgatcgcgggcagggtgtacgcgcccccgtggttttctataaccgatccaatgaggcggcgcagcaattaaagccgggcagctttgactggaacgcgattttcggctctcccggctctccaagaattcgctggttccattcgggcgggattttcagcgccctttcgcctaccacgtcggagttggtaattgaagcgatgcaggcggccaaaaaagccggagcggttgtgtcttttgatttaaactaccgcgcaaaactgtgggcggtcgctgccgccgaacagggtaagagcgcggatcaggcaagcgcggaagcggcaaaaaccctgcgaaaaattacaagttatgttgacatactggttggcaacgaggaagatctgcaaaagggcctgggcttgaaagggcaggatgtcgaagctaaaggcaagcttgatccaagcgctttctttggcatgatggaaagcgtggtaaaggatttccccaatatcaaggcagtggcgaccactctgcgcgaggtacattcaaccaaccgccattcgtggagcgccgtgctgtggctggacggcaaaagctatcaggcgcctaccgccgagcttgacgtgtatgaccgcgtcggcggcggcgacggctttgcttccggcctgttctacggcctgttaaacgataaaagcccggaagaatcccttaaactcggctgggcgcacggcgcgcttcttactaccacgcccggcgatacttcgatggtcagtctggatcaggttgaagcatttgccaaaggcgggtcagcaaggattcagcgatag

SEQ ID NO: 67542 - protein, 374 aa, Unknown
  Obtained from environmental sample
  DOMAIN (13)...(359): pfkB family carbohydrate kinase
  misc_feature (1)..(374): Xaa is any amino acid
MAALTIPAQAGKVHDLLALGALVTRLDPGIIPFAQADDYRLHVSGGEYNVASNLSTCFGQRTAIATAIVDYPIGRKVELSVQRAGVTPYYQRFKHDGVRGPNMAIVWSDRGQGVRAPVVFYNRSNEAAQQLKPGSFDWNAIFGSPGSPRIRWFHSGGIFSALSPTTSELVIEAMQAAKKAGAVVSFDLNYRAKLWAVAAAEQGKSADQASAEAAKTLRKITSYVDILVGNEEDLQKGLGLKGQDVEAKGKLDPSAFFGMMESVVKDFPNIKAVATTLREVHSTNRHSWSAVLWLDGKSYQAPTAELDVYDRVGGGDGFASGLFYGLLNDKSPEESLKLGWAHGALLTTTPGDTSMVSLDQVEAFAKGGSARIQR

SEQ ID NO: 67543 - DNA, 723 bp, Unknown
  Obtained from environmental sample
  misc_feature (1)..(723): n is a, c, g, or t
atgacggaaatggtaaggatagaaggcggaaccttcacgatgggcagccccgcgaacgagccggagcgctgtgataacgaaggcccgcagcatcaggtaagggtgagcggcttttacatggggaagtacccggtaacgcagaaggaatggcaggaagtggtgggggcgaaccccagctatttcaaaggggatgacctgccggtagaaaaggtaagctggtttaaggcggtgcagtactgcaacaaactaagccgcaaagaagggctggtgcctgcttatggcataagctgctgcgggaacagccggacaataagctggaaccgtgaagcgaacggctaccgcctgcccaccgaggcggaatgggaatacgcctgccgggctggggctgccactgcgtacaacaccggggcggccataagcgatgatacgggctggtatagcgcgaatagcggcaataagacccatccggcagggcaaaagcccgccaatacgtggggtctgtatgacatgcacggtaatgtgttggaatggtgctgggactggtacggaagctatgcaaacagtgcacaaaccgatcccgtgggtgcattatcgggggttgatcgcatgatacgcggcgggagttggggcaacctcgctcagttcttgcgttctgcgtaccgggtacactacactccgtccagccggtactacttccttggtttccgcctcgcacgttcctga

SEQ ID NO: 67544 - protein, 240 aa, Unknown
  Obtained from environmental sample
  DOMAIN (1)...(239): Domain of unknown function (DUF323)
  misc_feature (1)..(240): Xaa is any amino acid
MTEMVRIEGGTFTMGSPANEPERCDNEGPQHQVRVSGFYMGKYPVTQKEWQEVVGANPSYFKGDDLPVEKVSWFKAVQYCNKLSRKEGLVPAYGISCCGNSRTISWNREANGYRLPTEAEWEYACRAGAATAYNTGAAISDDTGWYSANSGNKTHPAGQKPANTWGLYDMHGNVLEWCWDWYGSYANSAQTDPVGALSGVDRMIRGGSWGNLAQFLRSAYRVHYTPSSRYYFLGFRLARS

SEQ ID NO: 67545 - DNA, 855 bp, Unknown
  Obtained from environmental sample
  misc_feature (1)..(855): n is a, c, g, or t
atgaagaaagataaaagtaagattgttattagtaagatgattatttttctcttttattttttcttttgtttcggtgtttatgcccagcggaattcaattcccgataacatggtgtggatacagggcgggacttttacaatgggcagtacgaacagcgagcctggacataatgagaacgcggagcctcagcggcaggtaacggtgagcagtttttacattgggaagtatgaggtaacgcaaaaagagtatcaggaaataacgggaaggaacccaagctggttcagggggaataatcttcctgtagaacaggtaagctggtatgacgtaatagagtactgcaataagaggagccagaaagagggcttaagtccggcatacacgatagataaaaacaggatagatcctaataatactgacggatttgacaatttaaaatggacagtaacatggaaccgggatgccaatggttaccgtcttccgaccgaggcggaatgggaatacgcatgccgtgccggggctgccactgcgtacaacaccggggcggccataagcgatgatacgggctggtatagcgcgaatagcggcaataagacccatccggcagggcaaaagcccgccaatacgtggggtctgtatgacatgcacggtaatgtgttggaatggtgctgggactggtacggaagctatgcaagcggtacgcaaaccgatcccgtgggtgcattatcgggggttgatcgcatgatacgtggcgggagttggggcaacctcgctcagttcttgcgttccgcgtaccgggtacactacactccgtccagccggtactacttccttggtttccgcctcgcacgttcctga

SEQ ID NO: 67546 - protein, 284 aa, Unknown
  Obtained from environmental sample
  DOMAIN (33)...(283): Domain of unknown function (DUF323)
  misc_feature (1)..(284): Xaa is any amino acid
MKKDKSKIVISKMIIFLFYFFFCFGVYAQRNSIPDNMVWIQGGTFTMGSTNSEPGHNENAEPQRQVTVSSFYIGKYEVTQKEYQEITGRNPSWFRGNNLPVEQVSWYDVIEYCNKRSQKEGLSPAYTIDKNRIDPNNTDGFDNLKWTVTWNRDANGYRLPTEAEWEYACRAGAATAYNTGAAISDDTGWYSANSGNKTHPAGQKPANTWGLYDMHGNVLEWCWDWYGSYASGTQTDPVGALSGVDRMIRGGSWGNLAQFLRSAYRVHYTPSSRYYFLGFRLARS

SEQ ID NO: 67547 - DNA, 810 bp, Unknown
  Obtained from environmental sample
  misc_feature (1)..(810): n is a, c, g, or t
gtgatctttcgtcgctggtggacaatccgcgggcaaaagaagaatgaagagggaagagagaaaaaaggaagagggataatgagcgttgcggaactgtacaaattgattcgcggggctaagcacctcgtggcgtttacgggcgcgggggtcagcacgctttcgggcataaaggattttcgcggcaagaacgggatcgccaacggggaaacaatttttaacattgatgtttttgaagaagatccttcggtgtactatgacaacgcccgttcgttcatctataaccttaatgagagagaaccgtccatagtgcatattgttctgggggaacttgaaaaaagaggcgtcctgaaagcggtaataacccagaacatcgatcttttgcatcagaagggcggaagctccaatgtgatagaagttcacggttcgcccaaggttcattactgccttcactgtcccgggattcgcatgagctttgaggaagcctccgccattgtgcgtgcaggcaatatgccgcaatgcccgaagtgcggcagggtgttaaagccggctatcaccttttacggcgaaagccttccgatagaggcgttgaaggaagcgacagtccaggcgcataaagccgaccttatgcttgtgcttgggaccacccttgtcgtttaccccgccgcctcaatgcccgaatacacattgcgatcgggcggccgcatagttattgtaaacaacatgcccacccctctggacaggcaggctgcaatgcattttgacgaactgggtccggtgtttgaggaactgcaaaaaataatgaacaaatga

SEQ ID NO: 67548 - protein, 269 aa, Unknown
  Obtained from environmental sample
  DOMAIN (47)...(220): Sir2 family
  misc_feature (1)..(269): Xaa is any amino acid
MIFRRWWTIRGQKKNEEGREKKGRGIMSVAELYKLIRGAKHLVAFTGAGVSTLSGIKDFRGKNGIANGETIFNIDVFEEDPSVYYDNARSFIYNLNEREPSIVHIVLGELEKRGVLKAVITQNIDLLHQKGGSSNVIEVHGSPKVHYCLHCPGIRMSFEEASAIVRAGNMPQCPKCGRVLKPAITFYGESLPIEALKEATVQAHKADLMLVLGTTLVVYPAASMPEYTLRSGGRIVIVNNMPTPLDRQAAMHFDELGPVFEELQKIMNK

SEQ ID NO: 67549 - DNA, 1083 bp, Unknown
  Obtained from environmental sample
  misc_feature (1)..(1083): n is a, c, g, or t
gtgatggggcagaagcccttcctcgtactggagcttgattcccattcggcagacgcgggcgtggacacgagggttgaggccttcctcgacattattgacggttaccgcgccaagaaaaacgagcttgaggctgatcgatatgacaacggctggcgcttcattaccgagaagaaagccaatgggaacttcgatctgcgcatagacaatataaagacaggtgagaaggttcctattgtagggaacaagcgggtgaagctgcttctttccaacatgggagccatatctaccgagtacgtgggcgcggccgtccgcagccagggcataaacggggaagctctgcctgtggccaccgctaaaacgatacagattgcccgcgcccacgcgtcgggtaaggagtgcgtccccagccatctggttttgggcagcgccctggaatttttcttcagcgaaaaataccgcaaggacgaactgtacctgctctttgtccccataacaaccggcccatgccgcacgggccaatactacgtgttttacgaaaatttattccgcgatttaaggcttgagaacgtcgtcgttttcatactttccgcggacaattcctacaccgagcttggaggcggattcgccaaagaaatgtggaggggacttgtgctttccgattacctcaaggacatacagtgcgccctcaaggcctgcgccgttgatccgaaaaaagcgcagttggaatttgaacattcgtggcgcagggtaatgcacgcggtggagcataatcccaaatacctgtggaaggaactgaaaaatgtcgcaaatgacgttagaaagattccgctaaagcgaaaagtcgttgactgtccccgcgtgcttgtcgtgggtgaaatctacgtccgccgcgacgattttgccgtgggtgagctgaccgacctgatgagcgagcggggcattgtggtaaaggttgccggcatttccgagtggatacactacctggactttgtgcgggaatacgccctcaagaaattgatcaggctgagaaagccgggcaacaggncttttttccaaaccctggaaagatctaaaaaaacttga

SEQ ID NO: 67550 - protein, 360 aa, Unknown
  Obtained from environmental sample
  misc_feature (1)..(360): Xaa is any amino acid
MMGQKPFLVLELDSHSADAGVDTRVEAFLDIIDGYRAKKNELEADRYDNGWRFITEKKANGNFDLRIDNIKTGEKVPIVGNKRVKLLLSNMGAISTEYVGAAVRSQGINGEALPVATAKTIQIARAHASGKECVPSHLVLGSALEFFFSEKYRKDELYLLFVPITTGPCRTGQYYVFYENLFRDLRLENVVVFILSADNSYTELGGGFAKEMWRGLVLSDYLKDIQCALKACAVDPKKAQLEFEHSWRRVMHAVEHNPKYLWKELKNVANDVRKIPLKRKVVDCPRVLVVGEIYVRRDDFAVGELTDLMSERGIVVKVAGISEWIHYLDFVREYALKKLIRLRKPGNRXFFQTLERSKKT

SEQ ID NO: 67551 - DNA, 807 bp, Unknown
  Obtained from environmental sample
  misc_feature (1)..(807): n is a, c, g, or t
gtgatcggtatcccccgcgcgttttccgtgcatacgctgtatcccctgtacagttggttttttcatgaattgggcatcaagactttcctctcgaccgaagttgcccacgccggtgttgcccgcgcggaatcgacgtactgttttccggcggagatcgcccacggcgcggtacaggattgtctggacaaaggggccgattatgtgttcctgcctcatttccgcgatatgccgagttacgaggaaaatgtccacgcgaacttttgtcccataacgcagagtttgccgtattatatcgaaaaggcgttccctgacattgacaagaaacgttggctgccgctggtggtgagttttaaattcggcgacggcaaagcgctggaactgttttgcgagatgacgaaacggctgggcattggcgaggcggagactaaagccgcctttactgttgccatgtccaaacagcaggcgtattttgacgcggtgcataagatgggtcaggaagcactggaagatgcccgcaagtccgaccgtccggttatcgccacgctggggcgtccctacaacgcctttacgccggaagcgaacatgggcattccccgcaagtttaccacgcggggttattcgatcgttccttttgatattctgcccttccacgacgaggaaatttttcccaatatgtactggtattacggtcagcaggatgtgaaggcggcaaacctcctcaaaaaagaagacaatatttatcttacatttattagcaacttttcctgcgcgccggattcgtttttctgcattacgtcaaatgggtga

SEQ ID NO: 67552 - protein, 268 aa, Unknown
  Obtained from environmental sample
  misc_feature (1)..(268): Xaa is any amino acid
MIGIPRAFSVHTLYPLYSWFFHELGIKTFLSTEVAHAGVARAESTYCFPAEIAHGAVQDCLDKGADYVFLPHFRDMPSYEENVHANFCPITQSLPYYIEKAFPDIDKKRWLPLVVSFKFGDGKALELFCEMTKRLGIGEAETKAAFTVAMSKQQAYFDAVHKMGQEALEDARKSDRPVIATLGRPYNAFTPEANMGIPRKFTTRGYSIVPFDILPFHDEEIFPNMYWYYGQQDVKAANLLKKEDNIYLTFISNFSCAPDSFFCITSNG

SEQ ID NO: 67553 - DNA, 627 bp, Unknown
  Obtained from environmental sample
  misc_feature (1)..(627): n is a, c, g, or t
gtggtcgaaggcctgtgcgagaggtgcaagacacgggtgacccgcaaacgcatacgccagtggatactgaaaattaccgcttacgcgcagcggcttcttgaagacctggagggccttgactggcctgaaccggtaaagcagatgcagagaaactggataggccgttccgaaggcgcgaacgtgattttcaaggttgagtcgtctaacctttcttttgagatatacaccacccggcccgacacccttttcggggcgacctacatggttctctccccggaacactcgctggtggaaaaactcaccacgcctgaacagaaggccgcggtgctggcgtacattgaagaagccgcgaagaagagcgatcttgagcgcaccgatctggcaaaaacaaagacaggcgtgtttaccggctcttacgcgatcaatccggtgaacggcgaaaaaatccccatatggatcgccgattatgttctcatctcctacggaaccggggccatcatggcggttccggcgcatgacgagcgcgactgggaattcgccaaggcttttaatctacctataataaaagtagtagctgaagaacaaccccagtccccagtccccagtccccagtccctcttcctataa

SEQ ID NO: 67554 - protein, 208 aa, Unknown
  Obtained from environmental sample
  misc_feature (1)..(208): Xaa is any amino acid
MVEGLCERCKTRVTRKRIRQWILKITAYAQRLLEDLEGLDWPEPVKQMQRNWIGRSEGANVIFKVESSNLSFEIYTTRPDTLFGATYMVLSPEHSLVEKLTTPEQKAAVLAYIEEAAKKSDLERTDLAKTKTGVFTGSYAINPVNGEKIPIWIADYVLISYGTGAIMAVPAHDERDWEFAKAFNLPIIKVVAEEQPQSPVPSPQSLFL

SEQ ID NO: 67555 - DNA, 690 bp, Unknown
  Obtained from environmental sample
  misc_feature (1)..(690): n is a, c, g, or t
atgcgccggaaccgccatgatggccccggttccgtaggagatgagaacataatcggcgatccatatggggattttttcgccgttcaccggattgatcgcgtaagagccggtaaacacgcctgtctttgtttttgccagatcggtgcgctcaagatcgctcttcttcgcggcttcttcaatgtacgccagcaccgcggccttctgttcaggcgtggtgagtttttccaccagcgagtgttccggggagagaaccatgtaggtcgccccgaaaagggtgtcgggccgggtggtgtatatctcaaaagaaaggttagacgactcaaccttgaaaatcacgttcgcgccttcggaacggcctatccagtttctctgcatctgctttaccggttcaggccagtcaaggccctccaggtcttcaagaagccgctgcgcgtaagcggtaattttcagtatccactggcgtatgcgtttgcgggtcacccgtgtcttgcacctctcgcacaggccttcgaccacttcttcattggcaatacctgtcttgcaggtcggacaccagttaatcgggctttcagcctcgtacgccagccctttttcaaacagcttgaggaagatccactgggtccacttgtaatagttttcatcggtggtatcaacctcccgatcccagctcggccgctcggccgattctga

SEQ ID NO: 67556 - protein, 229 aa, Unknown
  Obtained from environmental sample
  misc_feature (1)..(229): Xaa is any amino acid
MRRNRHDGPGSVGDENIIGDPYGDFFAVHRIDRVRAGKHACLCFCQIGALKIALLRGFFNVRQHRGLLFRRGEFFHQRVFRGENHVGRPEKGVGPGGVYLKRKVRRLNLENHVRAFGTAYPVSLHLLYRFRPVKALQVFKKPLRVSGNFQYPLAYAFAGHPCLAPLAQAFDHFFIGNTCLAGRTPVNRAFSLVRQPFFKQLEEDPLGPLVIVFIGGINLPIPARPLGRF

SEQ ID NO: 67557 - DNA, 312 bp, Unknown
  Obtained from environmental sample
  misc_feature (1)..(312): n is a, c, g, or t
ttgaatggctttcttattgcatttaagcaagaaaatagtaaatgttgcattattgcaaaaggcgatgtatcagacataaaaggaacaagaaaatacaataaaccatttaacaaaaatcaaataaaacaaaatattggtgttgctttattaaaatcatttcaactaaaggaaattgaggatataacaatttttattacagtaccagatgaaaataattatcgtgaaatatttgaaacaataaaaaatagtctattaaaagtaaatattaaatttatatttgtaaaatatgatggaagcatagaagaaaaatag

SEQ ID NO: 67558 - protein, 103 aa, Unknown
  Obtained from environmental sample
  misc_feature (1)..(103): Xaa is any amino acid
MNGFLIAFKQENSKCCIIAKGDVSDIKGTRKYNKPFNKNQIKQNIGVALLKSFQLKEIEDITIFITVPDENNYREIFETIKNSLLKVNIKFIFVKYDGSIEEK

SEQ ID NO: 67559 - DNA, 489 bp, Unknown
  Obtained from environmental sample
  misc_feature (1)..(489): n is a, c, g, or t
atgcataaagaaatgtatttagaaacaaaaaggttaattatcagatcatttaacgaaactgatgtaaaagatgtttttgaatatttatctgatgaaacggtaatggaatatattgaaccaataatggcatatgaaaaagtagtatcatttatatataatgctggaataaaaaataaattagtttttgcaattgaattaagaaatacaaataaagtaataggacatttaatatttcacaaatataaaaataaaaaaatttttgaaattggttggattatcaataaagaatattggaataaaggttatgcagtggaagctagtaaagaagctataaagtatggttttgaggtattgaaaataaaaaagataattggagagacggaagagaaaaacattaaatcaataaaaacattagaaaaaatagggatggaaaaagtgggtaaaaataaagacggtctaattgaatatgaaataaaaaatgtaaattaa

SEQ ID NO: 67560 - protein, 162 aa, Unknown
  Obtained from environmental sample
  DOMAIN (64)...(144): Acetyltransferase (GNAT) family
  misc_feature (1)..(162): Xaa is any amino acid
MHKEMYLETKRLIIRSFNETDVKDVFEYLSDETVMEYIEPIMAYEKVVSFIYNAGIKNKLVFAIELRNTNKVIGHLIFHKYKNKKIFEIGWIINKEYWNKGYAVEASKEAIKYGFEVLKIKKIIGETEEKNIKSIKTLEKIGMEKVGKNKDGLIEYEIKNVN

SEQ ID NO: 67561 - DNA, 762 bp, Unknown
  Obtained from environmental sample
  misc_feature (1)..(762): n is a, c, g, or t
atgaagcccgctatgcgcatggccgccctgatggggctgccggtcaagtacgtctggtcgcacgacaacttcagggtaggggaggacggcccgacgcaccagccggtcgaacacgagacgcaggtcaggctgctggaaaaaatggccaacccgcacggccgcaggagcatgctcgtacttcgccccgcggacgccgccgagacgacggaagcctggcgcctggccctggaaaacatgtccggccccaccgcgctgctcctgagccgccaagcgatggccgacgtcccggccaaagccggttcgaacagccgcgccgccgacgccgaaggggttaagttcggggcgtacaccgtggtcgattgcatggatcccggcctgatattggtggccaacggcgccgaggtcgtcacctgcgttgaagccgccgccgcgataaaaaaggagctcgggataggcgttcgggtaatcagcgccatatcggagggcttatttaaagaacaatctaaggagtatagggacggattaatcccgttcggcgtaccggtgttagcctttacggccggtctgccgctcaacttcgtagggatggtcggcccgctgggtaaggtaatcggcttagaacgattcggagcgtccgcgccgtttaaagtgctagaggagaaattcggctatacgacggaagcgttagtcaagcggacgttggattatattaaggaatatgaggcgctggttaaaagaatgtctgaactaataaaattatag

SEQ ID NO: 67562 - protein, 253 aa, Unknown
  Obtained from environmental sample
  DOMAIN (115)...(229): Transketolase, C-terminal domain
  misc_feature (1)..(253): Xaa is any amino acid
MKPAMRMAALMGLPVKYVWSHDNFRVGEDGPTHQPVEHETQVRLLEKMANPHGRRSMLVLRPADAAETTEAWRLALENMSGPTALLLSRQAMADVPAKAGSNSRAADAEGVKFGAYTVVDCMDPGLILVANGAEVVTCVEAAAAIKKELGIGVRVISAISEGLFKEQSKEYRDGLIPFGVPVLAFTAGLPLNFVGMVGPLGKVIGLERFGASAPFKVLEEKFGYTTEALVKRTLDYIKEYEALVKRMSELIKL

SEQ ID NO: 67563 - DNA, 1128 bp, Unknown
  Obtained from environmental sample
  misc_feature (1)..(1128): n is a, c, g, or t
atgcttgtcggtccgaacggggcgcagtataaatttacgacgccggccgcaggcggcaccaacgtcggcgtttccgaccttaaagccggaaccattgtttcatcgggcaaatacataatcgccgacgatccgagcgggacgctgagcggtataaacgttacgatcggaaacgataccgccctaactatcgccgaggtggcgtctctcgcggcgggaagcgttttggcggacggcagcgcagtcaacgtggccacagagctcaaattaatggtgagcggcaaagaggttaagattgagtataacggctcaggcctcaaagtgggcggcgagctggtagccgtttccaaaagcataacgcttgaggacggcacgattctgaagaatgagggcggcggtaaagtatcggtggtctccggcagcataaaattggcgcaaaaatgggatgtcgcggcaggcgacgccatagcgaaagacagcactttagcctccggcagcgagataaaaaaaggcgctacgttagaagccggcactgtaattaccaacgcaaacgttttcgctccgggcagcattactttcgcggaaaaaaacttcgacgcgggcgacacatacgtacagttttcctccaacgccggagccgttctcgccgcggattacaagaacgccaaggtgggcgacagcataacgttcctcttctcacgctataaggccccgtcgtcaaatttagccaactcgttcatggcccagataggcgccaatagcggtcagacgactttcatctcaataggcgatatgcgcgctaaagcgctcggcgtagccgacgtagacatcagcacgaagtggggcgccgcgacggccattgagacggttgacaacgccatacagagcgtttctcaccaacgcagttatctaggagccgtccaaaaccgtctggaacacaccatcaggagcctcgacacggcgatcgaaaacttgcaagccgcagagagccgcatccgcgacgtcgatatggcgaaggagatcatggagttcacgaagcacaacatcctgctgcaagtgtcgcaggcgatgctggcccaagcgaactctcaaccgaagtatgtgttggaattgttgaggagttcaatgtga

SEQ ID NO: 67564 - protein, 375 aa, Unknown
  Obtained from environmental sample
  DOMAIN (279)...(350): Bacterial flagellin C-terminus
  misc_feature (1)..(375): Xaa is any amino acid
MLVGPNGAQYKFTTPAAGGTNVGVSDLKAGTIVSSGKYIIADDPSGTLSGINVTIGNDTALTIAEVASLAAGSVLADGSAVNVATELKLMVSGKEVKIEYNGSGLKVGGELVAVSKSITLEDGTILKNEGGGKVSVVSGSIKLAQKWDVAAGDAIAKDSTLASGSEIKKGATLEAGTVITNANVFAPGSITFAEKNFDAGDTYVQFSSNAGAVLAADYKNAKVGDSITFLFSRYKAPSSNLANSFMAQIGANSGQTTFISIGDMRAKALGVADVDISTKWGAATAIETVDNAIQSVSHQRSYLGAVQNRLEHTIRSLDTAIENLQAAESRIRDVDMAKEIMEFTKHNILLQVSQAMLAQANSQPKYVLELLRSSM

SEQ ID NO: 67565 - DNA, 396 bp, Unknown
  Obtained from environmental sample
  misc_feature (1)..(396): n is a, c, g, or t
gtggaagacggctatgtgaataaaattctcggcgcgggggaagcggcctgtctgttgaatactattgaagccgccgagcgcaacgcgtttgaatttgaaagcgccggaaaactgccccccagcttcggtgaaatatacgcccgcaacgcccgcaacataggcgagcttggcatcggcctgaaccccgcggcccggatcaccggaaagatgcttgaagacgaaaaagccttccgcacctgccattttgccatcggcgccaattacgacgaggacgcgcccagccttatccatctggacggcctggtaaagaaccccaccataacggcgatctttgaagacggaaccaagcagataattgaaaaggacggcgaactggacagcatcatactatcttga

SEQ ID NO: 67566 - protein, 131 aa, Unknown
  Obtained from environmental sample
  misc_feature (1)..(131): Xaa is any amino acid
MEDGYVNKILGAGEAACLLNTIEAAERNAFEFESAGKLPPSFGEIYARNARNIGELGIGLNPAARITGKMLEDEKAFRTCHFAIGANYDEDAPSLIHLDGLVKNPTITAIFEDGTKQIIEKDGELDSIILS

SEQ ID NO: 67567 - DNA, 327 bp, Unknown
  Obtained from environmental sample
  misc_feature (1)..(327): n is a, c, g, or t
atgcgcaggtcccgggttcgattcccggttctggctgtaaaagcaatgagcgagcctaacaacagtataatcctttatcaagacgaaaatggcgttaccagagtgaacgtgcgtttttcggatgaggatttatggctgacacagcttcaaatagccgagatttacgatacaacacagcaaaacattgaccagcacattaaaaatatctatgccgacggcgaattacaacaagagccaacttacaagaaattcttgttagttcggaccgagggtaagcggcaagtcgaacggaatatcgaccactacaaccttgataagagaccatga

SEQ ID NO: 67568 - protein, 108 aa, Unknown
  Obtained from environmental sample
  misc_feature (1)..(108): Xaa is any amino acid
MRRSRVRFPVLAVKAMSEPNNSIILYQDENGVTRVNVRFSDEDLWLTQLQIAEIYDTTQQNIDQHIKNIYADGELQQEPTYKKFLLVRTEGKRQVERNIDHYNLDKRP

SEQ ID NO: 67569 - DNA, 1725 bp, Unknown
  Obtained from environmental sample
  misc_feature (1)..(1725): n is a, c, g, or t
atgaaaactttatggcgcatagcaaaagaagccgtaagatacaaaggctggctgctgctgtcgatttttggcacgcttatgatgactacggtcaacctgattgccccaagaataatggcgggtatgacggggcttgtggcggccggcatgacgcgggaaagatttaccaccgtattatggatggcgggcggattgctgggcctgtacctgacacgcatcctgttccggtttttatccaactactgctcgcacagggcggcatggcggcttgtgcttgaactgcggatcaaagtttataacgcgatccagtctttttccatggattattttcacaacaagcagacgggcgagcttcttagccgcgtaatgaacgacgtggcgacatttgaattgatatacgcccacattacccccgatgtcattaccaattttgtcaccctcacgggcgtgacaattatcctctttaacctaaacgcgcgccttgcgcttattacctgtattcccattccgttcattctgctgtcgggatggtttttcagccgcaaggtgcgtcccaattttcagaaaacgcagaagtcgcagggggaattatccgcgcagcttcaggataatttttccggcatacaggaaatacaggcttttggacgccaggattacgcgtctgaaaaaattttaatcaaaggcatggattttacgcataacatgctccgcgccctgaagttaagcgccatattccacccgagcgtggagtttttaacttccattggcggtgttattgtcgtcggcttcggcggatttttggcgtataaaagtgagcttaccgtttccgagattgtcggttttatgctttaccttacccttttttacgcgccgattacgggcattgcccagcttctcgaatcggcccagcaatcgcttgccggagcggaacgcgtaattgaaattttagacacgccgcaaagcgtcaaggacagccctacggctaaatcaatcggacaggtaaaaggacaaattacttttgagaatgtcagcttttcctatatacagggcgtccctgttcttgatggcgtgtcattcgacattaagcccgggcaaatggccgcgctggtaggggcgacaggcgtagggaagaccacgttaagcaagcttatatcaaggttttatgatccgactggcggaagggtatgccttgacgggcatgatctgcgggacattactctggaaagcctgagaagcaatatttctctggttttacaggatacatttttgtttaacggaactatcgaagaaaatatcgcgtttgccaggcctgacgcttcgtttgaagaggttaaaacggcggcgcagaccgcgaggatacatgacgacataatgcagatgcccgaagcctatcaaacgcagataggggaacgcggcgttaagttgtcgggcggccagaaacagcgcatagcgatagcgagggctgtactttgccgggccccggtgcttattcttgacgaggcgaccgcgtccgtagacgtgcacaccgaggagcagatacagcaggcgataaacgaaatagccggaagccgaacaatcgtaaccatcgcgcaccgtctctctaccattcgcaacgcggatgttatttatgtttttgaaaaggggcgtattatccaatcgggcagtcacgcggaattgatagagcaggaaggactttaccggagtttatgcagaacaggcaagtga

SEQ ID NO: 67570 - protein, 574 aa, Unknown
  Obtained from environmental sample
  DOMAIN (14)...(292): ABC transporter transmembrane region
  misc_feature (1)..(574): Xaa is any amino acid
MKTLWRIAKEAVRYKGWLLLSIFGTLMMTTVNLIAPRIMAGMTGLVAAGMTRERFTTVLWMAGGLLGLYLTRILFRFLSNYCSHRAAWRLVLELRIKVYNAIQSFSMDYFHNKQTGELLSRVMNDVATFELIYAHITPDVITNFVTLTGVTIILFNLNARLALITCIPIPFILLSGWFFSRKVRPNFQKTQKSQGELSAQLQDNFSGIQEIQAFGRQDYASEKILIKGMDFTHNMLRALKLSAIFHPSVEFLTSIGGVIVVGFGGFLAYKSELTVSEIVGFMLYLTLFYAPITGIAQLLESAQQSLAGAERVIEILDTPQSVKDSPTAKSIGQVKGQITFENVSFSYIQGVPVLDGVSFDIKPGQMAALVGATGVGKTTLSKLISRFYDPTGGRVCLDGHDLRDITLESLRSNISLVLQDTFLFNGTIEENIAFARPDASFEEVKTAAQTARIHDDIMQMPEAYQTQIGERGVKLSGGQKQRIAIARAVLCRAPVLILDEATASVDVHTEEQIQQAINEIAGSRTIVTIAHRLSTIRNADVIYVFEKGRIIQSGSHAELIEQEGLYRSLCRTGK

SEQ ID NO: 67571 - DNA, 804 bp, Unknown
  Obtained from environmental sample
  misc_feature (1)..(804): n is a, c, g, or t
atgcgcgtagacggcggtgttcgcggtgaacacgttatccgccgccacctccgtgccgcccgacgccgtcgtgaaccagccgtcgaacttgtagccggccctcgtaggcgtgggccaagaggccgccattccgtcggggtctatcacggcggacgtaggcgaaaccgagccgccgttggggttgaacgttacagtgtagacgggcgtccatcgggcgaagacggtcgcgttcgcctcgaacaccgtacccgccgtcacctcgacgccggacgacgacgacgcggtggtgtaccatccgttaaacctgaaaccctccctcgtaggcgtaggcagcgacgtcagcgttccgtcgccggtcgtcgtgcggaacgccggcgagaccgtgccgccgttggcgttgaacgttaccgtgtaggagacgtcgatcggcgaccactcggcgacgaccgtcgcgtcgcccctgaacacgtagttcgtcgttatcttcacgccgcccgacgagtaccagccgtcgaaggcgtaaccgccgacgggcggcgcggtcggcgtgggcagagaggcgagtttcccgtcggggccggttatgtcgtagtcgatggaaaccatgccgccgttggggttgaacgtcaccttgtagtgctgtatccaattagagtagataacggtgttctcggtgtaaaccttgctcgtcgtcaccttatcgccgctgcccatgcgcgccgtataccaaccgtcgaacgtgcgcgtatcgccgcaggtaggggtaggcagagacgagagttttccgtctacggggctggttga

SEQ ID NO: 67572 - protein, 267 aa, Unknown
  Obtained from environmental sample
  misc_feature (1)..(267): Xaa is any amino acid
MRVDGGVRGEHVIRRHLRAARRRREPAVELVAGPRRRGPRGRHSVGVYHGGRRRNRAAVGVERYSVDGRPSGEDGRVRLEHRTRRHLDAGRRRRGGVPSVKPETLPRRRRQRRQRSVAGRRAERRRDRAAVGVERYRVGDVDRRPLGDDRRVAPEHVVRRYLHAARRVPAVEGVTADGRRGRRGQRGEFPVGAGYVVVDGNHAAVGVERHLVVLYPIRVDNGVLGVNLARRHLIAAAHARRIPTVERARIAAGRGRQRREFSVYGAG

SEQ ID NO: 67573 - DNA, 1995 bp, Unknown
  Obtained from environmental sample
  misc_feature (1)..(1995): n is a, c, g, or t
atgaacaacatactgagttcaggcggcgctacggaagaaggaatacccgaaaccattgacgatgaagacataacggaaaaaggtgaaaccgacgacaatgacgatgaaacaatttcgctgacaggcgatgaaatggacaacattcttaactccgctaattttacggaagagtcgggcactgaagaaacgcctgaaaatgattttgcggctgacgaagaaaccgccgacaacattgatatcgacattgacaccacggagacacaagaagaaacaagtcttgccaatgatgactttgcagacatttcgtctgacgactctcttgccgcagatgactttgcggatatttcatcgacagacatttcgtctgacgacgcccttgctacagatgactttgcggacatttcgtctgatgcccttgcgtcggatgacgctcttgccactgatgatatttctttagatgatactcctgcgtcagatgacgcccttgctacagatgactttgcggacatttcgtctgacgactctcttaccactgatgactttgcagacatttcgtctgacgatgcccttgcatcggatgacgctcttgctacagatgattttgacatcacttcagaagagaccgtcacgactgaggaaaccgcctcggataccgatgccgctcttgccgatgacgactttgccgacattgcggcggacatttcattagacgatacagctttaactgacgaatcatccgctgacatttcgttagacgacgattcttccgaccccgctttggatgccgcccttgacaatgatgattttgacatctcttcagaagagaccgtcacgacggaagaaaccgcctcggataccgataccgctcttgcagatgatgatttttccgatatcacattagacaatgttacgttagatgaaagtgcgttagacgatacgctcgtatcagacgacgtttttgcctctgatgtttctttagacgatactgccgcgtcagatgacgccctttctgcagacgattttgcagacattccttcagacgatgctcttgcaactgatgatatttctttagacgatacagccgcatcagctgacgcttttgctgcggatgattttgacatcacttcagaggaaaccgtcacgacggaagaaactgcatcggataccgatgccgctcttgccgatgcttctcttaccgatgaagatttttccgatatcgcattagacaatgtttcgttagatgaaagcgcattagacgatacgctcgtgtcagacaatgcttcatcagacgctgaccttgcgatggatgattttgcggatatttcacaggaagactcggaaacaaccgccgctcccgaaggaaacgatgaattggataaattgcgcgaagaaggcgcaatgccgatgacggaatctcccgaaaacagcgattaccttgaagaagaacatcttgataatgattcaatggatttgtcggacgctgtaattgacgatcctgtattaccgtcaaatattttagaaaatgacgcattaacggagccttctttagatgaagaagattttgacatggattcttttgatgacatatcaattgattccggttcagacgctctcagcgatgacttttcttctcttgatgacacagcgtctgcgccggcagaagaagccgacataccaatggatgattttgccggcatagaagcggaagagcctgcggaacaagcgccggctcctgttgcggctcctgcgcctgctccggcagcgccgccgcctcccgctccggctgtctccgccgcccccgccgctgcaggcgctccggacagcggaaaagctccgtttgtcattccttcgactttaagatccgaacttagaaatattttaagctacatggatcaacttcttgaatcattgcctgaacaaaaaatcgaagaattcgcaaaatccgaatactttgattcctataagaaactctttaaggaattggggctggtataa

SEQ ID NO: 67574 - protein, 664 aa, Unknown
  Obtained from environmental sample
  misc_feature (1)..(664): Xaa is any amino acid
MNNILSSGGATEEGIPETIDDEDITEKGETDDNDDETISLTGDEMDNILNSANFTEESGTEETPENDFAADEETADNIDIDIDTTETQEETSLANDDFADISSDDSLAADDFADISSTDISSDDALATDDFADISSDALASDDALATDDISLDDTPASDDALATDDFADISSDDSLTTDDFADISSDDALASDDALATDDFDITSEETVTTEETASDTDAALADDDFADIAADISLDDTALTDESSADISLDDDSSDPALDAALDNDDFDISSEETVTTEETASDTDTALADDDFSDITLDNVTLDESALDDTLVSDDVFASDVSLDDTAASDDALSADDFADIPSDDALATDDISLDDTAASADAFAADDFDITSEETVTTEETASDTDAALADASLTDEDFSDIALDNVSLDESALDDTLVSDNASSDADLAMDDFADISQEDSETTAAPEGNDELDKLREEGAMPMTESPENSDYLEEEHLDNDSMDLSDAVIDDPVLPSNILENDALTEPSLDEEDFDMDSFDDISIDSGSDALSDDFSSLDDTASAPAEEADIPMDDFAGIEAEEPAEQAPAPVAAPAPAPAAPPPPAPAVSAAPAAAGAPDSGKAPFVIPSTLRSELRNILSYMDQLLESLPEQKIEEFAKSEYFDSYKKLFKELGLV

SEQ ID NO: 67575 - DNA, 414 bp, Unknown
  Obtained from environmental sample
  misc_feature (1)..(414): n is a, c, g, or t
atgacaaacggagcttttccgctgtccggagcgcctgcagcggcgggggcggcggagacagccggagcgggaggcggcggcgctgccggagcaggcgcaggagccgcaacaggagccggcgcttgttccgcaggctcttccgcttctatgccggcaaaatcatccattggtatgtcggcttcttctgccggcgcagacgctgtgtcatcaagagaagaaaagtcatcgctgagagcgtctgaaccggaatcaattgatatgtcatcaaaagaatccatgtcaaaatcttcttcatctaaagaaggctccgttaatgcgtcattttctaaaatatttgacggtaatacaggatcgtcaattacagcgtccgacaaatccattgaatcattatcaagatgttcttcttcaaggtaa

SEQ ID NO: 67576 - protein, 137 aa, Unknown
  Obtained from environmental sample
  SIGNAL (1)...(17)
  misc_feature (1)..(137): Xaa is any amino acid
MTNGAFPLSGAPAAAGAAETAGAGGGGAAGAGAGAATGAGACSAGSSASMPAKSSIGMSASSAGADAVSSREEKSSLRASEPESIDMSSKESMSKSSSSKEGSVNASFSKIFDGNTGSSITASDKSIESLSRCSSSR

SEQ ID NO: 67577 - DNA, 1188 bp, Unknown
  Obtained from environmental sample
  misc_feature (1)..(1188): n is a, c, g, or t
atgcgtatggaggccgcgcaggggaaactctttgagatggctttccgctcccaatacgccatagacagcctcacgcgtttgggccaaaaactggaaaacggcgaggtcgggtgcgccgacgtgctgtgcatagaagaggcccaaggcgaggacgcggagcctatagacttggacgaaaagcgcacggagtttctccgaacgctctccgtagtgaaaagtaaatacgccgccataaccgatatgcggcggacaggcgttgaaggtaaggaactggacgagctctgggacgaaaccatccgcatctgcagaggcatggggctaaacgccaagcatgtggaagacattttggacaggtacaaggaggagttggtttccgaaggccgcgaagccgacatcgaaaagttcgcgaagctttcggagatacgcaatcaggcgaagtgcgcggtgatagaagccaacgtgcgccttgtcgtaagcatagccaaaaagtatatgatgcgcggaatggaaataatagacctcatacaagagggcaaccgcggcctgataaaagcggtggagaatttcgactaccgcaaaggttacaaattctccacgtatgccacgtggtggatccgccaagccatattgcgcgcgataaacgacaaatccaaagcgatccgcatcccctccaatacgatggaattggtcaacaaagtcctgcgcgtaacgcgcaagtgggtcatagagtacggctacgaaccgtcgtaccaagaaatcgccttaacgcttggctgtcccgaagccaaagtacaacaagccatggagtactccctagaccccatatcgctggacatgcaaataagcggcgacagcggcgcgacggtgggcgagtacatagaagactcaaccgtagtagaccccacgcagaaaatatcattattgcatttaagagagcagatcaactccgtactgagttcgcttgcgcccaaagagaaagaaatccttatgatgcgcttcggccttgacgacggaaggatcaagacgctgaaagagataggggagatattcaacataagccgcgaacgcgtccgtcagatagaaaccaaagccctgtctaaactgaaacatccaagcagggtaagattgctatccgcctggcgcgaagagagacccgagacgttagccgatgttccgtatgaagaataa

SEQ ID NO: 67578 - protein, 395 aa, Unknown
  Obtained from environmental sample
  DOMAIN (223)...(305): Sigma-70 region 3
  misc_feature (1)..(395): Xaa is any amino acid
MRMEAAQGKLFEMAFRSQYAIDSLTRLGQKLENGEVGCADVLCIEEAQGEDAEPIDLDEKRTEFLRTLSVVKSKYAAITDMRRTGVEGKELDELWDETIRICRGMGLNAKHVEDILDRYKEELVSEGREADIEKFAKLSEIRNQAKCAVIEANVRLVVSIAKKYMMRGMEIIDLIQEGNRGLIKAVENFDYRKGYKFSTYATWWIRQAILRAINDKSKAIRIPSNTMELVNKVLRVTRKWVIEYGYEPSYQEIALTLGCPEAKVQQAMEYSLDPISLDMQISGDSGATVGEYIEDSTVVDPTQKISLLHLREQINSVLSSLAPKEKEILMMRFGLDDGRIKTLKEIGEIFNISRERVRQIETKALSKLKHPSRVRLLSAWREERPETLADVPYEE

SEQ ID NO: 67579 - DNA, 435 bp, Unknown
  Obtained from environmental sample
  misc_feature (1)..(435): n is a, c, g, or t
ttggtacgacggttcgtagccgtactctatgacccacttgcgcgttacgcgcaggactttgttgaccaattccatcgtattggaggggatgcggatcgctttggatttgtcgtttatcgcgcgcaatatggcttggcggatccaccacgtggcatacgtggagaatttgtaacctttgcggtagtcgaaattctccaccgcttttatcaggccgcggttgccctcttgtatgaggtctattatttccattccgcgcatcatatactttttggctatgcttacgacaaggcgcacgttggcttctatcaccgcgcacttcgcctgattgcgtatctccgaaagcttcgcgaacttttcgatgtcggcttcgcggccttcggaaaccaactcctccttgtacctgtccaaaatgtcttccacatgcttggcgtttag

SEQ ID NO: 67580 - protein, 144 aa, Unknown
  Obtained from environmental sample
  misc_feature (1)..(144): Xaa is any amino acid
MVRRFVAVLYDPLARYAQDFVDQFHRIGGDADRFGFVVYRAQYGLADPPRGIRGEFVTFAVVEILHRFYQAAVALLYEVYYFHSAHHILFGYAYDKAHVGFYHRALRLIAYLRKLRELFDVGFAAFGNQLLLVPVQNVFHMLGV

SEQ ID NO: 67581 - DNA, 510 bp, Unknown
  Obtained from environmental sample
  misc_feature (1)..(510): n is a, c, g, or t
atgtcaataacgacccaacccaagaccccgttagtcggaataataatgggctcgtcctccgactgggagacaatgcaaaataccgcaaacattctggacgaactctccgtcccctacgaagctgaagtggtttccgcccaccgcacccccgacaaactcttcagctatgcggagtcggcgcaaggccgcggcatagaggtaatcgtcgccggcgccggcggcgccgcgcacctgcccggaatgaccgccgccaaaacgtcgctgcccgtcataggcgtccccgtccaatcaaaagcgctaagcggtatggattccctcctgtcaatcgtacaaatgcccgccggtattccggtcgccgctatgtccataggccgcgccggagcggtaaacgcggggcttatggcggcggcgatattgggtaataaatatccgaagataaaagaagccttagacgattatcgtaaaaggcaaacggaaaaagtcttgaataaccctaatccaagtggttga

SEQ ID NO: 67582 - protein, 169 aa, Unknown
  Obtained from environmental sample
  DOMAIN (10)...(168): AIR carboxylase
  misc_feature (1)..(169): Xaa is any amino acid
MSITTQPKTPLVGIIMGSSSDWETMQNTANILDELSVPYEAEVVSAHRTPDKLFSYAESAQGRGIEVIVAGAGGAAHLPGMTAAKTSLPVIGVPVQSKALSGMDSLLSIVQMPAGIPVAAMSIGRAGAVNAGLMAAAILGNKYPKIKEALDDYRKRQTEKVLNNPNPSG

SEQ ID NO: 67583 - DNA, 738 bp, Unknown
  Obtained from environmental sample
  misc_feature (1)..(738): n is a, c, g, or t
ttggctttttctggttgtaccagccttactgaaataattgttgatgatggtgatgatccttatttcgatccagatggttatgaaaacgaaaattatcatagatcaatagacggcgtattatattacggaagtaataataatcaattagtcatttatccgaatggaaaaacagacatttcttttaccatacccagccatgtttccatcattaggggtaatgctttttccggttgcacgagccttaccagtataaccatacctaacagcgttacttttattgggcaaagcgctttttccggttgcacgagccttaccagtataaccataccgtttgtgggaaatgaattgaatgtaaccataaatacacattttggttatatattcggagcttcaagttactataatcaaaattcaaatattccgttgtccttgaaaacagtcattatcacaggcggaaccgcaattaatgaaagcgctttttattcttgtgataaccttaccagcgtaacgataccaagcagcgttaccagtattgggcatcgggcttttgaagattgtaccagccttaccagtgtaaaatttgcaacgggtagcaacataacagacactaattttggaagtatggcatttcctgatggaatgagcggaaatttgttaaagagtgcctacagcaccgggaaagccggaacttatacgaggaatgtaaacagtggagtgtggacgaaaacgtctaattaa

SEQ ID NO: 67584 - protein, 245 aa, Unknown
  Obtained from environmental sample
  misc_feature (1)..(245): Xaa is any amino acid
MAFSGCTSLTEIIVDDGDDPYFDPDGYENENYHRSIDGVLYYGSNNNQLVIYPNGKTDISFTIPSHVSIIRGNAFSGCTSLTSITIPNSVTFIGQSAFSGCTSLTSITIPFVGNELNVTINTHFGYIFGASSYYNQNSNIPLSLKTVIITGGTAINESAFYSCDNLTSVTIPSSVTSIGHRAFEDCTSLTSVKFATGSNITDTNFGSMAFPDGMSGNLLKSAYSTGKAGTYTRNVNSGVWTKTSN

SEQ ID NO: 67585 - DNA, 783 bp, Unknown
  Obtained from environmental sample
  misc_feature (1)..(783): n is a, c, g, or t
atgataggctttttaataagaaaaactttttatgatctttgggacaatttattcagaattgtattaattaacataggttttatggcagttaccgcaattcctgtttttctccccagattggcatcgttattcatcaactcgccgtttctggacgcgggtcttatcgccgtcggcattttgctttgttcggtatatttatccgcggcggcgcactctctcaaatcaatttcagattacggcacgttcggctttcttgattttttcaagtccttcaaagccgcgtggccttccggcatagtgatgggcctttttgtagttttacttttcattatgatatctattgtaattccgttttacatgagcatggaatcactttttggttttctcttgggaatgatagtattctgggcggtagtttttgccgtcctgtccttccagttttattttacggtatgcgccagattaagcccgaaccttaaaaaagcatttaagaagtgcatgttaatctctgttgataattccggcctttctgtttttctgtttctgcacaacattgtcggtcttattctttccgtttttctggcgtttgttttccccggccccgccggcgttcttctgtatcttgatgaagccgtgcgccttcgcctgctaaagtacgactggcttgaagccaaccccggcgctaaccgcaagaaaattccgtgggacgaacttcttgttgaggagcgcgagaagacggggacgcgtactttgaagaatttgatttttccgtggaaggattag

SEQ ID NO: 67586 - protein, 260 aa, Unknown
  Obtained from environmental sample
  misc_feature (1)..(260): Xaa is any amino acid
MIGFLIRKTFYDLWDNLFRIVLINIGFMAVTAIPVFLPRLASLFINSPFLDAGLIAVGILLCSVYLSAAAHSLKSISDYGTFGFLDFFKSFKAAWPSGIVMGLFVVLLFIMISIVIPFYMSMESLFGFLLGMIVFWAVVFAVLSFQFYFTVCARLSPNLKKAFKKCMLISVDNSGLSVFLFLHNIVGLILSVFLAFVFPGPAGVLLYLDEAVRLRLLKYDWLEANPGANRKKIPWDELLVEEREKTGTRTLKNLIFPWKD

SEQ ID NO: 67587 - DNA, 909 bp, Unknown
  Obtained from environmental sample
  misc_feature (1)..(909): n is a, c, g, or t
atgatataccatattttcatagggtctacccttgatgaccttaaaaacgagcgcagggaaatccagcgcattattatggaactaggccatattcccgtatctgcggaatacctggacagtacatcaaaaaattacaaaaaactgcttgaaaaaacaatcgaggaatgtgatttttttatcgccgttatcgccaatatgtacgcgccaaaaggcgcgaaaatatctccgctggaaactgaatgtaatattgccgagaaaaacaatgttccggtaatttcatttatcaagggcgaaaagtcgggcggaaaaacacgcggtacagctcgcagttcagctcgcagttcagcggcgaaaaaaggaaaggaagccggttttgaaaaaaaacaggaagcacttaaaaagagacttggcaagggcataagcgagacatggcttaactcgaaggatctttgccagaaactgcagagccagcttgtccagcagatcaatcttttactacgcaacggatgggtcagggcggatcagatattcgcgccgtcggttgccaacgagttatcgaggctttcgacggagaacgaacagctcaggcaccagataaaaattgacagcaacgacattgtcgcaagactgcgggtacaaatgaaaaacacgtttaaggtgcttgcggtaaataaagtcatattgagtttttattacgagtcgggagacaaatgggaaaacaaccgcagtttccgttttctgcgaatttttaactgctggttcccgagttggcgattggaaaaaccacggcggaaatttcccatttcctgggcgccgcgcttaatcccgagccgggtaaaactgtccggaaggactaccccaccccgtcaaacaccgttaaaaaaatcatggcggacttgtccatgttaa

SEQ ID NO: 67588 - protein, 302 aa, Unknown
  Obtained from environmental sample
  misc_feature (1)..(302): Xaa is any amino acid
MIYHIFIGSTLDDLKNERREIQRIIMELGHIPVSAEYLDSTSKNYKKLLEKTIEECDFFIAVIANMYAPKGAKISPLETECNIAEKNNVPVISFIKGEKSGGKTRGTARSSARSSAAKKGKEAGFEKKQEALKKRLGKGISETWLNSKDLCQKLQSQLVQQINLLLRNGWVRADQIFAPSVANELSRLSTENEQLRHQIKIDSNDIVARLRVQMKNTFKVLAVNKVILSFYYESGDKWENNRSFRFLRIFNCWFPSWRLEKPRRKFPISWAPRLIPSRVKLSGRTTPPRQTPLKKSWRTCPC

SEQ ID NO: 67589 - DNA, 699 bp, Unknown
  Obtained from environmental sample
  misc_feature (1)..(699): n is a, c, g, or t
ttggaagaaccggcagttaaaatgaatctccggcctcttgccataatacttgtttttctttttctttccgctgttatcttcgcgagagacatagaagttaccgtcgaagacgaagacctcgacatgcctcttgagggagcggtaatcgttctgcgcggcggccggcaatttacctgcaacagcaaaggaatcgcgcttgtcaccctccccgatgacaggtctgcggtaatttcaattacatatcccggctacgaaacattcaggctttcaattccgggcgcggacccggcaaaaggttctcaagtcgaaaagttcaaggtggctctgcgccttggcggcattatgcaggggcaggaacttgtgctggaagccgcccgcccggaaaccagcgagacaaagagcgggcgcagcgtggcgatttccgaccgcgagcttacgcgcaccgccgagattggaattatcgaggacgtgatgaactctgttaagctgcttcccggcgtaggatacacgggaatgttcagcgcgacgccttcgatacgcgggggcgatcccggcgatttaatggcggtgcttgacggcttttatgtcgagcgcccgtatcactggatgggcagcatttcaatttttgatcctaagatggtttcaagcgcgcggctttcccacggcgtttttcggcgcttacgtcatcaaccgcgataa

SEQ ID NO: 67590 - protein, 232 aa, Unknown
  Obtained from environmental sample
  misc_feature (1)..(232): Xaa is any amino acid
MEEPAVKMNLRPLAIILVFLFLSAVIFARDIEVTVEDEDLDMPLEGAVIVLRGGRQFTCNSKGIALVTLPDDRSAVISITYPGYETFRLSIPGADPAKGSQVEKFKVALRLGGIMQGQELVLEAARPETSETKSGRSVAISDRELTRTAEIGIIEDVMNSVKLLPGVGYTGMFSATPSIRGGDPGDLMAVLDGFYVERPYHWMGSISIFDPKMVSSARLSHGVFRRLRHQPR

SEQ ID NO: 67591 - DNA, 792 bp, Unknown
  Obtained from environmental sample
  misc_feature (1)..(792): n is a, c, g, or t
gtggttatcgcttatgaccgcataatcccgaattcagcggattatgactactacatcactttcaacaacttcaaagtcggcgttcttcaggctgaaagtatcgtaaagggtttggatcttgcgtccgctacagcaaaagcgcccaagtacatcaccctttttgccggttcaccgacagacggaaacgcgttcttcttctttgacggcgctatgagcgttcttaatccctacatcgacaaagacgtactcaaagtagtcggaccctatcccaaaacatcagcggacagggaaaatttccagagaatcgcgacagaaaactggcaggctcccattgcgaaaacccgcatggaaaacctcctgaacaacgacgccagcaaagtaacgctcgacgcggtactcgctcccaatgacacgctcggccgcgccattatcgaagcttgcaaagccgacgccaaataccgcaacaagctgcccgtagtaaccggacaggacgcggaatttgattcagccatgtcgattaagaacggcgaacagtacagcaccgttttcaaagacacagccaaacttgcggaagccgcgattcttttagcggatcaggctctcaaaggtcagcccatcaatattccgggcgcagtccttgcgtcaggcgatctcgcgaagatcggcgacacaggcaagaaagtggtaaaagcttatctcctggatccaatccttgttaccaaagataaccttaatatcccgattgacgccgagttctacgacaggccccaagccgtccaacttcagaactag

SEQ ID NO: 67592 - protein, 263 aa, Unknown
  Obtained from environmental sample
  misc_feature (1)..(263): Xaa is any amino acid
MVIAYDRIIPNSADYDYYITFNNFKVGVLQAESIVKGLDLASATAKAPKYITLFAGSPTDGNAFFFFDGAMSVLNPYIDKDVLKVVGPYPKTSADRENFQRIATENWQAPIAKTRMENLLNNDASKVTLDAVLAPNDTLGRAIIEACKADAKYRNKLPVVTGQDAEFDSAMSIKNGEQYSTVFKDTAKLAEAAILLADQALKGQPINIPGAVLASGDLAKIGDTGKKVVKAYLLDPILVTKDNLNIPIDAEFYDRPQAVQLQN

SEQ ID NO: 67593 - DNA, 1305 bp, Unknown
  Obtained from environmental sample
  misc_feature (1)..(1305): n is a, c, g, or t
gtgatcaagtggtcaggttggtcagacatttttttagggggagccatgagcgaatatatacttgaaattcaaaatcttaccaaagaattccccggcgttcgggcgcttgaaaatgtaaatttaaaaattaaaaaaggcgagattcattcattgtgcggagaaaacggcgcgggcaaatccacgcttatgagctgtatctccggcgtatatccaagagacagttacgaaggcaaagttttttataaaggacacgaaaccaattacaacagcgttaaagacagcgaacatgaagggcttgccattattcatcaggaattggcacttagcccctatttatcaatctatgaaaatatgttccttggtcacatggaaacaacattcggcattatcaactggaacaaatatataaaggaatcaaaaaaatatctgaaaatagtaggcttgaacgaaccgcctgaaacaatcgtaagcaaactcggcgtaggaaaacagcagttggtcgaaatcgcccgcgctctttccaaaaaaacggaattgcttattttagacgagccgacttcctcgctcaacgacgacgagagcgaaaagctccttgaactgataattgaatttaaacgccagggtattacctcggtgataatttcccataaattaaacgaagttttaaaggttgcggacaccgtaaccatactgcgcgacggtcagtcaatccgcacttacgacgtaaaaggcgacaatcttaccgaagagatgatcatcaaagacatggtaggccgcgatcttacccaccgcttcccggagcggaaatcgtcgcccggcaatacaataatggaagtaaaaaactggagcgtgttccaccccgattaccacgatataaaagtggtggacgatgtttccttctttttgcgcaaaggcgagattttagctttttgcgggcctatgggcgcgggacgcactgaattaatgatgagcatcttcggtaattcctacggacaccacagcgaaggcgaattgctgattaacggcaaaaggtataaattcaacagccctcatgaagcgattagttcaaagcttggttatatttccgaagaccgcaaaagtctcgggcttgttctgattcaggatgtaaaaacgaatataacgcattccagcctgaataaaatttccaatgttcttggtgtaattgatgaacaaaaagagattatagaagccgaacgttactgtaacgatttgaacataaggactccgtcgattaaccagattgtccgaaacctgtccggcggcaaccagcaaaaagtggtgtaa

SEQ ID NO: 67594 - protein, 434 aa, Unknown
  Obtained from environmental sample
  DOMAIN (46)...(234): ABC transporter
  misc_feature (1)..(434): Xaa is any amino acid
MIKWSGWSDIFLGGAMSEYILEIQNLTKEFPGVRALENVNLKIKKGEIHSLCGENGAGKSTLMSCISGVYPRDSYEGKVFYKGHETNYNSVKDSEHEGLAIIHQELALSPYLSIYENMFLGHMETTFGIINWNKYIKESKKYLKIVGLNEPPETIVSKLGVGKQQLVEIARALSKKTELLILDEPTSSLNDDESEKLLELIIEFKRQGITSVIISHKLNEVLKVADTVTILRDGQSIRTYDVKGDNLTEEMIIKDMVGRDLTHRFPERKSSPGNTIMEVKNWSVFHPDYHDIKVVDDVSFFLRKGEILAFCGPMGAGRTELMMSIFGNSYGHHSEGELLINGKRYKFNSPHEAISSKLGYISEDRKSLGLVLIQDVKTNITHSSLNKISNVLGVIDEQKEIIEAERYCNDLNIRTPSINQIVRNLSGGNQQKVV

SEQ ID NO: 67595 - DNA, 696 bp, Unknown
  Obtained from environmental sample
  misc_feature (1)..(696): n is a, c, g, or t
atgagcgaaaaagtcactcaaactaccgatgttaaaacgatgataacaagcaatctcagaaagtattcaatgttcatcatgcttgctttaatcatgataatattcataccgttaacaagaaattctaacttgagtgagcggaatattaccaacatctttttccaatatagttatgttcttattctggctgtcggtatggtaatggtcattatcgtacaaggtattgatctttcagtcggttccgtctgcgcttttgtcggagctttaagcgcgatggtttacaatagaggcgcgggaacatttgttacattaattgcggcgcttttgatgggcggcgctatcggagcgtatcagggagcatggatagcttacggaagaataccctcgtttattgttactctttcaggaatgcagttattccgaggtcttacctatcttgttacaaaagttacccctatcggttttcatgacgacggttactcgcttcttgccaccggcacgcttgatgaaatattgaaacttcaaaagatcggtccctattatccaacatcgataattgtcgcggttattttacttgtaattttctttgtttccgaattttacgcgcgaaataaaaaaattaaaaatgaatttgaagtttccggattaccgggtttcataaccaaactttttaatcagctttctcggccaatctga

SEQ ID NO: 67596 - protein, 231 aa, Unknown
  Obtained from environmental sample
  misc_feature (1)..(231): Xaa is any amino acid
MSEKVTQTTDVKTMITSNLRKYSMFIMLALIMIIFIPLTRNSNLSERNITNIFFQYSYVLILAVGMVMVIIVQGIDLSVGSVCAFVGALSAMVYNRGAGTFVTLIAALLMGGAIGAYQGAWIAYGRIPSFIVTLSGMQLFRGLTYLVTKVTPIGFHDDGYSLLATGTLDEILKLQKIGPYYPTSIIVAVILLVIFFVSEFYARNKKIKNEFEVSGLPGFITKLFNQLSRPI

SEQ ID NO: 67597 - DNA, 930 bp, Unknown
  Obtained from environmental sample
  misc_feature (1)..(930): n is a, c, g, or t
atggctcgtagaatcggactgggaaaaggccttaacgctttactggaaaataacgacgaaaacgaaacatactctgcgccgattgctgtgcaaacggcctccggcggcggcggtaaagacaaatcgcaggacattgttcagttaccagtagacaagcttgttccaaatcccggtcagccccgtaaaaactttgacgagaccgaacttcaggaattagcggactcaataaaaacttacggcattatccagccaatcatcgcggcaaacgcgggggacggcacttatatcataattgccggcgaacgcagaacacgcgccgcaaaactttccggtctttcttcagttccggttattatccgcgattataccgatcaaaaaaagcttgagatttcattaattgaaaatatccaacgcagcgacttaaacccgattgaagaagcggcggcttttaaaaacctgatggacttttccaatctctcgcaggacgagcttgccgcgcgaatgggaaaaaacagatcgaccgttgccaacgcactgcggcttcttaaactgcccattgaaattcaaaaaagcattgaagagggaaaaataagctcaggacacgcaagagcgcttttatccgtaaccgacccaaaggcaagggataaactttacagggatatgctcacaagtgaaatctcggttagggaaaccgaaaaacgggctacggcattaaacaacgaaaaatcaggcaaggcaaaaaccgataaagacacggacggcggcaaagcgcaaaaacgttcgcccgaagtcagcgccatggaagaaaagtttatcggcaaacttggaaccaaggttgttattgagggagacctgaacaagggcaaaatacatattgattacttttcgatggaagaccttgaaagactgtatgagatattaggcggctga

SEQ ID NO: 67598 - protein, 309 aa, Unknown
  Obtained from environmental sample
  DOMAIN (46)...(136): ParB-like nuclease domain
  misc_feature (1)..(309): Xaa is any amino acid
MARRIGLGKGLNALLENNDENETYSAPIAVQTASGGGGKDKSQDIVQLPVDKLVPNPGQPRKNFDETELQELADSIKTYGIIQPIIAANAGDGTYIIIAGERRTRAAKLSGLSSVPVIIRDYTDQKKLEISLIENIQRSDLNPIEEAAAFKNLMDFSNLSQDELAARMGKNRSTVANALRLLKLPIEIQKSIEEGKISSGHARALLSVTDPKARDKLYRDMLTSEISVRETEKRATALNNEKSGKAKTDKDTDGGKAQKRSPEVSAMEEKFIGKLGTKVVIEGDLNKGKIHIDYFSMEDLERLYEILGG

SEQ ID NO: 67599 - DNA, 591 bp, Unknown
  Obtained from environmental sample
  misc_feature (1)..(591): n is a, c, g, or t
ttgctttccggcacggcaacgcgggaacaggcaattaaaaaaaccgccgtcaaaaagctagacgtaattccggcaagtatcgatctttccggcgcggcggtagaattaatcgaccagaaagagcgtaatttcttccttaaaaaagtccttaccccgattaaaagcaaatatgattttatactgattgactgccctcccagccttggacagcttacaatgaacggacttgccgccgcggattctgtacttatcccgatgcagtgcgaatactttgcaatggaagggcttaaacaacttttacacacgaccaagcttattcaaaagggacttaacccgtctttaaaaatcggcggcattttttttacaatgtacgatccaagaacaagacttgccaacgacgtaataaaacaggtaagcgccatttacaaagactcggttttaaatacgattatccccagaaacatacgcctttcagaagcgccgtcttacggaatgcctatttctctttacgatccgcaatgtcccggagccagagcataccactccctagcgcaggaacttattcgcaggggaggaaaaaatggctcgtag

SEQ ID NO: 67600 - protein, 196 aa, Unknown
  Obtained from environmental sample
  DOMAIN (4)...(159): CobQ/CobB/MinD/ParA nucleotide binding domain
  misc_feature (1)..(196): Xaa is any amino acid
MLSGTATREQAIKKTAVKKLDVIPASIDLSGAAVELIDQKERNFFLKKVLTPIKSKYDFILIDCPPSLGQLTMNGLAAADSVLIPMQCEYFAMEGLKQLLHTTKLIQKGLNPSLKIGGIFFTMYDPRTRLANDVIKQVSAIYKDSVLNTIIPRNIRLSEAPSYGMPISLYDPQCPGARAYHSLAQELIRRGGKNGS

SEQ ID NO: 67601 - DNA, 1104 bp, Unknown
  Obtained from environmental sample
  misc_feature (1)..(1104): n is a, c, g, or t
atggagaatcgcgtacagacaggatccggcgcacgcgaaagcgagagcgcggctcaatatatagttggaggttgtatgtttggcagtttttctacagatcttggaattgatttaggaacgtgtaacacgcttatttatattaagggaaaaggcgttgtattaaacgagccgtcggtcgtggcggtagaaaggggcacaaaaaaaattgtcgccgttggcgcagacgcgaaaagaatgttatggaaaacgcctgagaacattatcgccataaggccgatgagggacggggtaatcgcggatattgaatcaaccgaaaaaatgatccgctattttatctaccgtgttttcccgcgctaccgtttcttaaaaccgcgtatggttataggaatcccgtcctgcatcacggaagtggagcggcgcgccgttgaagaaagcgcgtataaatcgggagcgagggaagtttacgttattgaggaaagccttgccgccgcgataggcgcggacattccgataagggagccggcaggccacatgatctgcgacataggcggcggtacgtcggaaatttccgtaatatccctgggaggcatggtagtaacaagcgcaatccgcataggaggggatgaatttgacgaggcgataatcaagcacatacgcagcgttcataaccttgtcataggcgagcaaatggcggagaagttaaaaatagaaatagggaacgcctctccggacaaaactatcgaaaaactggaggtaaagggcaacgacgccattaccggtcttccgcggcgtcttgagattgattcggtggaagtgcgtgaagcgcttaaagatcccattaccgcgataattgacgaaataaaagccgtcttcggcaaaacgccgccggaacttgccgccgacattgtggaccgcggaattgtaatgacgggcggaggctccatgttaaagggtcttgataagcttatcgcgaaagaaacgggagttccggcgattatcgcggatcagcccgaactctgcgtcgctttgggagccggcaagtattttgattacatgaaaggctctgaccttaccaaaaatatctatgacagaataaacaattaa

SEQ ID NO: 67602 - protein, 367 aa, Unknown
  Obtained from environmental sample
  DOMAIN (179)...(345): Cell division protein FtsA
  misc_feature (1)..(367): Xaa is any amino acid
MENRVQTGSGARESESAAQYIVGGCMFGSFSTDLGIDLGTCNTLIYIKGKGVVLNEPSVVAVERGTKKIVAVGADAKRMLWKTPENIIAIRPMRDGVIADIESTEKMIRYFIYRVFPRYRFLKPRMVIGIPSCITEVERRAVEESAYKSGAREVYVIEESLAAAIGADIPIREPAGHMICDIGGGTSEISVISLGGMVVTSAIRIGGDEFDEAIIKHIRSVHNLVIGEQMAEKLKIEIGNASPDKTIEKLEVKGNDAITGLPRRLEIDSVEVREALKDPITAIIDEIKAVFGKTPPELAADIVDRGIVMTGGGSMLKGLDKLIAKETGVPAIIADQPELCVALGAGKYFDYMKGSDLTKNIYDRINN

SEQ ID NO: 67603 - DNA, 933 bp, Unknown
  Obtained from environmental sample
  misc_feature (1)..(933): n is a, c, g, or t
atgcggcatggatattccggcgatttcaaatccggttcggcatcgcaaaaaggcggcggaaaattatcctcagcgatttttaattcatcgttctatgtttttatatcccttgtaataatatcaatcgcgcttttacttttttccggcggtaattttatttttcatcttaaaaacaccggtctttcccttttctcgggagttagaggcggcatttacgaatttacttccgcggtttcaaggactgttctttccgttaaagagcttgccaatttaagaaaagaatacgcggaactgttaaaacagcttgagcgttacgaagaactggaacgaagcagcgcggaaatttatcaggaaaatttgcgtcttagggaacagcttggttttgcgcaaacattgcggtacaagcgtattcccgctcaaatttccggccgcgacccgaataatcttttttccgcggtagtgattaacaaaggcagttttgccggcgttaaacgcgacatgaccgtagtggcgtggcagaacggcacgcaggcgcttgtaggaaaagtaactcaaataggcgcttttgaaagccttgttatgcctatatttgacaataacgcgtatgtcgcatcacggttgtctgttacacggtatgacggaattgtggaagggcagggaaatcaggatacccctcttttaatgcggcaggtgccaaaaagagcgtataacgaaataaataaaggcgatattgtcatttcaagcggaattggggggatatatccagcggatataaatataggtcgggtaaataatattttctcgcctgaatatgaaacaacattggaaatagaaattataccaatgatagatttttcaagattagaatatgtgtttctgattgaaaaggaaactgcggatttccaaattgaaacttcggaaggttcccaatga

SEQ ID NO: 67604 - protein, 310 aa, Unknown
  Obtained from environmental sample
  DOMAIN (139)...(298): rod shape-determining protein MreC
  misc_feature (1)..(310): Xaa is any amino acid
MRHGYSGDFKSGSASQKGGGKLSSAIFNSSFYVFISLVIISIALLLFSGGNFIFHLKNTGLSLFSGVRGGIYEFTSAVSRTVLSVKELANLRKEYAELLKQLERYEELERSSAEIYQENLRLREQLGFAQTLRYKRIPAQISGRDPNNLFSAVVINKGSFAGVKRDMTVVAWQNGTQALVGKVTQIGAFESLVMPIFDNNAYVASRLSVTRYDGIVEGQGNQDTPLLMRQVPKRAYNEINKGDIVISSGIGGIYPADINIGRVNNIFSPEYETTLEIEIIPMIDFSRLEYVFLIEKETADFQIETSEGSQ

SEQ ID NO: 67605 - DNA, 504 bp, Unknown
  Obtained from environmental sample
  misc_feature (1)..(504): n is a, c, g, or t
atgattaaaaatattatttggacaataatccttgccgtaaccgccggtatattacagtcaaccatacttggaaatttcgcgcttttcggcgccgttcccgatcttgctttgtgtattattgtttattcggcatacgtaaacggaaccatgaccggccagctttcaggttttttttcgggattgctgcttgattttctttctgccgcgcctttagggcttaattgccttatacgcaccgttataggggcggtaacaggcatatttaaaggagcgtttttccttgacgttttcttcctgccgttcatcctttgcgctttggctacgatagcaaaggctttaattatgtttttgctgaatattattatgggcaatgcggttccggtttattcgcttttttcgattcttttttggatagaactggggcttaattcattatgcgcgcctgttttatttttactcttaaaatattttaagtttattacgcctaaacgctcggccatctga

SEQ ID NO: 67606 - protein, 167 aa, Unknown
  Obtained from environmental sample
  SIGNAL (1)...(20)
  DOMAIN (1)...(157): rod shape-determining protein MreD
  misc_feature (1)..(167): Xaa is any amino acid
MIKNIIWTIILAVTAGILQSTILGNFALFGAVPDLALCIIVYSAYVNGTMTGQLSGFFSGLLLDFLSAAPLGLNCLIRTVIGAVTGIFKGAFFLDVFFLPFILCALATIAKALIMFLLNIIMGNAVPVYSLFSILFWIELGLNSLCAPVLFLLLKYFKFITPKRSAI

SEQ ID NO: 67607 - DNA, 498 bp, Unknown
  Obtained from environmental sample
  misc_feature (1)..(498): n is a, c, g, or t
atgattaaaaatattatttggacaataatccttgccgtagtcgccggtatattacagtcaaccatacttggaaatttcgcgcttttcggcgctgttcccgatcttgctttgtgtattattgtttattcggcatacgtaaacggaaccatgaccggccagctttcaggttttttttcgggattgctgcttgattttctttctgccgcgcctttagggcttaattgccttatacgcaccgttataggggcggtaacaggcatatttaaaggagcgtttttccttgatgtttttttccttccgttcattctttgcgctttggctacgatagcaaaggctttaattatgtttttgttgaatattattatgggtaatgtagttcccgtttattcgcttttttcgattcttttttggatagaactggggcttaattcattatgcgcgccggttttatttttactcttaaaatattttaagtttattacgcctaaacggagttag

SEQ ID NO: 67608 - protein, 165 aa, Unknown
  Obtained from environmental sample
  SIGNAL (1)...(20)
  DOMAIN (1)...(157): rod shape-determining protein MreD
  misc_feature (1)..(165): Xaa is any amino acid
MIKNIIWTIILAVVAGILQSTILGNFALFGAVPDLALCIIVYSAYVNGTMTGQLSGFFSGLLLDFLSAAPLGLNCLIRTVIGAVTGIFKGAFFLDVFFLPFILCALATIAKALIMFLLNIIMGNVVPVYSLFSILFWIELGLNSLCAPVLFLLLKYFKFITPKRS

SEQ ID NO: 67609 - DNA, 1053 bp, Unknown
  Obtained from environmental sample
  misc_feature (1)..(1053): n is a, c, g, or t
atgaaagctttatttataggaggaacgggaacaatatcaagcgcgatttcgagattggccgttcaaaaaggatgggagttatacctgcttaaccgcggcagccgaagcgctgagttcagcggaaagaacatataccatattgattgcgatatccgcaaggaaaatgaaaaagaaatcaggactaaacttgaaagcatactaaaagactcagggcagaaatattttgacgcggcggcggattttatcgcctttgttcccgaaaacctgcaaaaagactttgccgtgttaaacggtctttgccgtcagtttatgtttatttcatccgcctcggcgtatcaaaaaccgctttcatcatacctgattaccgaaagcgccccgctcgctaacccgtactgggaatattcgcgtaataaaattgcctgcgaggaataccttatacagctataccgagaatgcggttttcccatcaccattatccgtccgagccacacttatgacgaacgcagcgtccctctcggcgtccacggcaagaacggaagctggcaggtattaaaacgcatgcttgacggcaagccggttatcatccacggcgacggctcaagcttgtggactctgacgcataacagcgattttgcgcgggcttttgtgccgttaatggcgaatatccacgcgacaggagaggcggtgcaaataaccacggacgaaagcgtaacatggaaccagatttatgaaataatcgcggacgcgctgaatgtaaaacttaacgccgtgcatgtcgcgacagattttctcgcggctgcttcgcaaggccgttacgattttgttggaggtcttacaggcgataaatccaacacggtagtttttgacaacacaaaactaaaacgcctggtccccggtttttatcaacaggtatcaataagcgaaggaatcaggtctaccgtcgccaatgtgcttgcaaaccccgaactacaaaaagaagaccgggaatttgatgaatggtgcgacaaagtaatagcggctcaggaagacgcgcttaaggctttgaaaaaataa

SEQ ID NO: 67610 - protein, 350 aa, Unknown
  Obtained from environmental sample
  SIGNAL (1)...(20)
  DOMAIN (3)...(232): NAD dependent epimerase/dehydratase family
  misc_feature (1)..(350): Xaa is any amino acid
MKALFIGGTGTISSAISRLAVQKGWELYLLNRGSRSAEFSGKNIYHIDCDIRKENEKEIRTKLESILKDSGQKYFDAAADFIAFVPENLQKDFAVLNGLCRQFMFISSASAYQKPLSSYLITESAPLANPYWEYSRNKIACEEYLIQLYRECGFPITIIRPSHTYDERSVPLGVHGKNGSWQVLKRMLDGKPVIIHGDGSSLWTLTHNSDFARAFVPLMANIHATGEAVQITTDESVTWNQIYEIIADALNVKLNAVHVATDFLAAASQGRYDFVGGLTGDKSNTVVFDNTKLKRLVPGFYQQVSISEGIRSTVANVLANPELQKEDREFDEWCDKVIAAQEDALKALKK

SEQ ID NO: 67611 - DNA, 738 bp, Unknown
  Obtained from environmental sample
  misc_feature (1)..(738): n is a, c, g, or t
ttgtcaacaagcacctgcctgtcaaagcggccggggcgcagaagcgcgggatccagcacgtcggggcggtttgtcgccgcaaggacgataagcccgccggtgttgtcaaagccgtccatttcaactaaaagctggttaagcgtctgttcgcgctcgtcattgccgccggaaatgctgtttatcctgctcttgcctattgcgtctaactcatcaataaaaacaatacagggcgctttggttcttgcctgtttgaataaatcccttacgcgggcggcgcctacgcctacaaacatttccacaaagtccgctccgctcatgcgaaagaaagaaactcccgcttcccccgctacagcccgcgccagcaaagtttttccggttcccggcggcccgacaaggagcacgcccttaggaatttttccgcctatatctttgtacttctgcgggttcttcaggaaatcgacaacttcaaaaagttcctcttttgcctcgtcaacgcccgcgacatcgctgaagcgcgtaacaatgtccccctccgcgacaatcacggcgcggttctgcccgacggaaagaacattgccgcctatattgcctatgcgctttaaaacaaagcgccaaagaaaaataaaaatggcaataggtaaaacccaactgataatggaactgagtatcgcgcctccctcgcgcggaacagcgccgtatgcgacatttttttcatccattaacttaataaaatcctga

SEQ ID NO: 67612 - protein, 245 aa, Unknown
  Obtained from environmental sample
  misc_feature (1)..(245): Xaa is any amino acid
MSTSTCLSKRPGRRSAGSSTSGRFVAARTISPPVLSKPSISTKSWLSVCSRSSLPPEMLFILLLPIASNSSIKTIQGALVLACLNKSLTRAAPTPTNISTKSAPLMRKKETPASPATARASKVFPVPGGPTRSTPLGIFPPISLYFCGFFRKSTTSKSSSFASSTPATSLKRVTMSPSATITARFCPTERTLPPILPMRFKTKRQRKIKMAIGKTQLIMELSIAPPSRGTAPYATFFSSINLIKS

SEQ ID NO: 67613 - DNA, 393 bp, Unknown
  Obtained from environmental sample
  misc_feature (1)..(393): n is a, c, g, or t
ttgccggcggacatccacaaagaattggcaaacgcgctaaacggatttttcaaggatattttggacggacaagcaacgcttgagatttttttccaatacccgcgctacctaaaagttttcgcgacaatcatagaaaaggcctctttcgaaccgttcaaatatcggcaaaaacgcgccgaggtcaatcagtacgtatcggtttataatgatttgcagaagaaaaacgccaagccggaaaacgcgcaccgcagcaaccgcttgttgaaggagctgttattaatgataaaggaatttgagatcaatcaattcgcgcaacacattaagacattgttcccggtatcggaacagcggcttgacaaaaaggtcggggagataaagaagctttgttcgtga

SEQ ID NO: 67614 - protein, 130 aa, Unknown
  Obtained from environmental sample
  misc_feature (1)..(130): Xaa is any amino acid
MPADIHKELANALNGFFKDILDGQATLEIFFQYPRYLKVFATIIEKASFEPFKYRQKRAEVNQYVSVYNDLQKKNAKPENAHRSNRLLKELLLMIKEFEINQFAQHIKTLFPVSEQRLDKKVGEIKKLCS

SEQ ID NO: 67615 - DNA, 1377 bp, Unknown
  Obtained from environmental sample
  misc_feature (1)..(1377): n is a, c, g, or t
gtgggcatccagacgggggacgtcactatcaaccaagacgctcagctgcttataatgaccaccgagatattccgcaacctcattctagaaaactcagggcggctgaatgacatctactacgtgatattcgacgaaatccactatttggacgacccggaacgcggcacggtgtgggaggagagcatcattctggcgccgcagggcatacgcttcatgtgcttgagcgccacggtgcccaacatcggcgaacttgctacttggatgggagcggttcgaaataccgcgttcaaggtgattgaggagacgcatagaccggttccgctgcaacatgccttctatcaccccaagttcgggttcatcaccataaaaggcattcggcgcaagttcaagagcagtccggaagtacgcaagcgctttcagcggcgcaaaccgtcgtctcgtaagatagtgcagctcgccgtacgcgaggggcacctgcccatactctatttctgcttcaaccgtcgggcctgcgaacgcaacgccgagcagcacatgatgcacttggatttgctcacggacgcggagcgtactcgggtatcgcagcttgtggacgaattggtgcatcaatacgggataggcgactacgagcgtttgaactttttgcggcagttgtgggaatccggctgcgcctaccaccacgcggggatattgccggccgctaaggagatcgtggagcggctctttacgatggggctgataaaactgctgttctgcacggagaccttcgcgcttggtgtcaacatgccggcgagttcggttatttttgatgaattggaaaagttcgacggcgtgcagtttaactatttgatgacccgcgagtacaaccaaatggccggccgcgccggacggcgcggaatggacgaggtgggctacgtctactcgcaggtgattccggaggccaccgaccccgatcagttggagcgcatactatacggcgtcaacgagcgtatcaacagccggttttacgcctcgtattcgacgatactctccctatacagccagttcggcgacggagcgtttgatatcttccgcaagagtctgcacaatttccgcaagggcgtcttttcgatgtcgaagatttatcagaaagaggaggcgcagataaggaatagaatcaagttcttgcaggcaagcggctttttggacgggacgaagctgacgcccaagggacagttggcggcggcggtgagcggttacgagatacagacggcggagctctattactgcagggactttgaggacgtctcggcggcgcagctgccggtggttcttgccgcgttgattaccgaggaggcgcgtaaccgcaaggccgcgcccatcaccaacgtcgcttga

SEQ ID NO: 67616 - protein, 458 aa, Unknown
  Obtained from environmental sample
  DOMAIN (215)...(299): Helicase conserved C-terminal domain
  misc_feature (1)..(458): Xaa is any amino acid
MGIQTGDVTINQDAQLLIMTTEIFRNLILENSGRLNDIYYVIFDEIHYLDDPERGTVWEESIILAPQGIRFMCLSATVPNIGELATWMGAVRNTAFKVIEETHRPVPLQHAFYHPKFGFITIKGIRRKFKSSPEVRKRFQRRKPSSRKIVQLAVREGHLPILYFCFNRRACERNAEQHMMHLDLLTDAERTRVSQLVDELVHQYGIGDYERLNFLRQLWESGCAYHHAGILPAAKEIVERLFTMGLIKLLFCTETFALGVNMPASSVIFDELEKFDGVQFNYLMTREYNQMAGRAGRRGMDEVGYVYSQVIPEATDPDQLERILYGVNERINSRFYASYSTILSLYSQFGDGAFDIFRKSLHNFRKGVFSMSKIYQKEEAQIRNRIKFLQASGFLDGTKLTPKGQLAAAVSGYEIQTAELYYCRDFEDVSAAQLPVVLAALITEEARNRKAAPITNVA

SEQ ID NO: 67617 - DNA, 1215 bp, Unknown
  Obtained from environmental sample
  misc_feature (1)..(1215): n is a, c, g, or t
atgcgaataaccagcctagtcaaaactgccggaaagagcatcctgcgcaaccgcgtacgctccctgctcactatgctcggcattatcatcggcgtagcctctgtcgtcgtcatggtttccataggcgagggcgcccaacttgacattcgccaacaaatagaatccatgggtactaatgtattaaccatccgacctggcaacatgagccgcggcggtattcgcattgctcaaggtatgcgtacgctcaccattcaggacgttgaccgtctacgcagtctgcccggcgtcgccgccatctcgcctgtctcacgcgctacggggcagatcgtaggcggcgcaggtaattggcgtactcaggcgcttggcgttaccgctgattacctcacgattcgcagttgggagcttgacgatggcgtaatgttcacagagcaagataccaaaagttcggcgaaaatcgccatcattggcaagaccgtcgtgaacgagctctttccaaacatcgaccccatcggacaatccatccgcataggcgcgatccccgtcaaggtggttggcgtactgcgggcgcgcggtcaaggcccaatgggcgacgaccaggacgacatcctcctcatgcccgtcacgacggtaatgcagcggatgaacggcactacgcgcttcatcgaccaaataatgatcagcaccgagtctatggatgtcataaacgacgtgcaggcgcaagccgaggaggcgttgcgggcggcgcaccgcctctcgccgtcggaagataacgacttcaatatccgcaaccaatcggagatgatggaacgcgccaccgagaccgcccgcgtcatgaccatgctgctcggcgccatcgcaggcatctcgcttgtggtcggcggcatcggcatcatgaacatcatgctcgtatcggtcaccgagcgcacacgcgaaatcggaatccggatggccgtaggggcgagagaaggggacatattaatgcagttcctgatagaggcgatagttctgagcgttatgggcggtcttatcggcgtggcgctgtcgatagcgcttatctgggtgatgaacgacttcgtgggtgtgacgacggtctttgcgccgcagacgattcttatgtcgatgggtttctcgggattcgtgggcgtcttcttcgggttctatccggcccgaaaagcggcgcggcttaatccgattcaggcgttgcggtttgagtaa

SEQ ID NO: 67618 - protein, 404 aa, Unknown
  Obtained from environmental sample
  DOMAIN (221)...(397): Predicted permease
  misc_feature (1)..(404): Xaa is any amino acid
MRITSLVKTAGKSILRNRVRSLLTMLGIIIGVASVVVMVSIGEGAQLDIRQQIESMGTNVLTIRPGNMSRGGIRIAQGMRTLTIQDVDRLRSLPGVAAISPVSRATGQIVGGAGNWRTQALGVTADYLTIRSWELDDGVMFTEQDTKSSAKIAIIGKTVVNELFPNIDPIGQSIRIGAIPVKVVGVLRARGQGPMGDDQDDILLMPVTTVMQRMNGTTRFIDQIMISTESMDVINDVQAQAEEALRAAHRLSPSEDNDFNIRNQSEMMERATETARVMTMLLGAIAGISLVVGGIGIMNIMLVSVTERTREIGIRMAVGAREGDILMQFLIEAIVLSVMGGLIGVALSIALIWVMNDFVGVTTVFAPQTILMSMGFSGFVGVFFGFYPARKAARLNPIQALRFE

SEQ ID NO: 67619 - DNA, 549 bp, Unknown
  Obtained from environmental sample
  misc_feature (1)..(549): n is a, c, g, or t
gtgatcgcgagagagcccagatatgttgaagagatgatggacgagcggaaagcggcgagggacggcggcgtgggcgggatggcggatggaggtatgattccggacggcggtgtcggtatgattgcggtgaagggcgacggcggcgggacgacgggcggcggtcggggcgacggtcagtttaaaatggatagggaacgccgtaaggatggcggtggcgacggtcgtcgtcaaggcggggaaggtcggggcgaaggccgccgtgagggcggtcagggcgggggagggaagagaccgccggcaagcgtcacgggcagccgcggagttctgtggacattggacgaaaacggcgcgttcaaaccggtgttcgtgaaggtagggttgagcgacggcgttacaaccgttgttaccggaaaagacgatttgacagaggggatgaaggttgtagtcagcgaggttaggagcgaaaaggacaagaagtcgccgttggataagaagaaacagaacaacccgctgatgccgggcggcgggggcggtcctagaaggatgtaa

SEQ ID NO: 67620 - protein, 182 aa, Unknown
  Obtained from environmental sample
  misc_feature (1)..(182): Xaa is any amino acid
MIAREPRYVEEMMDERKAARDGGVGGMADGGMIPDGGVGMIAVKGDGGGTTGGGRGDGQFKMDRERRKDGGGDGRRQGGEGRGEGRREGGQGGGGKRPPASVTGSRGVLWTLDENGAFKPVFVKVGLSDGVTTVVTGKDDLTEGMKVVVSEVRSEKDKKSPLDKKKQNNPLMPGGGGGPRRM

SEQ ID NO: 67621 - DNA, 1680 bp, Unknown
  Obtained from environmental sample
  misc_feature (1)..(1680): n is a, c, g, or t
gtgcgccgccgatactgttcaatttcttcaacaatttctatggcatgggtggacagacctccggggagacaatgggttacggcgttatggccagagtcggcgcgggcgtcaatcccgacaacatgcacgccgaacgggttgacggctacaatcccctggcggtggcggacgctgtggctcgaaaaaaggccctgctgcttgaagggcaagggcccggtgctgcttgataccatcacctaccgtacctcaggccattccccctcggatgcttccagttatcgcacacccgaagaagtaaaactttggcaggaagcagattccatcgaagcttacggcgcgtacctaatcgaaaacagggccgcgaccaaaagcgagcttgattcgttgcgcgaaggtataaaagcgaaactgattgaagtggtgaaacttgcaactaacgacgaggcatcaccaagagtaagcggagcttttatagagtcagtgatgttctccaacgggaaggccgagaaactggacgagcgcgagcctgaaataattcagagcgtggcagaaaacccgcgtgtcaaggctcttgcgggaaaagtccgctacggtttcgacgcggaaggcaagcctgtctcaaagaacaaggcgtttcaataccgggacgcgttgtttgaggccgtccttcaccgtttcacgattgaccccaccatggcggcatggggcgaggaaaaccgcgactggggcggcgctttcgctgtttatcgcggccttaccgacctcttgccctaccaccggcttttcaacagccccatctccgaaggtgccgttgtgggcgcgggcgtgggttacgcgctatccggcgggcgggcgctggtggagctgatgtattgcgatttcctgggaagggcaggggacgaaattttcaaccaggcctcaaaatggcagtctatgtcagcggggctccttaaaatgcccctggtggttcgggtttcggtgggcaacaaatacggcgcacagcatagccaggactggtcggcccttaccgctcacattcccggcctgaagtcctactttcccgccacgccctacgacgccaagggaatgttaaacctggcgcttcgcggcacggatcccggtgatctttttgaaagccagctattgtacgacataagcgagcagtttgaaaaagccggggttcccgaaggttactacgaggttcccgaaggcgagcctgttatacgcaagcagggcaaggacatcaccattgccaccttgggggccacgctatacaaagcaatggaagccgcgaaaaaactggaaacgcaattcggtatttccgttgaactcatagatctgcgttttatcaatccccttaattacgagaagatcatcgagtcggttaagaagaccggaaagatactccttgcaagcgacgcagcggagcgtggttctttcctacacaccgttgccagcaatatccaaatcctggcctttgattaccttgacggccctgtaacggttgtcgggagccgcaactggatcacgccggcggcggaaatggaagagctttacttcccgcaagttgactggatcatagacgccgttcatgagcgcatactgcccctgcctggttacaatccggtaacggtgcagaccacgggggatttgctcaggaagaacaagcagggtgtgtag

SEQ ID NO: 67622 - protein, 559 aa, Unknown
  Obtained from environmental sample
  DOMAIN (212)...(385): Transketolase, pyridine binding domain
  misc_feature (1)..(559): Xaa is any amino acid
MRRRYCSISSTISMAWVDRPPGRQWVTALWPESARASIPTTCTPNGLTATIPWRWRTLWLEKRPCCLKGKGPVLLDTITYRTSGHSPSDASSYRTPEEVKLWQEADSIEAYGAYLIENRAATKSELDSLREGIKAKLIEVVKLATNDEASPRVSGAFIESVMFSNGKAEKLDEREPEIIQSVAENPRVKALAGKVRYGFDAEGKPVSKNKAFQYRDALFEAVLHRFTIDPTMAAWGEENRDWGGAFAVYRGLTDLLPYHRLFNSPISEGAVVGAGVGYALSGGRALVELMYCDFLGRAGDEIFNQASKWQSMSAGLLKMPLVVRVSVGNKYGAQHSQDWSALTAHIPGLKSYFPATPYDAKGMLNLALRGTDPGDLFESQLLYDISEQFEKAGVPEGYYEVPEGEPVIRKQGKDITIATLGATLYKAMEAAKKLETQFGISVELIDLRFINPLNYEKIIESVKKTGKILLASDAAERGSFLHTVASNIQILAFDYLDGPVTVVGSRNWITPAAEMEELYFPQVDWIIDAVHERILPLPGYNPVTVQTTGDLLRKNKQGV

SEQ ID NO: 67623 - DNA, 1056 bp, Unknown
  Obtained from environmental sample
  misc_feature (1)..(1056): n is a, c, g, or t
atgccaaaatctatccttgtagatcccaaagaactacgaaaaccacaaatcctcaagctgaaagacatcccaatcaatcagtataaaagcgacttcaaaaaagaggttgagttgtacggcaaggagcggcttgtacgcgtctggcacgacatggcggtaattcgggaatttgaatctatgctcaacgagttcaagaccaaagggacgtggaacgggattgagtacaaccacaaagggccggctcatctttccatgggtcaggaagcgtccgcggttgggcagagcgtaaatctcacttccgacgattttatttttggcagccatcggagtcacggtgaaataatcgccaagtgtttttccgctatttggcagctctcgcattctgcgccgcaaaacgccgaaggtgagaaaaagctccatgacatcatgaaaagttttctggaaggggaaactctatcggctgccgaaaagatcccacataaaaacctgtgtgaccttgcggagaactttgccctatatggaactcttgctgaaatcttcgccaggaaggcaggctttaaccgcggccttggcggttccatgcacgccttctttacgcccttcggctccatgcccaacaacgcaatcgtgggcggctccgctgatattgctgtgggtgcggcgctttacaagcggatcaactgcaagcctgggatcgttattgccaacatcggcgacgcgtcaatgggctgcgggccggtatgggaagggatgatgttatcagcaatggatcagtacaataccctttggcctgaaagcaaactgaaaaaagccggagcggtcggcaaaggtgcgccgccgatactgttcaatttcttcaacaatttctatggcatgggtggacagacctccggggagacaatgggttacggcgttatggccagagtcggcgcgggcgtcaatcccgacaacatgcacgccgaacgggttgacggctacaatcccctggcggtggcggacgctgtggctcgaaaaaaggccctgctgcttgaagggcaagggcccggtgctgcttga

SEQ ID NO: 67624 - protein, 351 aa, Unknown
  Obtained from environmental sample
  misc_feature (1)..(351): Xaa is any amino acid
MPKSILVDPKELRKPQILKLKDIPINQYKSDFKKEVELYGKERLVRVWHDMAVIREFESMLNEFKTKGTWNGIEYNHKGPAHLSMGQEASAVGQSVNLTSDDFIFGSHRSHGEIIAKCFSAIWQLSHSAPQNAEGEKKLHDIMKSFLEGETLSAAEKIPHKNLCDLAENFALYGTLAEIFARKAGFNRGLGGSMHAFFTPFGSMPNNAIVGGSADIAVGAALYKRINCKPGIVIANIGDASMGCGPVWEGMMLSAMDQYNTLWPESKLKKAGAVGKGAPPILFNFFNNFYGMGGQTSGETMGYGVMARVGAGVNPDNMHAERVDGYNPLAVADAVARKKALLLEGQGPGAA

SEQ ID NO: 67625 - DNA, 828 bp, Unknown
  Obtained from environmental sample
  misc_feature (1)..(828): n is a, c, g, or t
gtggattccaccggacttctggctgtagaaagcgtacccaggcgtcttacggttatcggcggcggggttatcggcgtggaatttgccggacttttttccgcgctgggagtggaagtaacggtaatcgaaatgatggacgagattgttccctttatggacaaggagcaggcccccttgcttcgccgcgcaatgaaaggagtggactttaagctgggctgtaaagttgaaaaaatggaaggtgcggcggtgcattacaccgacaaaaaagggaaatccgaaataaaagaggccgaccttgttctgatggccgttgggcgaaaaccggtgactgacacctggggcgccgccgccgcaggcattgactttagtccgaagggtgttgccgttgacgacagaatgagaaccaacattcccggtatttgggcggcgggggacgttacaggtaaaagcctccttgcccattctgcctatcgcatggcggaagtcgccgtcgcggacatccttgcgggtgaccatgccggcggccagactaaccgaatgaggtataacgctgtaccttgggcggtgtacggtcttaccgaagccgccggagtcggcatcacagagcaggaagccgaagcaaaaggcattgccattctaaagtcggttcttcccatgagagtttccggccgcttcgtcgcggaaaatacgctgatgggtcatggggccgtgaaggttatcgcggacgcgaatgaccgccgcatcctgggcgttcacgctgtgggcgcgtatgcctcagaatttatctggggcggcggcggcgctcatcgaacaggaattcagaattga

SEQ ID NO: 67626 - protein, 275 aa, Unknown
  Obtained from environmental sample
  DOMAIN (15)...(150): Pyridine nucleotide-disulphide oxidoreductase
  misc_feature (1)..(275): Xaa is any amino acid
MDSTGLLAVESVPRRLTVIGGGVIGVEFAGLFSALGVEVTVIEMMDEIVPFMDKEQAPLLRRAMKGVDFKLGCKVEKMEGAAVHYTDKKGKSEIKEADLVLMAVGRKPVTDTWGAAAAGIDFSPKGVAVDDRMRTNIPGIWAAGDVTGKSLLAHSAYRMAEVAVADILAGDHAGGQTNRMRYNAVPWAVYGLTEAAGVGITEQEAEAKGIAILKSVLPMRVSGRFVAENTLMGHGAVKVIADANDRRILGVHAVGAYASEFIWGGGGAHRTGIQN

SEQ ID NO: 67627 - DNA, 552 bp, Unknown
  Obtained from environmental sample
  misc_feature (1)..(552): n is a, c, g, or t
ttgcctccgcgctgtacgaagaagaatgagcctatatcttttccggtataccgcctttatgatgagatagaaccgcttatgggcctggaggatgcggctttccgcggagggcaaaagccgccccttgccgtgatggtggaatggggaaccgaaacctttatccccaatgtgcgttccgtgtccctgccggtacagtctctgtcaattgccaatgtactcaacggcaaagcggacagcaaaggttataccgaaagttccaatgcagtccgtttcagctgcccccgcgcgcggctgctcgtggtagatgacatcgccaccaacctcaaagtggtcgaaggccttcttgccccctaccgggcggtgatagatatctgcctcaacggtttgcaggccattgaactggtaaagcgcaacgattacgatattgtattcatggatcacatgatgcccgaaatggacggcatcgaagccacagtagccataagagagatagaaatgaataacagcagaaaaaagattccggttatcggcaaattcccattattgcgctga

SEQ ID NO: 67628 - protein, 183 aa, Unknown
  Obtained from environmental sample
  DOMAIN (96)...(178): Response regulator receiver domain
  misc_feature (1)..(183): Xaa is any amino acid
MPPRCTKKNEPISFPVYRLYDEIEPLMGLEDAAFRGGQKPPLAVMVEWGTETFIPNVRSVSLPVQSLSIANVLNGKADSKGYTESSNAVRFSCPRARLLVVDDIATNLKVVEGLLAPYRAVIDICLNGLQAIELVKRNDYDIVFMDHMMPEMDGIEATVAIREIEMNNSRKKIPVIGKFPLLR

SEQ ID NO: 67629 - DNA, 906 bp, Unknown
  Obtained from environmental sample
  misc_feature (1)..(906): n is a, c, g, or t
atgcgggaaatgtttatagaaaacggtttcaacgattttctttccaaacccatagacgtttccaaactggatgaaatgcttaacagatggatacccaaggagaagagggaagagggaacggggaacagggaacagggaacagataacagtgaacagataacagagaacggggaacagggaacggacgcccagganagcaccgcgtcaagcggtgtaaatgaggaagggcaacagggcgggagccccaataatggctacagtaacaatatangcgggtctgctttagcagacccagcgggcgttgggctggctatccccggcatcgacatacaaaaaggcatcgccatgaccggcggaactttattggcttataaacaggtattgtccctgttctgcagagatgtggaagaacggctgccgctgctgcaaaaaataccggaaacagacccgcctttggcggacgctttacccgcgttggtaaccaatattcacgccttgaaaagcgcgtccgcttctattggcgcggcgaaagtttcggaccaggccgcgaaacttgaaagcgaaggtaaggccgggaacctggcttttatccgcgaaaatctgcccgcctttgcgcggcagcttgcggaattgatacgcgccattaaaaaagccctggaaaccaaagcgccggatgatcataagaatcctgaaccttcaccgcacgccgctcattctccgttatttaaagaacttgccgatgccctggaagcccaaaacgtatccgacattgaccatattctggacgaactcagccaaaaaccgctggataaacaaaccagagaagcgctggaaaaaatttccgatgatgtattgatagctgaatatgacagcgctataaaaactattgaagaattattaaaataa

SEQ ID NO: 67630 - protein, 301 aa, Unknown
  Obtained from environmental sample
  DOMAIN (126)...(218): Hpt domain
  misc_feature (1)..(301): Xaa is any amino acid
MREMFIENGFNDFLSKPIDVSKLDEMLNRWIPKEKREEGTGNREQGTDNSEQITENGEQGTDAQXSTASSGVNEEGQQGGSPNNGYSNNIXGSALADPAGVGLAIPGIDIQKGIAMTGGTLLAYKQVLSLFCRDVEERLPLLQKIPETDPPLADALPALVTNIHALKSASASIGAAKVSDQAAKLESEGKAGNLAFIRENLPAFARQLAELIRAIKKALETKAPDDHKNPEPSPHAAHSPLFKELADALEAQNVSDIDHILDELSQKPLDKQTREALEKISDDVLIAEYDSAIKTIEELLK

SEQ ID NO: 67631 - DNA, 540 bp, Unknown
  Obtained from environmental sample
  misc_feature (1)..(540): n is a, c, g, or t
atgtatagactaatttattatatttatgttatgataaaaaaaatggcaagttcaaagacttttcaggttgatcaaaaggtagtttatcccagccagggcgtggggataattaaatccatcattcaaaagaaatttaaagacgcgaaaattccntactatgttatatatattgaagttaccgacatgacaataatggtcccggttgacaaagccgccggtcttggcatacgttccacagtttccagagacgaagcgtccaaggcgcttgagtcaatcaaggatgactacgatccaatcccttcggactggaagatgcgttatcagatgaatctggatcttcttaaaaaaggaagcatcagggatatagcgagcattgtgcgctccctgtatcacagaagcaaagtaaaagagctgcctattctggagcgcaaactctacgattccgcttttagactgcttgttgacgaagcgtcaatctcgctgaaaaaatccaaagaagaagttgagcagatgatttattccaggctggaacttgagtag

SEQ ID NO: 67632 - protein, 179 aa, Unknown
  Obtained from environmental sample
  DOMAIN (20)...(130): CarD-like/TRCF domain
  misc_feature (1)..(179): Xaa is any amino acid
MYRLIYYIYVMIKKMASSKTFQVDQKVVYPSQGVGIIKSIIQKKFKDAKIPYYVIYIEVTDMTIMVPVDKAAGLGIRSTVSRDEASKALESIKDDYDPIPSDWKMRYQMNLDLLKKGSIRDIASIVRSLYHRSKVKELPILERKLYDSAFRLLVDEASISLKKSKEEVEQMIYSRLELE

SEQ ID NO: 67633 - DNA, 1209 bp, Unknown
  Obtained from environmental sample
  misc_feature (1)..(1209): n is a, c, g, or t
atggcggaaatcagaaaactgacggcggacgacatactccagctaaaaaaaatacatacggtcgtctacaaccagcgcagggactattcaaccgaagaaaaccaaaaaacagatccgctggatcatccgccggattgggcatggggcgtctttgataaaacgaaacttcttgccgggatgtacgagcttgattaccttatgcgctttgacggaaacagcgttaaaatgtccggaataagcggagttgggactttgcccgaggcgcgcaaagacggccacatacggcgaatttttgaaaaactgctgccgcaggcccgcgaaaaaggggtggttttttccaatctttgcccgttttcccatgatttttaccgaaaattcggctatgaaaccgcctgcgccagaaaaaatataaccatcccgacaggcgatttaccggaaataaaaccatcggggcagtttattcatattcttcccggagacgacacctcgcttctcgcgcaggttcattcggcgtacatatcggacgtcaaccacgggattcacagggattattggccggacaaccgcgcgtggaaacgatttacaagagaagacccgtatacttccggaacgtacctgtatttgtggaaggacgaaaacggtatcgcgcgcagttacatacagtacaaagacgtcatggaagacggcgaccacaatatgtctgtaacggagcttgcctttatggacaaaaagggactttacggcgcgcttggcataataggcggcctttccgcccaatttgagaatttcaaatggatgatgcccacatttatcgaccctgccgattttacgggcgacgcgtggtctattgaacagaaaatcaatccaagagacatgacaagggtgataaatgttaaaaccgcccttgagctgatgcgccaccccgggaacgaaggcgagtatgttatcgaagttgaagatgaaaacattgaagctaactcgggcaggtatctggtgcagtttggggcgcagggtacaaaagtttcgattacaaagaaggacgcggatatttcatgcgacattttaacattaagccagcttgttacgggctacaggtctttggaaaacgctctgtactcaaggcgcgaagggctggaaattcacggtaatattgaaacgctaaaaacagtattcacagagcgccctcaacatataacggaatatttttga

SEQ ID NO: 67634 - protein, 402 aa, Unknown
  Obtained from environmental sample
  misc_feature (1)..(402): Xaa is any amino acid
MAEIRKLTADDILQLKKIHTVVYNQRRDYSTEENQKTDPLDHPPDWAWGVFDKTKLLAGMYELDYLMRFDGNSVKMSGISGVGTLPEARKDGHIRRIFEKLLPQAREKGVVFSNLCPFSHDFYRKFGYETACARKNITIPTGDLPEIKPSGQFIHILPGDDTSLLAQVHSAYISDVNHGIHRDYWPDNRAWKRFTREDPYTSGTYLYLWKDENGIARSYIQYKDVMEDGDHNMSVTELAFMDKKGLYGALGIIGGLSAQFENFKWMMPTFIDPADFTGDAWSIEQKINPRDMTRVINVKTALELMRHPGNEGEYVIEVEDENIEANSGRYLVQFGAQGTKVSITKKDADISCDILTLSQLVTGYRSLENALYSRREGLEIHGNIETLKTVFTERPQHITEYF

SEQ ID NO: 67635 - DNA, 534 bp, Unknown
  Obtained from environmental sample
  misc_feature (1)..(534): n is a, c, g, or t
gtgaccgaaaaatcgttatttgccgggttcggcggacagggcattgtttctcttgggcaaatttgggtgtattgcgccatgcgggagggcaaaaacgtcacctattttcctttttacggcgcggaaaagcggggcggcatagccagagccggtgttatcgtgtcagacaacgaaattgccagccctttggttaccaaacctgactccgtattggtgatgaacagcgattctctgccaatttgtgaggaaatactcaaggaaaacggccttatgttgataaattccagcctggttaaggaaaatcccaaacggaatgacataaaaatcgtcaaaatcgaggcgacaagcatagcggaacagaaaggaaacgcccgttttgccaatatggtggcgctgggcgcaatggcaaagcttaccggcgccctttccctggacaacattgaagaaattctgcgaaattttttcgccccggacaagcaccatttcatcccgacaaacgtccaggcaataaaagcagggtatagcgcggtataa

SEQ ID NO: 67636 - protein, 177 aa, Unknown
  Obtained from environmental sample
  DOMAIN (11)...(175): Pyruvate ferredoxin/flavodoxin oxidoreductase
  misc_feature (1)..(177): Xaa is any amino acid
MTEKSLFAGFGGQGIVSLGQIWVYCAMREGKNVTYFPFYGAEKRGGIARAGVIVSDNEIASPLVTKPDSVLVMNSDSLPICEEILKENGLMLINSSLVKENPKRNDIKIVKIEATSIAEQKGNARFANMVALGAMAKLTGALSLDNIEEILRNFFAPDKHHFIPTNVQAIKAGYSAV

SEQ ID NO: 67637 - DNA, 447 bp, Unknown
  Obtained from environmental sample
  misc_feature (1)..(447): n is a, c, g, or t
ttggcatatcaaaacgcagtatccacctataaagagacgaagataaagacggccggccaaggtcagcttattatcatgctgtataacacggcggtaaggcagcttgatgaggcgctgtttttattacaggcgaacgattccggaaagaaagatccgagtaaattcgagaaagtcggaaaggctgtggttaaaacacaggaaattatttccgaactgatggtttccctcgattttgagcagggcggcgaaattgccgctaacctcttttctttgtatacctggttcaatcgggaacttatggaagccaatataaaccaggacgcaaaacgcatttccattgtaagaagccacatcgaaaatcttcgcaacgcatggcaggaagtcgtatcttcaaacgcttttgaaactgccagcaccgaggttttaggcgttaacatcgcaatgtga

SEQ ID NO: 67638 - protein, 148 aa, Unknown
  Obtained from environmental sample
  DOMAIN (3)...(132): Flagellar protein FliS
  misc_feature (1)..(148): Xaa is any amino acid
MAYQNAVSTYKETKIKTAGQGQLIIMLYNTAVRQLDEALFLLQANDSGKKDPSKFEKVGKAVVKTQEIISELMVSLDFEQGGEIAANLFSLYTWFNRELMEANINQDAKRISIVRSHIENLRNAWQEVVSSNAFETASTEVLGVNIAM

SEQ ID NO: 67639 - DNA, 510 bp, Unknown
  Obtained from environmental sample
  misc_feature (1)..(510): n is a, c, g, or t
atgccaatagcgttaaaagaaagaaaaacaataataagcgatagcgaacttgcgcagcgcgtggctgtcatcaaacggtttaaggagcttcttgtgcagcagtgcgagcggttccgttgttatcttgccgtgctggacagacagcagcttctcatcggtatcgacagcgcggatgagataatagcccatgttgaactggaagagcaaatcgtcgcggatattttttccatccagaaagtcattgattccatggaagttatgtataacgccgcaggcaatagcgcaggcccatatctttcggccaatgatattcctgagttaaaagccacgctggaagaattaaaaatccaggccgcagtcagatcggggcgaaaccgggatatgctttccagccgcatggaagaaatcaatagagatatacaagcaataaaaaacaacccgtttatgtcaactgtccgtttttcgttgtatcataatgccgccccttcgttagtcgatattatgggttaa

SEQ ID NO: 67640 - protein, 169 aa, Unknown
  Obtained from environmental sample
  misc_feature (1)..(169): Xaa is any amino acid
MPIALKERKTIISDSELAQRVAVIKRFKELLVQQCERFRCYLAVLDRQQLLIGIDSADEIIAHVELEEQIVADIFSIQKVIDSMEVMYNAAGNSAGPYLSANDIPELKATLEELKIQAAVRSGRNRDMLSSRMEEINRDIQAIKNNPFMSTVRFSLYHNAAPSLVDIMG

SEQ ID NO: 67641 - DNA, 591 bp, Unknown
  Obtained from environmental sample
  misc_feature (1)..(591): n is a, c, g, or t
atggaaaacgtgctggctttactcagagattccggggctatgcttgaagggcatttcctactgagttcagggcgccattcagacaaatactttcaatgcgcaaaacttctgcaatacccggaaaaagccgcggcggcgctcgccggcgtggcggaacaaatcaggaaggacatacaggccggcaaactaacaatacatgccgttgtcggccctgctatgggcggaattattgtcgcctacgagctgggcagacaattggggcttccggcattttttaccgagcgcgacgacaccggaaaaatggctctgcgccgcggttttgaagtgaagcccggacaaaaaatattgattaccgaggatgtggtaaccaccggaaaatcttacggcgagtgcgccgccgtccttcaggaacacggggccgaaattgccgcccttgcctgtatagtggacagacgcagcgccggtattgatatcccgtggctgttttatcccgcatgtaaggttgacgctttaaactgngaagccggcgcctgcgagctttgcaaaaagggaataccggcggtaaaaccaggctcgcgaaaaggggcatag

SEQ ID NO: 67642 - protein, 196 aa, Unknown
  Obtained from environmental sample
  DOMAIN (32)...(159): Phosphoribosyl transferase domain
  misc_feature (1)..(196): Xaa is any amino acid
MENVLALLRDSGAMLEGHFLLSSGRHSDKYFQCAKLLQYPEKAAAALAGVAEQIRKDIQAGKLTIHAVVGPAMGGIIVAYELGRQLGLPAFFTERDDTGKMALRRGFEVKPGQKILITEDVVTTGKSYGECAAVLQEHGAEIAALACIVDRRSAGIDIPWLFYPACKVDALNXEAGACELCKKGIPAVKPGSRKGA

SEQ ID NO: 67643 - DNA, 708 bp, Unknown
  Obtained from environmental sample
  misc_feature (1)..(708): n is a, c, g, or t
ttgggcctggcaaaggcattccatgagcttggcaacaaagtcatcatcgccggcaggcgcaggagcttgctggacgacgtggccaagcagcaccagggcatggccacgtacgccttcgacgtacagaggcccgaagaaatcaaaaaattcagcgaatggcttcgcaacaaccactctggcctcaacgtgctcatcaacaacgccggcatcatgcgggaggaaaaccttctggaaataaaaagcacggacgacatggaggcaatcatctccaccaacctcttgggccccatccgcttgaccgccgctctgcttccgggcctgctggggcagccccatgccacggtgataaatgtttcctcgggcctgggcttcgtgccgatggccagcgcgccgacctattgcgccgcaaaggccgcaatccactcgtacacccagagcctgcgctaccagctcaaggacaccaaggtgcaggtcatagaaataatccccccttacgtggccaccgacctcctgcgcggagcaaaagacccaatggcaatgccgctggcggagttcatcgaagaggcgatggggataatcaagtcacagcactacgctggcgaaatatgcgtggagagggtcaagccgttcaggcatgctgcggaatccatcaactatgaaaacttctactaccgcctgaacagcggcggcaggcgagtcccgcgttag

SEQ ID NO: 67644 - protein, 235 aa, Unknown
  Obtained from environmental sample
  DOMAIN (2)...(152): short chain dehydrogenase
  misc_feature (1)..(235): Xaa is any amino acid
MGLAKAFHELGNKVIIAGRRRSLLDDVAKQHQGMATYAFDVQRPEEIKKFSEWLRNNHSGLNVLINNAGIMREENLLEIKSTDDMEAIISTNLLGPIRLTAALLPGLLGQPHATVINVSSGLGFVPMASAPTYCAAKAAIHSYTQSLRYQLKDTKVQVIEIIPPYVATDLLRGAKDPMAMPLAEFIEEAMGIIKSQHYAGEICVERVKPFRHAAESINYENFYYRLNSGGRRVPR

SEQ ID NO: 67645 - DNA, 585 bp, Unknown
  Obtained from environmental sample
  misc_feature (1)..(585): n is a, c, g, or t
atgcgggacatacaggattttgattcgataatgattcggctggcttcgccggagatgatcaggaactggtcgtatggggaagtaaagaaaccggaaaccataaattaccggacgcttcgtccggaaaaagacggcctcttctgcgaaaggattttcggcacgacaaaggaatgggaatgttattgcggtaaattcaagtcgatacgctacagaggactgatctgcgaccgctgcggcgtcgaggttactcacttcagggtgcgccgggaacgcatgggccacatagaactggcggctccggtttcgcatatttggtattaccgctctgttcccagccgcatgggcctgctccttgatatgtctatgacggccctccgatcaggggcttattacgaaaaatatgttgtcattgaccccgccgacacggagttgaaaaaagggcagatgctctccgaggacgaattcgccgcggagcaagaacgctatggcggcggttttccgcgggcatgggcgccgaagcgatccgcaccctgctggaaaacatcgatctggacaagctggccgctgaactgcgggaaaaaatga

SEQ ID NO: 67646 - protein, 194 aa, Unknown
  Obtained from environmental sample
  DOMAIN (4)...(194): RNA polymerase Rpb1, domain 1
  misc_feature (1)..(194): Xaa is any amino acid
MRDIQDFDSIMIRLASPEMIRNWSYGEVKKPETINYRTLRPEKDGLFCERIFGTTKEWECYCGKFKSIRYRGLICDRCGVEVTHFRVRRERMGHIELAAPVSHIWYYRSVPSRMGLLLDMSMTALRSGAYYEKYVVIDPADTELKKGQMLSEDEFAAEQERYGGGFPRAWAPKRSAPCWKTSIWTSWPLNCGKK

SEQ ID NO: 67647 - DNA, 2304 bp, Unknown
  Obtained from environmental sample
  misc_feature (1)..(2304): n is a, c, g, or t
atgggcgccgaagcgatccgcaccctgctggaaaacatcgatctggacaagctggccgctgaactgcgggaaaaaatgatagaaaaaggcgcaaagagcgacaagaaactcctcaagcgcatcgaaatcgtggagaatttccgcaattcccagaacaagcccgaatggatgatacttgacgtgattccggttataccgccggaactgcgtcccatggtacagcttgacggcgggcgttttgccaccagcgatcttaatgacctgtaccgccgcgtgatcaacaggaacaaccgccttaaaaggctgcaaacgcttaacgcccccgacatcattatacgcaacgaaaagcggatgcttcaggaagcggtggacgctctttttgacaattccaagaaaaagaaagtggtgaaaggttcttccaaccggccgctcaaatcgatcagcgatatgctcaagggaaaacaggggcgcttccgtcagaaccttttgggcaagcgcgttgactattcaggccgttcggtcattaccgtcggcccggatctcaagatttggcagtgcgggcttccgacaaaaatggcgattgagctgttcaagccttttataatgaaaaaactcgttgacaaggatgttgtctacaatattaaaaaagccaagatgctgcttgaagccgagagcgcggaaattttcgcaatcctcgatgaggtggtaaaagaacacccggttctgctcaaccgcgcccccacgctgcaccgtctgggtatccaggcctttgagccgctgctggtcgaaggcaaggccatccaactgcacccgcttgtctgttccgcctacaacgcggacttcgacggcgaccagatggccgtgcatattccgctgtccatggaagcgcagattgaatgccgcgtgctgatgatgagcacgaacaacatcctttcgccggccaacggcgcgcccgttatcgtgccttcgcaggatatcgtgctgggcctgtattacatgacggtggaccgccactttgaaaagggcgaaggcatgaccttctgcgcgccctgggaagtggtggccgcctacgacgcgaaccggctcgccctgcacgcgcgcatcaaggtgcgcatgccggacggcacgctggcggaaaccaccaccggccgcatcctgatcggtgaaatcctgcccaagggcgtacccttcgagttggtcaactgcgtgctgaccaaaaagaacatcgcccgcctggtgggttcggcctaccgcgatgcgggcatcaaggccacggtcatcctctgcgaccgcctgaaggatatcgggtacgagtacgcgacccgcgcgggtgtgaccatcggcgtgaaagacttgatcatccccgcccgcaaaaagccgatcattgacgccgccgcagcggaagtggacgagatcgaacgccagtaccgcgacgggatcattacccgcacggaaaaatacaacaaggtggtggacgtctggaccaaggccactcaggacgtatcggaagagatgaccagggaaatctccttcgacaccctggtcgataagccgaccgggaaagaagagaaaaactggagcttcaacccgatccacatgatgtccaattcgggcgcgcgcggcaaccaggaccagatgcgccagcttgccggaatgcgcggtctgatggccaagccttcgggcgaaatcatcgaaacgccgatcacctcaagtttccgcgaaggactgactgtcttgcagtacttcacctccacccacggcgcgcgcaagggcctggccgacaccgccctgaaaacggccaactccggctacctgacccgccgtctggtggacgtggtgcaggatgtgatcgtctccgaaaccgattgcggcactgtggacggcattgagctgcgccatgtgaaagaaggcagcgacatcaagacccatctggccgaaagagccttgggccgggtgctcttgtacccgatcttccacccggacagcggagaattgctctggccggaaaataccctgattgacgaagccatcgccaccaggctggacgaactcggcatttcctccgtgaccatccgttccgccctgacctgccagtcggaacgcggggtgtgcgccctgtgctacggccgcgatctggcgcgcgggcatctggtcaacatcgggggaaaccgtgggcatcatcgcggcccagtccatcggcgagccgggcacccagctcacgttgcgcacgttccacatcggcggcacggcctcccgtctcatcgcccaatccaaggaggtcgccaagatcgccggcgtcgttaa

SEQ ID NO: 67648 - protein, 767 aa, Unknown
  Obtained from environmental sample
  DOMAIN (575)...(759): RNA polymerase Rpb1, domain 5
  misc_feature (1)..(767): Xaa is any amino acid
MGAEAIRTLLENIDLDKLAAELREKMIEKGAKSDKKLLKRIEIVENFRNSQNKPEWMILDVIPVIPPELRPMVQLDGGRFATSDLNDLYRRVINRNNRLKRLQTLNAPDIIIRNEKRMLQEAVDALFDNSKKKKVVKGSSNRPLKSISDMLKGKQGRFRQNLLGKRVDYSGRSVITVGPDLKIWQCGLPTKMAIELFKPFIMKKLVDKDVVYNIKKAKMLLEAESAEIFAILDEVVKEHPVLLNRAPTLHRLGIQAFEPLLVEGKAIQLHPLVCSAYNADFDGDQMAVHIPLSMEAQIECRVLMMSTNNILSPANGAPVIVPSQDIVLGLYYMTVDRHFEKGEGMTFCAPWEVVAAYDANRLALHARIKVRMPDGTLAETTTGRILIGEILPKGVPFELVNCVLTKKNIARLVGSAYRDAGIKATVILCDRLKDIGYEYATRAGVTIGVKDLIIPARKKPIIDAAAAEVDEIERQYRDGIITRTEKYNKVVDVWTKATQDVSEEMTREISFDTLVDKPTGKEEKNWSFNPIHMMSNSGARGNQDQMRQLAGMRGLMAKPSGEIIETPITSSFREGLTVLQYFTSTHGARKGLADTALKTANSGYLTRRLVDVVQDVIVSETDCGTVDGIELRHVKEGSDIKTHLAERALGRVLLYPIFHPDSGELLWPENTLIDEAIATRLDELGISSVTIRSALTCQSERGVCALCYGRDLARGHLVNIGGNRGHHRGPVHRRAGHPAHVAHVPHRRHGLPSHRPIQGGRQDRRRR

SEQ ID NO: 67649 - DNA, 309 bp, Unknown
  Obtained from environmental sample
  misc_feature (1)..(309): n is a, c, g, or t
ttggccgttttcagggcggtgtcggccaggcccttgcgcgcgccgtgggtggaggtgaagtactgcaagacagtcagtccttcgcggaaacttgaggtgatcggcgtttcgatgatttcgcccgaaggcttggccatcagaccgcgcattccggcaagctggcgcatctggtcctggttgccgcgcgcgcccgaattggacatcatgtggatcgggttgaagctccagtttttctcttctttcccggtcggcttatcgaccagggtgtcgaaggagatttccctggtcatctcttccgatacgtcctga

SEQ ID NO: 67650 - protein, 102 aa, Unknown
  Obtained from environmental sample
  misc_feature (1)..(102): Xaa is any amino acid
MAVFRAVSARPLRAPWVEVKYCKTVSPSRKLEVIGVSMISPEGLAIRPRIPASWRIWSWLPRAPELDIMWIGLKLQFFSSFPVGLSTRVSKEISLVISSDTS

SEQ ID NO: 67651 - DNA, 789 bp, Unknown
  Obtained from environmental sample
  misc_feature (1)..(789): n is a, c, g, or t
ttggttcgaccccttagggataaagcgatgatcctagaaactctcattttgataaatgcaccggaagaagtgggaagaaccaaacagctctttgaagaaataacaaccacgctatctcaggacaaatggctttccactcaggagacggcttacgcccttatagctttggttccgtatatggcaggtaacgccggaagcggagcgctgtcattggattataccgctgccggaaaaacgggaaatgtctcttttacctctcccgccgcggaacgccagcttggaaacgtaagcggaacaagcgccgctttgtcggtgactaaccgttcatcctcacctgtttatgtaaggttcacggcaaaaggacttcctgccgaaggaaaagagcccgcgctttccgaaggtctttcgcttaacgttgaataccgcgacgcccgcagcaatgtaatcgctcctgaaaatttaaaactgggcgaagacatggtaatctccgtcaccgtgcgcaatacatttactcagcctgtggaagaagccgcccttattgttccgcttcccgcgtcatgggaaatcgtcaacacccgtgtcggcggaagttcgtcttcatctaatttccgctatcaggacataagggacgacagggtgatgacttactttaacctaaaaaggggcgaagagagaacgatagatttcagggtaaataaagcatacgaaggctcattcttcaggccggcaatacatgtttacgctatgtatgacgagtcgataagggcgttaattcccggcacacgttaa

SEQ ID NO: 67652 - protein, 262 aa, Unknown
  Obtained from environmental sample
  misc_feature (1)..(262): Xaa is any amino acid
MVRPLRDKAMILETLILINAPEEVGRTKQLFEEITTTLSQDKWLSTQETAYALIALVPYMAGNAGSGALSLDYTAAGKTGNVSFTSPAAERQLGNVSGTSAALSVTNRSSSPVYVRFTAKGLPAEGKEPALSEGLSLNVEYRDARSNVIAPENLKLGEDMVISVTVRNTFTQPVEEAALIVPLPASWEIVNTRVGGSSSSSNFRYQDIRDDRVMTYFNLKRGEERTIDFRVNKAYEGSFFRPAIHVYAMYDESIRALIPGTR

SEQ ID NO: 67653 - DNA, 702 bp, Unknown
  Obtained from environmental sample
  misc_feature (1)..(702): n is a, c, g, or t
ttgcaaagtctgctctcggccggcgaaacatggaggggaaaccttgattatccgggaagagacggaacaaatacccttgtcgcaagtttctcaaaactgccgccgcttaatcttgagtcgaggctggattatttaataaagtatccccacggttgcgctgaacaaacgactagcagctcgttccctcaactttatcttgataaggttcttttactggaagacaaacaaaaagcggacatcagaactaacgtaaacggcggaatagaacgcgtcttgggaatgcagttaatgtcgggaggtttttcatactggcccggggaatcggttgtaaatgactggtgttcttcttatatcgggcatttccttcttgaagcgcgacgatccggttatgaggtgcgtacaagcgcattaaaaagctgggttaattaccaaaagaacgcgacggcgcaatggcaggttaacagtaataaatttaccgagcaggcataccggctttatactttggcattggcaggagaagccgatcttggctcgatgaatcgtctgcgaagtcataaattaccgtttcaggccggctggcggcttgcggcggcgtattggcttgcgggacagcgcgatacggcgcgtaacatgataaagggactggctttaccggaaagagattatcgagagctttccgctacatttggttcgaccccttag

SEQ ID NO: 67654 - protein, 233 aa, Unknown
  Obtained from environmental sample
  misc_feature (1)..(233): Xaa is any amino acid
MQSLLSAGETWRGNLDYPGRDGTNTLVASFSKLPPLNLESRLDYLIKYPHGCAEQTTSSSFPQLYLDKVLLLEDKQKADIRTNVNGGIERVLGMQLMSGGFSYWPGESVVNDWCSSYIGHFLLEARRSGYEVRTSALKSWVNYQKNATAQWQVNSNKFTEQAYRLYTLALAGEADLGSMNRLRSHKLPFQAGWRLAAAYWLAGQRDTARNMIKGLALPERDYRELSATFGSTP

SEQ ID NO: 67655 - DNA, 891 bp, Unknown
  Obtained from environmental sample
  misc_feature (1)..(891): n is a, c, g, or t
atgatagttctgcagcaattgataaacggcgtgtctcttggctcaatttacgccttgattgccctgggctataccatggtttacggcatagtcctcttaatcaattttgcccacggcgatattttaatggtgggggcatacgcggcgttttttgtgttaagcgccatcggagcggggccggcggggatgctgcttgcctttatcgtagcaatgatcatctgcgccggcttcggcattaccattgaacgccttgcctaccgtccgctccgcgctgccccccgccttaattcactgattacagccatcgccgtcagcctgatcctggagaacggcgcaagggttctgccctttatcggccccaatccccggcagttcccgcgcccgacagtggttaatatcaaaatagccggagagctttcaatctcaaacatacagattatcgtaatacttctctcggcgcttttgatgcttgcgctgaactatatcatcaattacaccaaacgcggtaaggcgatgcgggctgtctcttttgacatacaggccgcaagccttatgggaatatcggttaacaggatcatctcctttacatttgccctgggttcggtgctggccgccgccgggggtattctgtacgcttcggcctatccaagaatagaccccatgatgggtatgatgcccggcctcaaggcctttgtcgcggcggtgctgggcggcatcggttctgttcccggggcaatgctcggcggttttattctgggtattgccgagacttttaccaagggctttatctccagccagttcagcgacgcgatttcattttcggtgttgataattgttctgttaataaggccgaccggcatactgggaaagaaagcaagggtgaaggtctga

SEQ ID NO: 67656 - protein, 296 aa, Unknown
  Obtained from environmental sample
  DOMAIN (6)...(280): Branched-chain amino acid transport system / permease component
  misc_feature (1)..(296): Xaa is any amino acid
MIVLQQLINGVSLGSIYALIALGYTMVYGIVLLINFAHGDILMVGAYAAFFVLSAIGAGPAGMLLAFIVAMIICAGFGITIERLAYRPLRAAPRLNSLITAIAVSLILENGARVLPFIGPNPRQFPRPTVVNIKIAGELSISNIQIIVILLSALLMLALNYIINYTKRGKAMRAVSFDIQAASLMGISVNRIISFTFALGSVLAAAGGILYASAYPRIDPMMGMMPGLKAFVAAVLGGIGSVPGAMLGGFILGIAETFTKGFISSQFSDAISFSVLIIVLLIRPTGILGKKARVKV

SEQ ID NO: 67657 - DNA, 1059 bp, Unknown
  Obtained from environmental sample
  misc_feature (1)..(1059): n is a, c, g, or t
atggcgccccggtttccgttccgttcaaccgtaatactgggtgctgccggaattctggcgatagttcttccgcttttgctgatgaagttaggtgtcatcgatccgtataccacccggatccttaccatgggcggggtaaacgccataatggcaatgtcggttaacatgattgtcggcattaccgggcagctttcgctcggccaggcggggtttctcgcgatcggcgcctattcctgcatttttttcaattttgacgtcgggctgccccttccgctcgcggctttgtgcgccgttcttgttaccacgctcgcgggttttctcatcggttttccggtactgaagctgaccggggattacctggctattgtcaccctgggcttcggcgagattatccgcgtggtatttatcaacctgaaagcccttacgggagggcccaacgggagggtgttcgcgaatttcgagaaaaaaggcaggctgttctacaacccgatggtctaccttccggagaaccactggttaaggtcattggtaagcgaaagggaatttgccttcgttgtaaccaccgtaacgctgataattattctggcgcttttacagaattttctccgttccagctatggcagggcaatcaaggcgtgcagggaagatgaaatagcggctaacgcaaacggaattaacattttccgctacaagatgctcggttttgccaccgcggcttttatcgcgggtattggcggctgcctctacgcgatggttaacggctttgtaaaaccggatgtggcgcagttcctcagatccatcgacttccttatttatgtcgttctgggcggcatgggttccatgaccggctcgattctttcggcttatgtccttacctatttgcaggaatttttgcgttttctgcaagactaccgccttttgatatatccggtaatattgatacttgtcatgctgttccgcccccagggccttttgggaatgaaagaattttccatagtaggttttgttgaaaaaatacacggcaaattcctcaaaagagcaaagagagcagcggcatga

SEQ ID NO: 67658 - protein, 352 aa, Unknown
  Obtained from environmental sample
  DOMAIN (36)...(317): Branched-chain amino acid transport system / permease component
  misc_feature (1)..(352): Xaa is any amino acid
MAPRFPFRSTVILGAAGILAIVLPLLLMKLGVIDPYTTRILTMGGVNAIMAMSVNMIVGITGQLSLGQAGFLAIGAYSCIFFNFDVGLPLPLAALCAVLVTTLAGFLIGFPVLKLTGDYLAIVTLGFGEIIRVVFINLKALTGGPNGRVFANFEKKGRLFYNPMVYLPENHWLRSLVSEREFAFVVTTVTLIIILALLQNFLRSSYGRAIKACREDEIAANANGINIFRYKMLGFATAAFIAGIGGCLYAMVNGFVKPDVAQFLRSIDFLIYVVLGGMGSMTGSILSAYVLTYLQEFLRFLQDYRLLIYPVILILVMLFRPQGLLGMKEFSIVGFVEKIHGKFLKRAKRAAA

SEQ ID NO: 67659 - DNA, 801 bp, Unknown
  Obtained from environmental sample
  misc_feature (1)..(801): n is a, c, g, or t
atgaacagggatcaattacgcttaagggtgcagaacctctccattgattttggggggcttaaggccgtcagcgaattttcctgcgagctgtaccatggagaactcgtcgggcttatcggcccgaacggggcgggcaagacgacggttttcaatatgctttccggcatatacgccccgaccggaggcgagattgaattccgcgaccgcaaaggcagcctttctcttgtaaagaaccttaaccccgccagaatgaacaggattggccttgccaggacttttcaaaatatacgcctgttttccaatctttcagtcgaggacaatatccgcatagcgttacattccggcagaaccagcggccctatagacgcgctgttccgccttaagcgtttccgtattgacgaggaacggatgagagcccaggcgcaggagcttctttcccttttcaaaatcgaaaaaaagaaagacgaactggctcgcaatcttccatacggcgagcagcgcaagctggagattgcccgcgctctggcttcaaatccctgcctcctcttgctggatgaacctgccgccgggatgaacccccaggaaacagaagacctgatgaagataatcagatttatcaggaatgaatttcacctgacgattcttttaatcgaacacgatatgcggcttgttatgggaatatgcgagcggcttatagttctggattacgggaggactattgccacaggttctccggaagagattcagaaaaatcccgcagtaataaaagcatatctggggacggaggctgccaatggctga

SEQ ID NO: 67660 - protein, 266 aa, Unknown
  Obtained from environmental sample
  DOMAIN (33)...(237): ABC transporter
  misc_feature (1)..(266): Xaa is any amino acid
MNRDQLRLRVQNLSIDFGGLKAVSEFSCELYHGELVGLIGPNGAGKTTVFNMLSGIYAPTGGEIEFRDRKGSLSLVKNLNPARMNRIGLARTFQNIRLFSNLSVEDNIRIALHSGRTSGPIDALFRLKRFRIDEERMRAQAQELLSLFKIEKKKDELARNLPYGEQRKLEIARALASNPCLLLLDEPAAGMNPQETEDLMKIIRFIRNEFHLTILLIEHDMRLVMGICERLIVLDYGRTIATGSPEEIQKNPAVIKAYLGTEAANG

SEQ ID NO: 67661 - DNA, 732 bp, Unknown
  Obtained from environmental sample
  misc_feature (1)..(732): n is a, c, g, or t
atggctgaaactctgttgaaagttgaaaacctaattgttaattacggagcgatacgcgccttaaaaggtatttcatttgatgttaccaaaggtgaaataatcacattaatcggagcaaacggagcgggaaaaagcacgacacttaacgcaatctccaatgttattaaaaaaacttcaggtacagtgatgtttgacggcagggaaataagctcttttccgcctgatcgcattgtcgcagacggacttgtgcaggttccggaaggacgcagaatttttgcaaacttgagcgttcgtgacaatttggaaatgggcgcatactcacggcgttccgttaccatagcggagaaacacgccattcgaaaagacatggaaaaggtgtttgatatttttccaaggttaaaagagcgtatacgccaggtagccgggactctttcaggcggcgaacagcaaatgcttgcaatgggccgctctcttatggccaacccccgtttactgctccttgatgagccgtcaatgggacttgctccaatccttgttgacgaaattttttcagtaataaggagaattaatgagacaggaacaacagttctgctcgttgaacaaaatgcgtacaaagccctgaaaactgcatcacgggtgtacatacttgagaccggggaaatttgtaaaagcggcatgaccgctgaccttatgcaggatgaagcggtgaaggctgcttatttaggaggatga

SEQ ID NO: 67662 - protein, 243 aa, Unknown
  Obtained from environmental sample
  DOMAIN (31)...(219): ABC transporter
  misc_feature (1)..(243): Xaa is any amino acid
MAETLLKVENLIVNYGAIRALKGISFDVTKGEIITLIGANGAGKSTTLNAISNVIKKTSGTVMFDGREISSFPPDRIVADGLVQVPEGRRIFANLSVRDNLEMGAYSRRSVTIAEKHAIRKDMEKVFDIFPRLKERIRQVAGTLSGGEQQMLAMGRSLMANPRLLLLDEPSMGLAPILVDEIFSVIRRINETGTTVLLVEQNAYKALKTASRVYILETGEICKSGMTADLMQDEAVKAAYLGG

SEQ ID NO: 67663 - DNA, 636 bp, Unknown
  Obtained from environmental sample
  misc_feature (1)..(636): n is a, c, g, or t
atgccgcttttacaaatttccccggtctcaagtatgtacacccgtgatgcagttttcagggctttgtacgcattttgttcaacgagcagaactgttgttcctgtctcattaattctccttattactgaaaaaatttcgtcaacaaggattggagcaagtcccattgacggctcatcaaggagcagtaaacgggggttggccataagagagcggcccattgcaagcatttgctgttcgccgcctgaaagagtcccggctacctggcgtatacgctcttttaaccttggaaaaatatcaaacaccttttccatgtcttttcgaatggcgtgtttctccgctatggtaacggaacgccgtgagtatgcgcccatttccaaattgtcacgaacgctcaagtttgcaaaaattctgcgtccttccggaacctgcacaagtccgtctgcgacaatgcgatcaggcggaaaagagcttatttccctgccgtcaaacatcactgtacctgaagtttttttaataacattggagattgcgttaagtgtcgtgctttttcccgctccgtttgctccgattaatgtgattatttcacctttggtaacatcaaatgaaataccttttaaggcgcgtatcgctccgtaa

SEQ ID NO: 67664 - protein, 211 aa, Unknown
  Obtained from environmental sample
  DOMAIN (57)...(95): Protein of unknown function (DUF1602)
  misc_feature (1)..(211): Xaa is any amino acid
MPLLQISPVSSMYTRDAVFRALYAFCSTSRTVVPVSLILLITEKISSTRIGASPIDGSSRSSKRGLAIRERPIASICCSPPERVPATWRIRSFNLGKISNTFSMSFRMACFSAMVTERREYAPISKLSRTLKFAKILRPSGTCTSPSATMRSGGKELISLPSNITVPEVFLITLEIALSVVLFPAPFAPINVIISPLVTSNEIPFKARIAP

SEQ ID NO: 67665 - DNA, 645 bp, Unknown
  Obtained from environmental sample
  misc_feature (1)..(645): n is a, c, g, or t
atgaaaatatccaaaattatgaccagaaatccggttattacccatcccgaactatcgctgaccgatgctcgctcgctgatggacaaggagaaaatcagccacataccggtactaaataaaaacaatgagcttgttggtcttattacaagggcggacctgctcaaagccggtccatcgccggcgaccagccttgatatgtacgagattagttatctgctttctaaacttacggtggaaaaaataatggaaaaaaaagtaatcaccgttcaggaaaacgaagttgtggaagaggcggcgaggatcatggcggacaatgggattggctgcctgcctgtgttaaacggatctcttttaacaggcattattaccgacaccgatattttccatttttttattaacgcttatggagcgcgtcacaagggtataaggataaccgttaatttcaaagaaaaacgaggacagcttgcggcatttgccggagcggtggcggaaagggggggtaatatagttgcctttgttacttcagagggcgatgatgtggctcaccgccgcgcaacattcaagattacagagatcagccgcgccgccgtagaagaagctgcgggtattatagatggcgcggaaattgaggatatcagggaatag

SEQ ID NO: 67666 - protein, 214 aa, Unknown
  Obtained from environmental sample
  DOMAIN (5)...(132): CBS domain pair
  misc_feature (1)..(214): Xaa is any amino acid
MKISKIMTRNPVITHPELSLTDARSLMDKEKISHIPVLNKNNELVGLITRADLLKAGPSPATSLDMYEISYLLSKLTVEKIMEKKVITVQENEVVEEAARIMADNGIGCLPVLNGSLLTGIITDTDIFHFFINAYGARHKGIRITVNFKEKRGQLAAFAGAVAERGGNIVAFVTSEGDDVAHRRATFKITEISRAAVEEAAGIIDGAEIEDIRE

SEQ ID NO: 67667 - DNA, 513 bp, Unknown
  Obtained from environmental sample
  misc_feature (1)..(513): n is a, c, g, or t
atggcgcaggatattgcgcagtctgtaaacgcaaattacggcaagcaagtgttaaaaataccgcaggccgccgttcaggaaaatgtcgcggtagtgcccggtcttgacggcagaaaaatgagcaagagttacggcaacacaattcctctttttgcgcccgagaaaacgcttcgcaaaacaattatgcggatagtaacaaattcccaatccgtggaagagcccaaggaccctgatacctgccaaattttccagctctataaactttttacgcaagccgacgaacaggacgtcctggcgaaacgttaccgcgccggcggcatgggttggggagaggcgaaggaagagttgttccgcgttgtaaaccgccagcttacccctataagggagcgttatgacgcaatcatggcggacattcccgctcttgataaaattctcgaacaaggcgcgcagaaggcccgtcccattgccgccgccattgtaaagcgcttccgcaaagcagccggaatagattaa

SEQ ID NO: 67668 - protein, 170 aa, Unknown
  Obtained from environmental sample
  misc_feature (1)..(170): Xaa is any amino acid
MAQDIAQSVNANYGKQVLKIPQAAVQENVAVVPGLDGRKMSKSYGNTIPLFAPEKTLRKTIMRIVTNSQSVEEPKDPDTCQIFQLYKLFTQADEQDVLAKRYRAGGMGWGEAKEELFRVVNRQLTPIRERYDAIMADIPALDKILEQGAQKARPIAAAIVKRFRKAAGID

SEQ ID NO: 67669 - DNA, 825 bp, Unknown
  Obtained from environmental sample
  misc_feature (1)..(825): n is a, c, g, or t
atgagtactattgtttgtattggcagcggcaacatgggagccgcattaatgaaaggcgcatgcgctgtcggcagaacgagagtgacaagcagtaacattttttttacagacgctgatattgaaaaagcccgctctcttgcggctgaattaaaagcgaatgtaattgaatccaacatagaagccgtaaaaaaaggggattttatttttcttgcggtaaagccgcaagtgttgccgcaggtgttatctgaaatcgccgccgccgccaaagaaaggcttaactcaggcgatcttcccgtatttgtttccatggcggcgggctggaccatcgccaggataaagtcgtcaatcagcgtgaaactgccggttgtgcgcataatgccgaacacgccggccctcatcggaaagggaatgatagcccttgccgcctctcccgaagtaccggcggaaaaaatttcggaacttgaaaaaatgcttgatggggcgggcattgtagacattctggacgaaagttacttgaacgccgccaccggcctttccggatcgggtcccgcttttgtatatatgtttattgaagcattggcggacggaggagtgcgcgccggtcttcccagggacaaagctctccgctatgccgcccaaactgttttcggctccgctgcaatggttcaggagacgggaaaacaccccggcgaattgaaggacatggtaacgtctccgggcggaacgacaatagccggccttgccgcgctggaagaaggcgctttccgcggttctgtgataaaagcggtggaagccgcgtggaaacgcgccggggaattgagttaa

SEQ ID NO: 67670 - protein, 274 aa, Unknown
  Obtained from environmental sample
  DOMAIN (3)...(258): NADP oxidoreductase coenzyme F420-dependent
  misc_feature (1)..(274): Xaa is any amino acid
MSTIVCIGSGNMGAALMKGACAVGRTRVTSSNIFFTDADIEKARSLAAELKANVIESNIEAVKKGDFIFLAVKPQVLPQVLSEIAAAAKERLNSGDLPVFVSMAAGWTIARIKSSISVKLPVVRIMPNTPALIGKGMIALAASPEVPAEKISELEKMLDGAGIVDILDESYLNAATGLSGSGPAFVYMFIEALADGGVRAGLPRDKALRYAAQTVFGSAAMVQETGKHPGELKDMVTSPGGTTIAGLAALEEGAFRGSVIKAVEAAWKRAGELS

SEQ ID NO: 67671 - DNA, 531 bp, Unknown
  Obtained from environmental sample
  misc_feature (1)..(531): n is a, c, g, or t
atgagtgacgcggtaatgtacgctaaatacaatcaatcaggcaacaagatcattttcggtttgttgggcaagatgagcaatgatgacagggaaaaagacaggggaagtttctatggaagtctttccaatcttttcaggcatattgcgggcggtacccggttctttctgggaatgtataaaacagcgttaagcggcaacgccgcggctgtaaaggcaatttccgcggttgattctcttccgaaacttcccgaaggagcgttatccgaagcgcaatggaaggaacttgaagcaataatgaacgctgttgacgcggcgtatgtcgccacgacggaagcattaagcgagtctgatcttaatcttccggttcaagttaaatggtacggagggaatccggatacggttccgctgtcatttatgttgagccagcttgttgtgcataacacgcatcatcgggggcaaatatcgcagatactcgattcgcttaagatagataatgattattcgggtattaatgtcgcgtttatttcctaa

SEQ ID NO: 67672 - protein, 176 aa, Unknown
  Obtained from environmental sample
  DOMAIN (1)...(172): DinB family
  misc_feature (1)..(176): Xaa is any amino acid
MSDAVMYAKYNQSGNKIIFGLLGKMSNDDREKDRGSFYGSLSNLFRHIAGGTRFFLGMYKTALSGNAAAVKAISAVDSLPKLPEGALSEAQWKELEAIMNAVDAAYVATTEALSESDLNLPVQVKWYGGNPDTVPLSFMLSQLVVHNTHHRGQISQILDSLKIDNDYSGINVAFIS

SEQ ID NO: 67673 - DNA, 1179 bp, Unknown
  Obtained from environmental sample
  misc_feature (1)..(1179): n is a, c, g, or t
atgatatacagaagcgaatatatttccgatgatgaatggcggcaattattagagttttccgaaaaccttgagacgccttgtatagttgtcaatcttcagggcataaaaaataattatattaaaatgcgcgactcatttcctttcgcgcaaatttattacgcggtcaaagcgaatccggacatgaaaataatttcactgcttgacgaattaggctctaatttcgatcttgcttcgcgttatgagcttgatttagtattgtctatgggaatttcacccgaccggatgtctttcggaaatacaatcaagaaagcgaaagacgtggcgtacttttatgaaaaaggcgtccggatgttcgcgaccgacagtgaaagcgatcttaaaaacattgcctcgcacgctcccggctccaaggtttatgtgcgtattgtcatgggcgattccagcaccgcagactggccgctttcgcgtaaattcggctgccatcccgatatggcgtacggtctattaattatggcgcgcactctcggtcttaatccatacggcatatcttttcatgtgggaagccagcagcgcgatataggccaatgggacgaagcaatcgcgaaaacaaagtatcttttttcttctttggaaaaagagcaaaatatacaacttaaaatgatcaatatgggcggcggctttcccgcatcctatattcagccgtccaatgacttaaccgattactcttcagagatacacaaatacctaaccgacgattttggttctgatattccgttaattgtacttgaaccggggcgctctcttgtaggcaacagcggcgttctaataaccgaagttattttaatttccagaaaaactcataccgctcttaaccgctgggtatatcttgacacaggcaaatttaacgggcttatagaaacattaaatgaatcaattaaatatcccattgttacagccaatgaggataaagaagcggaggaagaagaagtgatcatcgccggtcctacctgcgacagtcaggatattctttacgaagaccacaaatatcagcttccggtagatttaaaaatcggcgacaaactttatttcctttccgcgggggcgtatacggcaagttacgcttctgtttgttttaacgggtttccgccgattaagacttatattatggatattaagtag

SEQ ID NO: 67674 - protein, 392 aa, Unknown
  Obtained from environmental sample
  DOMAIN (274)...(389): Pyridoxal-dependent decarboxylase, C-terminal sheet domain
  misc_feature (1)..(392): Xaa is any amino acid
MIYRSEYISDDEWRQLLEFSENLETPCIVVNLQGIKNNYIKMRDSFPFAQIYYAVKANPDMKIISLLDELGSNFDLASRYELDLVLSMGISPDRMSFGNTIKKAKDVAYFYEKGVRMFATDSESDLKNIASHAPGSKVYVRIVMGDSSTADWPLSRKFGCHPDMAYGLLIMARTLGLNPYGISFHVGSQQRDIGQWDEAIAKTKYLFSSLEKEQNIQLKMINMGGGFPASYIQPSNDLTDYSSEIHKYLTDDFGSDIPLIVLEPGRSLVGNSGVLITEVILISRKTHTALNRWVYLDTGKFNGLIETLNESIKYPIVTANEDKEAEEEEVIIAGPTCDSQDILYEDHKYQLPVDLKIGDKLYFLSAGAYTASYASVCFNGFPPIKTYIMDIK

SEQ ID NO: 67675 - DNA, 942 bp, Unknown
  Obtained from environmental sample
  misc_feature (1)..(942): n is a, c, g, or t
ttgatggccgaggcttttatttttatctcttgcgcgccctcgctctcgccttcgcgttccgaatatgtgcttggcactgtctgctccgttacgctttttgatcaatccaaagaaagcgtttatcacgacattttcactagagtccgcgaaatagacaatcttatgagcgtgaatgttccatcatccgatgttagccgtattaacgatgccgccggaattgcgccggtaaatgttcacaaagatacgtttaaagtaatcgaacgcgcaatttattttgcggaaatttcaggcggcgcttttgatccgtccgtaggacctcttgtgtccttgtggggcataggcagtgatggcgcaagaattcccccgtgggaagaaattgacaatactctgcccctgataaaccggcgctatgttgaattagacgagacgacgcacggcgttttcctgaaacgcaaagggatggcgctggacttgggcgctattgccaaaggttacgcggcagatgaagcggcaaagataattaaaaaagcaggagttaaacgcgcgattatcgactttggcggaaacattgttaccttaggtgaaaaaaaagacagaacctcatggaaggtaggaattcaaaatcccgttaaaagacgcggcatttactttggagttttgcagttggatactaatggaaagcagacagtcgtaacttccggcgcgtatgagcgtttttttgaaacagacggcgagcgttaccaccacattctctcgacagtaacggggtatcccgtaagaaacggccttttgtcggttacggttataacctcagactctatggacgcggacgctcttttcacgtcgctttttgcgcttgggtttgaagagggaataaaaatacttggtttgttccccgaaacagaggcggtatttgtttttgaagacacagtgtgcgcgtaa

SEQ ID NO: 67676 - protein, 313 aa, Unknown
  Obtained from environmental sample
  DOMAIN (2)...(312): ApbE family
  misc_feature (1)..(313): Xaa is any amino acid
MMAEAFIFISCAPSLSPSRSEYVLGTVCSVTLFDQSKESVYHDIFTRVREIDNLMSVNVPSSDVSRINDAAGIAPVNVHKDTFKVIERAIYFAEISGGAFDPSVGPLVSLWGIGSDGARIPPWEEIDNTLPLINRRYVELDETTHGVFLKRKGMALDLGAIAKGYAADEAAKIIKKAGVKRAIIDFGGNIVTLGEKKDRTSWKVGIQNPVKRRGIYFGVLQLDTNGKQTVVTSGAYERFFETDGERYHHILSTVTGYPVRNGLLSVTVITSDSMDADALFTSLFALGFEEGIKILGLFPETEAVFVFEDTVCA

SEQ ID NO: 67677 - DNA, 312 bp, Unknown
  Obtained from environmental sample
  misc_feature (1)..(312): n is a, c, g, or t
atgaagaaatacaatattcgtgtagcgcctgcggtaaatgatagaatagccggacactttgattttcttgcaagagtcagcgtgaatgccgcaaataaattactggatgaacttattgaggatataaaatcacttgaaactaatcctcagataaatccatatttggataggccttatttagagcccgggaagtatcgatataaattatcttatggccgttatcggattgtttatcaaattgtcaatgatattgtttttgtagacgacattcaggattgccgtcaggacgatgataagagtttattgaagtaa

SEQ ID NO: 67678 - protein, 103 aa, Unknown
  Obtained from environmental sample
  DOMAIN (6)...(97): Plasmid stabilisation system protein
  misc_feature (1)..(103): Xaa is any amino acid
MKKYNIRVAPAVNDRIAGHFDFLARVSVNAANKLLDELIEDIKSLETNPQINPYLDRPYLEPGKYRYKLSYGRYRIVYQIVNDIVFVDDIQDCRQDDDKSLLK

SEQ ID NO: 67679 - DNA, 864 bp, Unknown
  Obtained from environmental sample
  misc_feature (1)..(864): n is a, c, g, or t
atggacagaatcaacaaaagcatagacgcgcttatggagacttacggaaaatacggcatggtcaaccattcgggagaggcgagccttccgggcagggaaagcatagcacgtatcgtacatggtctggatgagcttatatttccgggctttcgggaaaaccagggactggatcacaataacttaaggcttataaccgcggaaaaggttaaccaccttgcccgcgaactcatacgcgaggtggagaaaagcctcgccttttccgcgcgggtcggcgcgttaagctgcggacagggcggctgccatgccgcggcggagcttattgtcgagggcttctttgacgagcttccacttatacgccgcgccctgtccctggatatgcaggcgaatttccgcggagaccccgcggcgaaaagcgaagacgaagtcattctttcttatccaggtttccaggctattaccgtctacaggctggcccattatttctggaacgcgcaggttcctctcatcccgcgcatgatgagcgaactggtacacgggaataccggcattgacattcatccgggcgcggcaataggcgaatctttctttattgaccacggcaccggcgttgtaatcggcgagacgaccgttataggcaataacgtcaagctctatcagggcgttacccttggggcgctttcggtgaagaaagaggaaggaaagcgcaaacggcatcccaccattgaagacgatgtcaccatttattccaacgcgaccattctgggaggcgaaacggtgataggccggggcagcgtcatagggggcaacgtgtggatcaccgaatccgtacccccgaatacaaaagtttataatcagcgtaaatga

SEQ ID NO: 67680 - protein, 287 aa, Unknown
  Obtained from environmental sample
  misc_feature (1)..(287): Xaa is any amino acid
MDRINKSIDALMETYGKYGMVNHSGEASLPGRESIARIVHGLDELIFPGFRENQGLDHNNLRLITAEKVNHLARELIREVEKSLAFSARVGALSCGQGGCHAAAELIVEGFFDELPLIRRALSLDMQANFRGDPAAKSEDEVILSYPGFQAITVYRLAHYFWNAQVPLIPRMMSELVHGNTGIDIHPGAAIGESFFIDHGTGVVIGETTVIGNNVKLYQGVTLGALSVKKEEGKRKRHPTIEDDVTIYSNATILGGETVIGRGSVIGGNVWITESVPPNTKVYNQRK

SEQ ID NO: 67681 - DNA, 681 bp, Unknown
  Obtained from environmental sample
  misc_feature (1)..(681): n is a, c, g, or t
atgagcaaagccgcttttgtcgcgataatcggccggccctcggcggggaaatcgacccttgtaaataagatctgcggcgggaaagtatccattgtgagcgctgttccgcagacaactcgcgacgccatacgcggaatacttaccagggaacaagggcagttggtgtttgtcgacacgccgggcaggcataagtccgaaaagaaattcaatataaaactttcagagatttccgcgaaggcggttgaggattcagaccttgtcctgtatgttctggactctacaaggccgcccggccctgaggaaattgagatagccacgcttttggggggtccccattcaggaaggacaatcgccgccattaataagattgacgataaaaacgccgatcccgcccgaaccttggaatttatttcccaatacctgtgcggcctttcctctgtccccttgcaaatctcagccaggacgggcgagggccttgagccgctgcttgaggcgttatacgcaatggcccctgaaggcgaggcgttttatggcgcggaatactataccgatcaggaagttgatttccgcatagccgagattatacgcgagaaggcgataaaccggctgcgcgaggaaatcccccataccctgcgggtggagatagccgacaccaggttgangggaagccgnccgccataa

SEQ ID NO: 67682 - protein, 226 aa, Unknown
  Obtained from environmental sample
  DOMAIN (7)...(123): Dynamin family
  misc_feature (1)..(226): Xaa is any amino acid
MSKAAFVAIIGRPSAGKSTLVNKICGGKVSIVSAVPQTTRDAIRGILTREQGQLVFVDTPGRHKSEKKFNIKLSEISAKAVEDSDLVLYVLDSTRPPGPEEIEIATLLGGPHSGRTIAAINKIDDKNADPARTLEFISQYLCGLSSVPLQISARTGEGLEPLLEALYAMAPEGEAFYGAEYYTDQEVDFRIAEIIREKAINRLREEIPHTLRVEIADTRLXGSRPP

SEQ ID NO: 67683 - DNA, 363 bp, Unknown
  Obtained from environmental sample
  misc_feature (1)..(363): n is a, c, g, or t
gtgaacgggaaaaagatccctcttaaaattaaggtagagaaaatccacagaaactacggcccctataagtcggaccttgtcctggtttcatacagaaacctcttaatcagcgtaacctcaaaacacatcggtttcggagatgaaggactcctttctgccctcggaataaatcccgccgattattgccttgtagcggtaaaacttggctaccttgagccctgcttcaggagcatcgcaaagcgggccatcatggctactacaagaggttgttccaatgaagttctggaaaacattccctacaagagagtgcgcaggcccatttaccccctggataaggatatggaatgggacagcaaatcctaa

SEQ ID NO: 67684 - protein, 120 aa, Unknown
  Obtained from environmental sample
  misc_feature (1)..(120): Xaa is any amino acid
MNGKKIPLKIKVEKIHRNYGPYKSDLVLVSYRNLLISVTSKHIGFGDEGLLSALGINPADYCLVAVKLGYLEPCFRSIAKRAIMATTRGCSNEVLENIPYKRVRRPIYPLDKDMEWDSKS

SEQ ID NO: 67685 - DNA, 489 bp, Unknown
  Obtained from environmental sample
  misc_feature (1)..(489): n is a, c, g, or t
atggaggtattaatgaaattcttgataataaccggtaatccaaaacaggacgggctttgtcatactgtgacagaagaagccagaaaaggagcggaaaccggcggagcgattgttgacatattaaatgttacgaaaatagaacgctgccatgtctgcggcaacggatggggtacatgccgggaaaaacatgtttgcgcttttggggatgacggatttaacgaagcgcaggctaaagctcatgaagccgatatgctctgcttcatcactcctgtttattggggtgaagctgaagaaagcctaaatgcttttttgaccgtntgcgccgttgtgagtntgatatgccttggggggaaagcgggacaaaaaacccgctttttccggcaagcaggttctccttatcgcttcgccaggcggcagcgggaatgggatgctctcctgcctggaacagttggaccggctttgtcggcacaccggagctgtcatctttga

SEQ ID NO: 67686 - protein, 162 aa, Unknown
  Obtained from environmental sample
  misc_feature (1)..(162): Xaa is any amino acid
MEVLMKFLIITGNPKQDGLCHTVTEEARKGAETGGAIVDILNVTKIERCHVCGNGWGTCREKHVCAFGDDGFNEAQAKAHEADMLCFITPVYWGEAEESLNAFLTVCAVVSXICLGGKAGQKTRFFRQAGSPYRFARRQREWDALLPGTVGPALSAHRSCHL

SEQ ID NO: 67687 - DNA, 2796 bp, Unknown
  Obtained from environmental sample
  misc_feature (1)..(2796): n is a, c, g, or t
atggttcggatattattaaacgaagagtacgaatttattttccacaaagaacccggattacagggtacaaaatttgaagacgtgaacgttgacaccgccaaactggtggccgagttaaagtcggggcatgacgtttccgtatacaagatgagaaactataaaaatatcccctcaatcacttttgtcagaaggctggaaaacggctggtaccttggcattgtaacgcccgaagacgagtatttcatggaactcaaaagggtaaggattattctcatagccctgggggccgttctggcggcgatgctctgcgccatcctgttgagcattatcgcggaaaaacaaaaggctgacacaaaggcaaaagaagcggaatcgctggaaaaaaatatcaatattttgcgaaaaatactaagcaatcttgacgcgcttatctgcattaccaatccccaaaccggggagatattttttatcaatgacaacatgaagaagtactacaatatcgaaggcgattgtatagggcagacatgctataaagtttttcaggaagggctgaacggcaggtgcgatttctgcccgtgcaacgatcttgataaagagccggaaaaaattgtcgaatggattgaatgcagcgaggtgacaaaacgcacctaccgtaattcaggctcctatattgaatggcccggcggcacgacagcttatctgcaatattccgttgacataaccgaattgtatgacgcgaaagaacaggcgtttatggccaaccgcgttaaaagcgactttttagcgagaatgagccatgaaatacgttcgccgatgaacgtaattttaggcattaccgaaatgcagctggaaaaagatctgccgcccgacacgctggaagcgttggacaaggtgaataattccggttatctgcttcttaacataatcaacaacatactggatctttccaagattgaatcgggcaagatggaattgatactggtaagttatgacgttgcaagcctgatcaacgatgccgtacagtttaaccttttgcgtttcggaggcaaaccaattcaatttgttttgaacgtagatgagaatacgccggcaaaattattcggcgacgatattcgcattaaacaggtattgaataatcttctatccaacgcgttcaagtacacggattcaggacaggtatcgctgtcggtatccgttgaagtcgccccaataaacattataacgcttattttccgcgtgagtgataccgggcgcggtatgtctaaggatcaggtggcaaagctgtttgatgattatgcccgatttaacctggaaaccaaccggcaaattgaaggcacgggccttggcatgagcattaccaaaaactttattgatataatgaaaggcgaacttaaagttgaaagcgagccgggaaaaggctctacgtttattctcaggttaccgcaaggttatgttagttcagccgtgttgggcaaggaaggcgtggaaaatcttcaacagcataatcttgataaaaaaacaaaacaaaaaagaatcaagcaaattcaacgggaatatatgccttacggcaaaatattggttgttgacgatatggagccgaatctttatgtcgccaaaggacttatgtccccgtacggattgtcaatagataccgccttaagcggggaaaaagcgattgaaaaaattaagagcgggcttgtttatgatattatttttatggatcattacatgccggaaatggacggaatggaaacgacaaaagcaatacgcgctcttggttataaagaaccgattatcgcgctgaccgccaacgctttagtcggacaggccgaggtttttatggcaaacggttttgacgggtttttgtctaaacctatagacacgcgccagatcgattcaacgctgaacaggcttattcgcgacaaataccccgccgaaactgtcgaagccgcccgcaagcttaagaagaagatggagaccggagaaagcgccgaaccgcttgatttaagtgaagtaaaaactttagttgtagatgattttctgccgaatttaagcgtggcgcagggcatactgcaggaatacaaaatgcaggcggacggtttaacaaacggaaaggaagcggttgaacggataaaaagcggtgaacccaggtacgatataatttttatggatattatgatgccgggcatggacggcatagaaacaaccaaacagatacgcgctattggcacggaatacgctaacacagtacctataatcgcccttacggcaatcataactaaagagactgacgagcaggaaaagatgctgttgaacaacggttttcaggcggttttatccaagccgctaagtttttcaaaaatgaacgcgtttattaaagactggattaatgataaactgagtggcataaaagcgcctgaaaaagaggagaatataatggatgttgatattccgggagtaagagtagaaagaatagatgaactttacaacggcaatataaaaatctttatgccggtgcttcgttcgtatctttcggttattcctgaatttttaaaaaaaatcagcaaggttaccaaagaaacattgccggactatatggctacagtacacggtattaaaagctccagcgacagtataggcgcacaagaagcgcaaaaaatggcgcttgaactggaaacagcggcgaaagccggcgatcttgcaataataacggtgaagaatgaggcgttaatttcctgcgtgaaagagcttttggataacgcgcagaagtgggtagataaggttgacgggaaatag

SEQ ID NO: 67688 - protein, 931 aa, Unknown
  Obtained from environmental sample
  DOMAIN (838)...(924): Hpt domain
  misc_feature (1)..(931): Xaa is any amino acid
MVRILLNEEYEFIFHKEPGLQGTKFEDVNVDTAKLVAELKSGHDVSVYKMRNYKNIPSITFVRRLENGWYLGIVTPEDEYFMELKRVRIILIALGAVLAAMLCAILLSIIAEKQKADTKAKEAESLEKNINILRKILSNLDALICITNPQTGEIFFINDNMKKYYNIEGDCIGQTCYKVFQEGLNGRCDFCPCNDLDKEPEKIVEWIECSEVTKRTYRNSGSYIEWPGGTTAYLQYSVDITELYDAKEQAFMANRVKSDFLARMSHEIRSPMNVILGITEMQLEKDLPPDTLEALDKVNNSGYLLLNIINNILDLSKIESGKMELILVSYDVASLINDAVQFNLLRFGGKPIQFVLNVDENTPAKLFGDDIRIKQVLNNLLSNAFKYTDSGQVSLSVSVEVAPINIITLIFRVSDTGRGMSKDQVAKLFDDYARFNLETNRQIEGTGLGMSITKNFIDIMKGELKVESEPGKGSTFILRLPQGYVSSAVLGKEGVENLQQHNLDKKTKQKRIKQIQREYMPYGKILVVDDMEPNLYVAKGLMSPYGLSIDTALSGEKAIEKIKSGLVYDIIFMDHYMPEMDGMETTKAIRALGYKEPIIALTANALVGQAEVFMANGFDGFLSKPIDTRQIDSTLNRLIRDKYPAETVEAARKLKKKMETGESAEPLDLSEVKTLVVDDFLPNLSVAQGILQEYKMQADGLTNGKEAVERIKSGEPRYDIIFMDIMMPGMDGIETTKQIRAIGTEYANTVPIIALTAIITKETDEQEKMLLNNGFQAVLSKPLSFSKMNAFIKDWINDKLSGIKAPEKEENIMDVDIPGVRVERIDELYNGNIKIFMPVLRSYLSVIPEFLKKISKVTKETLPDYMATVHGIKSSSDSIGAQEAQKMALELETAAKAGDLAIITVKNEALISCVKELLDNAQKWVDKVDGK

SEQ ID NO: 67689 - DNA, 831 bp, Unknown
  Obtained from environmental sample
  misc_feature (1)..(831): n is a, c, g, or t
ttggtgtataataaaagcatgagatcaacaagggaaattgccctcgatggcaaattgacggaaatgaccgcagctttcgggctttccggaaaagccgttgcggcgttggaattgctgctgcaggacgaagaattacaggcggcgcaggaatacgcaaacaccgtttcgattatcaggctgggttacaatgatcacgggccggtacacatgagaaccgtcgcgatgaacgtcctgattatgttccgtctgctgaggcaggcgggaatcaaaacgagcctggaaaaagatgagtgcggcgactttgaggacagcctgacagcggcgttatgcgcctccattctgcacgatctgggcatgggcgtcgggcggcaggatcatgaaatgcacagcgtatatctttccctgccaatccttaaccggattctggaagaggtataccgtgggaatataaagaaacaggcgatgatccgcgccctgacccttgaatgtatttcaggccacatgggatcccgtaccattcattcccttgaagcgggcgtgctgcaggttgccgacggctgcgacatgaccaagggccgggcgcgcatcccccttgcgattgggcaggcgaaagtcggccacattcaccagtattcggcgagttctattgaggaagtccgtattgacgcgggaaaggaaaaacccatacgcattgacgtccacatgtccaatgacgccggtttttttcaggttgaggaagtgctgttaaaaaaaatcgccggcagcacggcaaagccctttattgagctgtacgcgcaggtgcgggaagaagcgccgcatcagtatttataa

SEQ ID NO: 67690 - protein, 276 aa, Unknown
  Obtained from environmental sample
  DOMAIN (73)...(190): HD domain
  misc_feature (1)..(276): Xaa is any amino acid
MVYNKSMRSTREIALDGKLTEMTAAFGLSGKAVAALELLLQDEELQAAQEYANTVSIIRLGYNDHGPVHMRTVAMNVLIMFRLLRQAGIKTSLEKDECGDFEDSLTAALCASILHDLGMGVGRQDHEMHSVYLSLPILNRILEEVYRGNIKKQAMIRALTLECISGHMGSRTIHSLEAGVLQVADGCDMTKGRARIPLAIGQAKVGHIHQYSASSIEEVRIDAGKEKPIRIDVHMSNDAGFFQVEEVLLKKIAGSTAKPFIELYAQVREEAPHQYL

SEQ ID NO: 67691 - DNA, 486 bp, Unknown
  Obtained from environmental sample
  misc_feature (1)..(486): n is a, c, g, or t
ttgttcattgttcatttcctcagtccccagtccctagtccctagtcccttttttgtgtatattaatatcatgaattactccgaaacttttataccgacactcagggaagtccccgcggatgcggtcattgtaagccacaggctgatgttccgctcaggcatgatccgcaaacttgccaacggcctttttgcctacctgcccctgggacttcgcgccttccgcaaggtcgaacagatagtacgcgaagaaatggacgccatcggcgctttggagatgaagccccccgtcgtgcagcccggcgaagtatggaaggagtccggccgctgggaagcgatgggcgaagggatgctgagggcgaaaaccggctggacaatgactttgtggtcagcccaactgccgaggaagcctttaccgccatcgtgcgcgatgaactgtccaactacaaacagcttccccttgtcctctaccaaatcaacacaagagtag

SEQ ID NO: 67692 - protein, 161 aa, Unknown
  Obtained from environmental sample
  misc_feature (1)..(161): Xaa is any amino acid
MFIVHFLSPQSLVPSPFFVYINIMNYSETFIPTLREVPADAVIVSHRLMFRSGMIRKLANGLFAYLPLGLRAFRKVEQIVREEMDAIGALEMKPPVVQPGEVWKESGRWEAMGEGMLRAKTGWTMTLWSAQLPRKPLPPSCAMNCPTTNSFPLSSTKSTQE

SEQ ID NO: 67693 - DNA, 1542 bp, Unknown
  Obtained from environmental sample
  misc_feature (1)..(1542): n is a, c, g, or t
ttgcaaaactgcgtatcgctcggcgcaagggtaaccggaaccggcagtaccaatcgtgtgattggtattgctaacggcaatatgaacgacaacaaagcccgtacagatatgaaaatcggcgcaagcggagcagaggcgacagtatcaggagcggcaactaactcaaacggcgcaagtgtaactgtaggtacggcaatgtctacctttttcagcggttgggataccacaacgatttggaatacgggcggcaatctgtccgtaggcgtcaatttgcccacgctcaaaacaaacacgcaaagccccgcacccacgcttccggcaacatacacggtacaaggcacggcggacaatcccttcctcgttaccaacgaaaccgaactccgcaaagtcggctccggcactgacggctggacacttacggcgcactacaaacagacggcgaacatctccgtgtcaacaggcaactttacgaaaatcggctcaagcaccagcaaattcaccggttcatatgacggagacggaaaaaccatcaccaacttgaccttgaacataaccggcacaagtcatataggtttattcgcctatatcggcgcaggcggcacggtaaaaaacatgaccgttagcggcacgataagtttaagcaacggcgtgaatgcgacaaatatcggcagcatagccggacaaaatgacggaacgattgacaaatgttactccagcgtacaaataagcggctcatcatgcgatcaggtcggcggcattgtcggacagaataacggcacagtgataaacagcagaagcgccgcaacaataagcggcagaacttccgtcggcggcattgccggagtgaataacggcaagattgaaaacagttacaacacgggaagcgtcagcggcagaaatcaagtaggcggtatcgccggagccaattccggcacaggcagtaatataaggataaggaactgctataacacgggcaatattaccgccaccgaacccaatgccggattcggaggcattgtcggggctaacctgtcaagctcaacggtagaatactgctacaataccggcaacgttaccgctcaaagtaatgtcggcggcatagcaggaagtaataccgcaggaagcactattcaattctgcatatcgctcggcgcaagagtaaccggcgacagcaatgtcggtcgtatagccggaaccagttccggcactctcaccgccaactattcccgttcagatatgaaaatcggcgcaagcggcgcagagacagtaccaaccgtaaatatagggacaacagccgtaaacggcgcaaacatcactataggcagttcgacatcactgtccaccgttttcagcagttttgattccaccgcaatttggaatatcaacagcagtttgaccgtaggcggcaatttagtaacgctcaaaacaaacacgcaaagccccgctcccacgcttccggcggcgtacgtggcaggcacggcggctgatcccttcctcgttaccaacgaaaaccgatctccgcaaggtaggaacaggcactga

SEQ ID NO: 67694 - protein, 513 aa, Unknown
  Obtained from environmental sample
  DOMAIN (298)...(328): The GLUG motif
  misc_feature (1)..(513): Xaa is any amino acid
MQNCVSLGARVTGTGSTNRVIGIANGNMNDNKARTDMKIGASGAEATVSGAATNSNGASVTVGTAMSTFFSGWDTTTIWNTGGNLSVGVNLPTLKTNTQSPAPTLPATYTVQGTADNPFLVTNETELRKVGSGTDGWTLTAHYKQTANISVSTGNFTKIGSSTSKFTGSYDGDGKTITNLTLNITGTSHIGLFAYIGAGGTVKNMTVSGTISLSNGVNATNIGSIAGQNDGTIDKCYSSVQISGSSCDQVGGIVGQNNGTVINSRSAATISGRTSVGGIAGVNNGKIENSYNTGSVSGRNQVGGIAGANSGTGSNIRIRNCYNTGNITATEPNAGFGGIVGANLSSSTVEYCYNTGNVTAQSNVGGIAGSNTAGSTIQFCISLGARVTGDSNVGRIAGTSSGTLTANYSRSDMKIGASGAETVPTVNIGTTAVNGANITIGSSTSLSTVFSSFDSTAIWNINSSLTVGGNLVTLKTNTQSPAPTLPAAYVAGTAADPFLVTNENRSPQGRNRH

SEQ ID NO: 67695 - DNA, 1278 bp, Unknown
  Obtained from environmental sample
  misc_feature (1)..(1278): n is a, c, g, or t
atgacaacaagcaactttacgaggattggaataaacacagacaccggcaatttctcaggtgtgtatgacgggggcggatataccatcaccggcttgaccataaccggaaccagttatcagggagttttcggcgcaataagcggcacggtaaaaaacatgaacgttaccggcacgataacccaaaacggaaccggaaacaatattagtaccggcggcattgtgggcgtaaatatggcggacggcacgattgacaactgctcctttagcggaaccgtcagcggaacagggtgcgatcaagtcggcggcattgttggatataattacggcacggtgataaacagcagaagcgccgcaacagtaagcggcaggacgaatatcggcggcattgtcggacagaatcagggcaagattgaaaacagttacaacacgggaagcgttagcggaatccggcaagtcggcggtatagccggtgttaataccggaaacagtaattatataaagaactgctataacacgggcaatgttacctccaccgaagcgaccgtagcctccgaagccggaggcattgtcgggtctaaccaatcaagcgcaacagtagaatactgctataataccggcaacgttactggcacaagttcggctgtcggcggcatagtgggaaacaacgccaacaattgcacagttcaattttgcgtatcgctcggcgcaagggtaaccggaactagcaatgtcggtcgtgtggcaggaaccgttcccggactcggcaacaacagagcccgtgcggatatgaaaatcggcgcaagcggcgcagaggcgacagtatcgggaaacggaagcagctcaaacggcgcgtctaacagtattggtacggcacagacttccttttacctcagttgggattcctcgatttggaatatcagcggagatatgacaataggcgtcaatttggcaacgctcaaaacaaacacgcaaagcccggctcccacgcttccggcagagtaccttgtacccggcacggcggaaaatcccttcctcgtcgccaccgaagccgatctccgcaaagtcggcactgaaacaacaacaggaggctggacgcttacggcgcactacagacagacagcgaatatcacgctgacaagcgcatttacaaggattggcactttcacagacaccggcaaattctctggcacgtatgacggggacggaaaaactatcaccggcttgaccataaccggctccgcttatcagggagttttcggcgcaacagcggcacggtga

SEQ ID NO: 67696 - protein, 425 aa, Unknown
  Obtained from environmental sample
  DOMAIN (148)...(176): The GLUG motif
  misc_feature (1)..(425): Xaa is any amino acid
MTTSNFTRIGINTDTGNFSGVYDGGGYTITGLTITGTSYQGVFGAISGTVKNMNVTGTITQNGTGNNISTGGIVGVNMADGTIDNCSFSGTVSGTGCDQVGGIVGYNYGTVINSRSAATVSGRTNIGGIVGQNQGKIENSYNTGSVSGIRQVGGIAGVNTGNSNYIKNCYNTGNVTSTEATVASEAGGIVGSNQSSATVEYCYNTGNVTGTSSAVGGIVGNNANNCTVQFCVSLGARVTGTSNVGRVAGTVPGLGNNRARADMKIGASGAEATVSGNGSSSNGASNSIGTAQTSFYLSWDSSIWNISGDMTIGVNLATLKTNTQSPAPTLPAEYLVPGTAENPFLVATEADLRKVGTETTTGGWTLTAHYRQTANITLTSAFTRIGTFTDTGKFSGTYDGDGKTITGLTITGSAYQGVFGATAAR

SEQ ID NO: 67697 - DNA, 384 bp, Unknown
  Obtained from environmental sample
  misc_feature (1)..(384): n is a, c, g, or t
gtgaaaaacatgaacgttaccggcacgataacccaaaccggaaccggagccaataatggttccggcggcattgtgggcgtaaatatggagggcggcacgattgaaaactgcgtctttaacggaaccgtcatcggcggaagcgccaatcaaatcggcggcattgccggaaataattacggcacgataacagactgcggaagcaacgcaacggtaagcggcgcaagtagtatcggtggcattaccggagtgaattggagtgcaggccagattaaaaacaccagaaacaccgcaacggtaagcggcactactaatgtcggcggcattgcgggaataaatcaaggcaagctggacaacanttacaacaccggagcccttaaaccctaa

SEQ ID NO: 67698 - protein, 127 aa, Unknown
  Obtained from environmental sample
  DOMAIN (17)...(44): The GLUG motif
  misc_feature (1)..(127): Xaa is any amino acid
MKNMNVTGTITQTGTGANNGSGGIVGVNMEGGTIENCVFNGTVIGGSANQIGGIAGNNYGTITDCGSNATVSGASSIGGITGVNWSAGQIKNTRNTATVSGTTNVGGIAGINQGKLDNXYNTGALKP

SEQ ID NO: 67699 - DNA, 303 bp, Unknown
  Obtained from environmental sample
  misc_feature (1)..(303): n is a, c, g, or t
atggcgagtctgaacacattagataaatttcttaatggaagggcattacaggtagatacacaaattgaaagagaattttctgataatgaaattattaatagagcgcgttcaagattgggagaaaagggatatgatttagttacaaataactgtgaacattttgcacgatggtgtgtaaccggggaacatgtatcttatcaggtcaataatttccctgaaaaggttgataatgctattttggttgttcaggaaaattgggatagagctagtaaatttgttgaatttattaaattgttttattaa

SEQ ID NO: 67700 - protein, 100 aa, Unknown
  Obtained from environmental sample
  DOMAIN (1)...(71): NC domain
  misc_feature (1)..(100): Xaa is any amino acid
MASLNTLDKFLNGRALQVDTQIEREFSDNEIINRARSRLGEKGYDLVTNNCEHFARWCVTGEHVSYQVNNFPEKVDNAILVVQENWDRASKFVEFIKLFY

SEQ ID NO: 67701 - DNA, 1935 bp, Unknown
  Obtained from environmental sample
  misc_feature (1)..(1935): n is a, c, g, or t
ttgcggtcactgcccgatgtctcagatgaccctaaaaatgggaatcgaaaattacctcaaaaaggaaataccccaggtcaaagccgtcgtcggtgtctgaaccggacgactctcctncagataatgggcaacaagttgccttaccgcaagctgcctcattgcaagacaacttgttgncaggtagcttgttgncaggtaaacttgttgccagtctgccgccgcgacatggacgagcgcaaatgggaacaatgtgatttcatctttgtttcaggcgacacctatgtagatcacccttcttttgcggcggcgattttgtgcagggctttggaagcggcaggtttccgcgccggaataattcctcaacctgactggaaagacccatcgtcatataccgtattgggacgaccgcgccttgcttttttggtaggcgcaggcaatatggattccatggttgcgcattacaccgccgcgaaacgcaagcgttccgatgatgcgtattcgccgacaggaaaaaacggactgcgccctgatcgcgcaacgctggtttacgtagaaggaatcaggcgcgcgtacaaagatgtgccgataatcatcggcgggatcgaggcaagccttcgccgctttgcccattacgattactggtctgatgctgtacgtcgttcgattctgcttgattcaaaagcggatattctggtctacggaatgggagaaaagcccctgcttaacatagcgcgccggttagcggatggtgaaacaatcgacagtataaccgatgaaaggggaacctgtgtccgtgttcacggaagagccgccgttgaaaaaggtaaaaccgaacaatggaaagacatttgtcttctgccgggatatgaagcggtaaaagggaaagacgagtcttcgttattcgcttatgccgaacattttatgatacagaaacaaaacgctgatccgttaagcgcaaaaccgctggcggaagaaaacgacggagatcgatgggttattcaaaatccccccgccccgcccctttccacaaaagaactggataatttgtacgagcttccctttacgcgcaaagctcacccaatgtatgacgcgcaaggaggcatagacgcgcttaaagaagtttccttttcgctgatttcaagccgaggctgttttggcggctgttctttttgcgcaattaccaatcatcaggggcgcgccgtcgttggccgcagcaaagaaagcctgctccgcgaagcgaactctcttgccgcacatcccgattttaagggatacattcacgatgtcggcggtcctactgccaatttctttcgccctgcatgcgaaaagcaggaacgcggcggtttttgtacaaacagggaatgtctgtatccgcagccctgccctaacttaaaagcggatcacagtcagtatataaaaacattaaacgctttacgcaaaatctccggtatcaaaaaagtatttattcgctccggtctgcgattcgactttattcaacatgataaaaaacacggaaaagaatttttggaaatgctgtgccaattccatgtcagcggccagttaaaagtcgccccggaacacatctgcgagaatgtgcttgacgcgatgggcaaatgccctcactcaaattatgaagaattcagaaaagattttactgcaataaacaaacggcttggattgaaacaatacttgctgccgtattttataacttcccatccgggcgccggtatgaaagaagcggaaaaacttgcgcgttatcttaaaaaaacgcgctttgtgccggaacaaacacaggatttttatcccacccctggaactctgtctgccgttatgtattacacaggccttgatccccgaaccatgacgcctatatactccgccaaaggagaaaaagagcggcgtaaacaaaaagaattactgagaaccaagaagtaa

SEQ ID NO: 67702 - protein, 644 aa, Unknown
  Obtained from environmental sample
  DOMAIN (378)...(587): Radical SAM superfamily
  misc_feature (1)..(644): Xaa is any amino acid
MRSLPDVSDDPKNGNRKLPQKGNTPGQSRRRCLNRTTLLQIMGNKLPYRKLPHCKTTCXQVACXQVNLLPVCRRDMDERKWEQCDFIFVSGDTYVDHPSFAAAILCRALEAAGFRAGIIPQPDWKDPSSYTVLGRPRLAFLVGAGNMDSMVAHYTAAKRKRSDDAYSPTGKNGLRPDRATLVYVEGIRRAYKDVPIIIGGIEASLRRFAHYDYWSDAVRRSILLDSKADILVYGMGEKPLLNIARRLADGETIDSITDERGTCVRVHGRAAVEKGKTEQWKDICLLPGYEAVKGKDESSLFAYAEHFMIQKQNADPLSAKPLAEENDGDRWVIQNPPAPPLSTKELDNLYELPFTRKAHPMYDAQGGIDALKEVSFSLISSRGCFGGCSFCAITNHQGRAVVGRSKESLLREANSLAAHPDFKGYIHDVGGPTANFFRPACEKQERGGFCTNRECLYPQPCPNLKADHSQYIKTLNALRKISGIKKVFIRSGLRFDFIQHDKKHGKEFLEMLCQFHVSGQLKVAPEHICENVLDAMGKCPHSNYEEFRKDFTAINKRLGLKQYLLPYFITSHPGAGMKEAEKLARYLKKTRFVPEQTQDFYPTPGTLSAVMYYTGLDPRTMTPIYSAKGEKERRKQKELLRTKK

SEQ ID NO: 67703 - DNA, 435 bp, Unknown
  Obtained from environmental sample
  misc_feature (1)..(435): n is a, c, g, or t
atgaaaaaagtaattattttttttattttaagtttctctttttgcggtttctgtttttcccaagctgataataccgtaaatgttactgtagaaattaacaatattgtcactaacggcggaaaagtttatttggttgttttctttaccgccgaaagttttaaaaaagaaaaaccggatctggcggttgaaataccgttcgatgaatcctcagtaataaaagaagggtcattgccgcgcggggaatgtgtgttatttgtatttcaggacgcaaataacaatataaaacttgattgcggactttttgggataccaaaagaaaaattcggtatctccaattattttgggaaaggatatccttcaagaaatttcgacaaacaaaaaattatgatcgatgaaaataccgggaaaatagttcttggtttgtataaattataa

SEQ ID NO: 67704 - protein, 144 aa, Unknown
  Obtained from environmental sample
  SIGNAL (1)...(22)
  misc_feature (1)..(144): Xaa is any amino acid
MKKVIIFFILSFSFCGFCFSQADNTVNVTVEINNIVTNGGKVYLVVFFTAESFKKEKPDLAVEIPFDESSVIKEGSLPRGECVLFVFQDANNNIKLDCGLFGIPKEKFGISNYFGKGYPSRNFDKQKIMIDENTGKIVLGLYKL

SEQ ID NO: 67705 - DNA, 948 bp, Unknown
  Obtained from environmental sample
  misc_feature (1)..(948): n is a, c, g, or t
atgagcgtacctttatttttggctccaatggctgaattaagccacagggcttttagggaattattggaagattttggcggctgcgacagctatttttccgaaatgatcagcgtcggcgcccttttggcgggcggtcctaatgaaaaatggtacattgatgccggtccaaagcccgaaaaagtcgtttttcaggttgtaggagccgattctggacaaatttctcaggctgcggtcattctcaacaggctggaatgcgccggaatcgacataaatatgggttgcagcgccccaataatccgaaaaacaggcgcaggcgccgcgtggatggcctcgattgaccacgcaggagagctgatttcccgtgtcagaccccttgtaaagcgccgtttaagcgtaaaattgcgtattggctttaaggatgattttgaatatttggtacggttctgccgccgtcttgaggccgaggggacagagcttattacccttcaccctcggctggttacggaaaagtttaaacgccttgcgcgttgggaatatgtcggcaggctaaggcaggaactgaaaatccccgtagccggaaacggggacatagccggcgctgaggaacttgtccggcgggcggcaggcccctgcgatgcggtcatggtcgggcgggcggcggtgcgacaaccgtggatttttgccaaagcaagggaaattgaaagcgcaaattcgaaaatgagctctgtccccaatatcgaagaaaccggggttcgttttctggaacttttatcccgataccagccgccggagtttcatctttccagagcaatacggttttttggttttttctgtgacaatctgaaatgggggaactatctgaaaactcaattgaatcgcgaaaaaaccctgtccggcattgagcaggcatggcggaagtattttaaagacggtagtgcaacaacttga

SEQ ID NO: 67706 - protein, 315 aa, Unknown
  Obtained from environmental sample
  DOMAIN (6)...(312): Dihydrouridine synthase (Dus)
  misc_feature (1)..(315): Xaa is any amino acid
MSVPLFLAPMAELSHRAFRELLEDFGGCDSYFSEMISVGALLAGGPNEKWYIDAGPKPEKVVFQVVGADSGQISQAAVILNRLECAGIDINMGCSAPIIRKTGAGAAWMASIDHAGELISRVRPLVKRRLSVKLRIGFKDDFEYLVRFCRRLEAEGTELITLHPRLVTEKFKRLARWEYVGRLRQELKIPVAGNGDIAGAEELVRRAAGPCDAVMVGRAAVRQPWIFAKAREIESANSKMSSVPNIEETGVRFLELLSRYQPPEFHLSRAIRFFGFFCDNLKWGNYLKTQLNREKTLSGIEQAWRKYFKDGSATT

SEQ ID NO: 67707 - DNA, 435 bp, Unknown
  Obtained from environmental sample
  misc_feature (1)..(435): n is a, c, g, or t
atgatagcaaagactgatatgccaaatatcaacgagaaggcagctgagggaattaaacccgagggtgttccgtaccgggttcttgtcgttgacgattcaatgtttatagcaaaacagctaggtcagattctcacgtcagaaggttttgaagtagctgatactgctgctgacggagcccagggagttgaaaaatacaaagcgttggggaacattgatctggttaccatggacattaccatgcctgttatggatggtgtttccgcattagagaagattcttgaacatgacaaacaggccaaaataataatggtcagtgcattgggcaaagaagacgtcgtcaagaagtgcctcttgatgggagcaaagagctacattgtaaaaccgttggacagaaaaaaagttctggaaaggattgtttctgttttaaaacagtag

SEQ ID NO: 67708 - protein, 144 aa, Unknown
  Obtained from environmental sample
  DOMAIN (25)...(139): Response regulator receiver domain
  misc_feature (1)..(144): Xaa is any amino acid
MIAKTDMPNINEKAAEGIKPEGVPYRVLVVDDSMFIAKQLGQILTSEGFEVADTAADGAQGVEKYKALGNIDLVTMDITMPVMDGVSALEKILEHDKQAKIIMVSALGKEDVVKKCLLMGAKSYIVKPLDRKKVLERIVSVLKQ

SEQ ID NO: 67709 - DNA, 1107 bp, Unknown
  Obtained from environmental sample
  misc_feature (1)..(1107): n is a, c, g, or t
atgggaagggatatattagatttatacagcgattatctgctgtacggtaacggacaaataacggcgacaggattatctgagatattagaaggcgatataagccacgataaaataacgcggtttttaacaacagaattatttgatgaaaaagcactttggaaaaaagtaaaaaagattgtaagggcatacgaagcggaagacgcgtgtttgatatatgacgacaccatagttgaaaaaccatacatggacgagaatgacataatatgctggtattttgatcacaaagaaaacagggcggtaaaagggataaatttattgagcgctttttaccatagtgaaaaagacgggaaaacagtacgcctgccgacaggttatcgtgtgatagccaagacggaggaatacatagatgaaaagagcggggagctgaaacggagaagccctgtaacgaaaaacgaaatgatgcaggggatgataaagcggcatatacaaaaccaggtaaaattcaagtatattttagcggattcgtggtattcatccgccgaaaacatgcgttttatagcaaaaagaaagaaagtgtttatttttgagttaaaagaaaaccggctggcagcagacagcgaaagcaaaagggatcagggggcattcgagaggcttgagcggttggaaatgccggaggggaagcctgtgaaagtttggataaaggatttaaagtttcctgtaacggtattcaaaaaaatctttacaaacaaagacggaacaagcgggcggcggtttctggcgtcaaatgatttaaccttaacggatgaacaattcaggacgctttacaaaaaacggtggggcgttgaagagtatcacaagagtctgaagcagaatgcgtcaataggaagttccccggcgcataccgagagaacgcagggcaatcatatattcgccgctatatttgcctatgtaaaacttgagatgttaaagcaggcaacgaatctcaccaacgaatctcaaccattttgcaatgaaaacaaaaatctacatggcttcaatgatggcggcaaaggttacatttcaagagctatggaaaaatactcaaaaccttgcctttgcgtaacatga

SEQ ID NO: 67710 - protein, 368 aa, Unknown
  Obtained from environmental sample
  misc_feature (1)..(368): Xaa is any amino acid
MGRDILDLYSDYLLYGNGQITATGLSEILEGDISHDKITRFLTTELFDEKALWKKVKKIVRAYEAEDACLIYDDTIVEKPYMDENDIICWYFDHKENRAVKGINLLSAFYHSEKDGKTVRLPTGYRVIAKTEEYIDEKSGELKRRSPVTKNEMMQGMIKRHIQNQVKFKYILADSWYSSAENMRFIAKRKKVFIFELKENRLAADSESKRDQGAFERLERLEMPEGKPVKVWIKDLKFPVTVFKKIFTNKDGTSGRRFLASNDLTLTDEQFRTLYKKRWGVEEYHKSLKQNASIGSSPAHTERTQGNHIFAAIFAYVKLEMLKQATNLTNESQPFCNENKNLHGFNDGGKGYISRAMEKYSKPCLCVT

SEQ ID NO: 67711 - DNA, 1566 bp, Unknown
  Obtained from environmental sample
  misc_feature (1)..(1566): n is a, c, g, or t
atgtcgcaaataaacctaacttttccagacggttctgaaaaatcccttgaaagcgggattaccggattggatatcgcaaaaagcatttcagaagggcttgctcgcaaagccatagccgttaaactcggcgaaaaaattttagacttaaaccgccccataactacaaacggcacatttcgcataataacagcgagcaacgaagatgcagatgccctttatgtgctgcggcactcctgcgctcacgttttggcagaggcaatttgcgtgctttgcccgggcacaaggcttgcttacggcccccctgtggaagacggtttttactacgaccttgcaacacccgagcccctgacacacgcagattttgaacgcattgaaaaaaagatggcggaaataataaaagaagaccgcccatttacacgcattgatgtttcaaaagaagaagcccttaaacgcacagaaggcgataaatacaaaagagacaatgttgacagagccattgaacgcggagatacggtttttagcttttatgcaaacggaatcccaaacgaaggctgggaagatttatgtgcaggtccccacgttccaagcacgggcaagctaaaagcattcaaagttctgagccttgccggagcctattggcacggagaccaaaaaagcgaccaactcaccagagtttatggaacctgctttgcagacaaaactggtttggaagcccatttgaaatttttggaagaggcaaagaaaagagaccatcgccgccttgggcaggagatggacttataccacatagaagaccacagccccggtatggtgttttggcacccgcacggagccgtgcttgtgaatgtgttgaaagattttgtccgcaaagagataacaaagcgaggctacaaagaggtgattacccccgaaatagtggataaatccctttggataaaaagcggtcacgcagacaaatacgattccaatatgttcaaaaccttggcaggcgagaaagatatggcggtaaagcccatgaactgcccctgccatattgaaattttcaaccaaggcttaaaaagctggcgcgacttgccgcttcgctttgcagaatttggaaagtgccaccgcaacgaaccagccggcacaatgcacggcttgatgagggttcgcggctttgttcaagacgatgcccatatattttgcaccgaggagcaaatcactcaggaagtgagcagtttttgcacattggtaaaagacctatacaaagtttttggctttgaaaaaataaccgtgaaattcagcacacgcccagaactcagaattggctcagacgaactttgggacaaagcggaaaactccttggaagaagccacaaaacttgccggcttggaatacaaactaaacccaggtgaaggtgcattttatggaccaaagttggaatttgtgcttaaagattcttgggcagagactggcaatgcggcactatacaagtggatttcaatatgcccggtcgccttggagcggaatatgttggcaaagacaaccaaaaacacacgcccgttatgttgcaccgcgccgccttag

SEQ ID NO: 67712 - protein, 521 aa, Unknown
  Obtained from environmental sample
  DOMAIN (4)...(63): TGS domain
  misc_feature (1)..(521): Xaa is any amino acid
MSQINLTFPDGSEKSLESGITGLDIAKSISEGLARKAIAVKLGEKILDLNRPITTNGTFRIITASNEDADALYVLRHSCAHVLAEAICVLCPGTRLAYGPPVEDGFYYDLATPEPLTHADFERIEKKMAEIIKEDRPFTRIDVSKEEALKRTEGDKYKRDNVDRAIERGDTVFSFYANGIPNEGWEDLCAGPHVPSTGKLKAFKVLSLAGAYWHGDQKSDQLTRVYGTCFADKTGLEAHLKFLEEAKKRDHRRLGQEMDLYHIEDHSPGMVFWHPHGAVLVNVLKDFVRKEITKRGYKEVITPEIVDKSLWIKSGHADKYDSNMFKTLAGEKDMAVKPMNCPCHIEIFNQGLKSWRDLPLRFAEFGKCHRNEPAGTMHGLMRVRGFVQDDAHIFCTEEQITQEVSSFCTLVKDLYKVFGFEKITVKFSTRPELRIGSDELWDKAENSLEEATKLAGLEYKLNPGEGAFYGPKLEFVLKDSWAETGNAALYKWISICPVALERNMLAKTTKNTRPLCCTAPP

SEQ ID NO: 67713 - DNA, 477 bp, Unknown
  Obtained from environmental sample
  misc_feature (1)..(477): n is a, c, g, or t
ttgggcagagactggcaatgcggcactatacaagtggatttcaatatgcccggtcgccttggagcggaatatgttggcaaagacaaccaaaaacacacgcccgttatgttgcaccgcgccgccttaggctcacttgaacgcttcataggcattctaaccgaagaatttgcaggtgatttcccattttggcttgcccccgtgcaagttcgcgttttgcccgtttccgaaaaattctcggaatacgcggagaaaattcgcacggaactcgtagagaaaggcattcgtgcggagatagacaactcaaacgaaaaggttggctacaaaattcgcttgggtgaattggcgaagataccttatttacttgttgttggcgaaaaggaaattgcagaaaatgcggtgtctgttcgcaagaggaaagagggcgatttgggtaagaagaacttggatgagtttttgaaagagattgcactcagttag

SEQ ID NO: 67714 - protein, 158 aa, Unknown
  Obtained from environmental sample
  DOMAIN (68)...(158): Anticodon binding domain
  misc_feature (1)..(158): Xaa is any amino acid
MGRDWQCGTIQVDFNMPGRLGAEYVGKDNQKHTPVMLHRAALGSLERFIGILTEEFAGDFPFWLAPVQVRVLPVSEKFSEYAEKIRTELVEKGIRAEIDNSNEKVGYKIRLGELAKIPYLLVVGEKEIAENAVSVRKRKEGDLGKKNLDEFLKEIALS

SEQ ID NO: 67715 - DNA, 996 bp, Unknown
  Obtained from environmental sample
  misc_feature (1)..(996): n is a, c, g, or t
atgacagaaaaagaaagccctaacaggtgcggcgctttaatcgaaagtttcagaaaagaaatggcgaagcgcattgtcggccaaagtgaaatgatagacgggcttcttgccgggcttatcgcaggagggcatgttctgctggaaggcgtccccggtcttgcgaaaactcttgccgtaaaaagccttgcgcaaattacagggctggatttcaagcgtattcagtttactccagatcttctgcctgcggatttaacgggaacattgatctgggaacaggcgaacggtaatttttccgttcggcgcggaccgatattcgcgaatgtaattcttgcggacgaaatcaaccgcgctccggcaaaagtacagtccgcccttctcgaggcaatggaagaaaaacaggtaacaatcggggaaaaaagttatcctctgccaaatcctttttttgttcttgcgacagaaaacccgattgaacatgaggggacttattccctgccggaagcggaacttgaccgttttctgatgaaactgcttatcgaatatcccaaacctgatgaagaacttgatatcgtaaaaaacagcgcgccgttttctgttatcgcggataaagcagcggcgcagcaagcagcggcgcagcaagcggcggcgctttcgcctgtgttgaacgccgaagcccttaaaattttgcgtaacgcggcggattcaatccatattgacgaggaaaatcacaaatacattgtgtcgattgtaaccgctacccgccccgtctcaaaatcacagacggggtttaccgttatatgtcattcggcgcatccccgcgcgcgtcaatgccttgtaccgctgctgcaggattttcgcaatgctggaaggacggaattttgtcactcccgaagatgtaaaaaacgcggctcttcctgttctgcgccaccggattgtcctttcctacgaggccgaagcggagggaatggacgcggacgcggttatcgccagaattcttaa

SEQ ID NO: 67716 - protein, 331 aa, Unknown
  Obtained from environmental sample
  DOMAIN (44)...(238): ATPase family associated with various cellular activities (AAA)
  misc_feature (1)..(331): Xaa is any amino acid
MTEKESPNRCGALIESFRKEMAKRIVGQSEMIDGLLAGLIAGGHVLLEGVPGLAKTLAVKSLAQITGLDFKRIQFTPDLLPADLTGTLIWEQANGNFSVRRGPIFANVILADEINRAPAKVQSALLEAMEEKQVTIGEKSYPLPNPFFVLATENPIEHEGTYSLPEAELDRFLMKLLIEYPKPDEELDIVKNSAPFSVIADKAAAQQAAAQQAAALSPVLNAEALKILRNAADSIHIDEENHKYIVSIVTATRPVSKSQTGFTVICHSAHPRARQCLVPLLQDFRNAGRTEFCHSRRCKKRGSSCSAPPDCPFLRGRSGGNGRGRGYRQNS

SEQ ID NO: 67717 - DNA, 1059 bp, Unknown
  Obtained from environmental sample
  misc_feature (1)..(1059): n is a, c, g, or t
atggaaacaagcgagcttctgcgcaatattactacccttcccataatttcgggcggtcttgcggaagaaatgcttgcgggaaatttccgctccgtttttaagggacagggaatggaatttgacgaagcgcggcattacgagccgggcgacgacatacgctccattgactggaacgcgagcgcgcgtttcggcactccgtttataaaaatgtaccgcgaagaacgcgaattaacaattttaattttactggatatttctccgtccatgcacagtgtaagcggctctcacggaagcggcgttcgcgagagcggcgctcacgagagcggcgttcgcgagaacggcgttcgcgagagcggcgctcacgagagcggcgctcacgagaacggtcattacaaaacaacgcggacgcacggaaatatcagcccttacgaacaggggcttatctgcgcggcgttagtcgctttttccgccgaacacacaggacagcagttaggggcttttttctttgacaacaacatagaaaaggtttttccgccgcacaaaggacggcggcacataatgtcgttgataatggccgcccttcggtatcagaataaaattcagccgcgcaaggataaacacggcagtaacattgccgccgctctcgcgggggcgcagcgtcttttaaaaaagcgttcccttgtcgttgtaatttcggactttttcagcgttaactgggaacatgaaatggcaaacctttgccgcaagcacgacgttatcgcactgagggttgttgatccgccaaatctcccatggaagggactgataacgctggaagacccggaaacgggagtgcgtcttgaagcgccggcgggtatggattcttttaaggaaagttggctgcaatggcacgaagaacgttccggcctttgggaaaatctttgccggcgcgcgggcgcgtcttttctggaacttacaaccgaagcggacgcgccttcttccctgctaaaattcttcggttcgcgcggatttggcgcgcacggatttaccagacatgaggcgcacagacacaaaaaatga

SEQ ID NO: 67718 - protein, 352 aa, Unknown
  Obtained from environmental sample
  misc_feature (1)..(352): Xaa is any amino acid
METSELLRNITTLPIISGGLAEEMLAGNFRSVFKGQGMEFDEARHYEPGDDIRSIDWNASARFGTPFIKMYREERELTILILLDISPSMHSVSGSHGSGVRESGAHESGVRENGVRESGAHESGAHENGHYKTTRTHGNISPYEQGLICAALVAFSAEHTGQQLGAFFFDNNIEKVFPPHKGRRHIMSLIMAALRYQNKIQPRKDKHGSNIAAALAGAQRLLKKRSLVVVISDFFSVNWEHEMANLCRKHDVIALRVVDPPNLPWKGLITLEDPETGVRLEAPAGMDSFKESWLQWHEERSGLWENLCRRAGASFLELTTEADAPSSLLKFFGSRGFGAHGFTRHEAHRHKK

SEQ ID NO: 67719 - DNA, 933 bp, Unknown
  Obtained from environmental sample
  misc_feature (1)..(933): n is a, c, g, or t
atgaaaaggtacgcggcgttaactgtttttattttcacattcaccgccgcttatgcgcaatacggcgcacaaaataattcgcagtacagctcacagtacagcggggcaatactgatcccaagtgttgtttatgtgggagacaaggcggttcttgtcctgccgctgcccgcgtcaattaaaaatacaaacgacattttccttacttcgctgtctccgaatattccaaaggacgacaacattgactttcaccgcataatacttgaacggcgcataacgggaagcaggcttttaattgaatttacggcattcgtcccgggttatctgaaactgcctgtaatcgaaataggcggcgaactatttgacggcttgtacgtaacagtcaattccgttattgacacgcgaaagtctttggaactttcagggtatgcttcttcgctggcaatgccgggaacagccgtaatactttacggagctatggcggtagttgtgtttatttttcttttattactctggtttatttttaagggacgtacttttattaatttgtggatggaaaaatggaaacgccttcgtctttttaccttcataagaaatatggaaagacgcctgcaaaaaacgctgttgaagggcggggacaaacgggctattctggataaaatttccgatacgttcagggatttcctttctgttttgacaaatacaaattgccgctccatgaccgcccgcgaattcaacagtttacccgaaaaattaatacaagacggcggttttcttgggtattttttccgccgctgcgacaagcttcgtttttccggcgaaaatgtcagtatacgggacatatcatctctgttagacgatctgcacaattatattgaaaagctgtacttgcatggaaattataaagggagcgaactgaagggaggagcggcgtga

SEQ ID NO: 67720 - protein, 310 aa, Unknown
  Obtained from environmental sample
  SIGNAL (1)...(19)
  misc_feature (1)..(310): Xaa is any amino acid
MKRYAALTVFIFTFTAAYAQYGAQNNSQYSSQYSGAILIPSVVYVGDKAVLVLPLPASIKNTNDIFLTSLSPNIPKDDNIDFHRIILERRITGSRLLIEFTAFVPGYLKLPVIEIGGELFDGLYVTVNSVIDTRKSLELSGYASSLAMPGTAVILYGAMAVVVFIFLLLLWFIFKGRTFINLWMEKWKRLRLFTFIRNMERRLQKTLLKGGDKRAILDKISDTFRDFLSVLTNTNCRSMTAREFNSLPEKLIQDGGFLGYFFRRCDKLRFSGENVSIRDISSLLDDLHNYIEKLYLHGNYKGSELKGGAA

SEQ ID NO: 67721 - DNA, 1008 bp, Unknown
  Obtained from environmental sample
  misc_feature (1)..(1008): n is a, c, g, or t
atgatgggcgaggaacctaccttggagactgcgccgcccagcagggaaacggcaactaagaatgacgagcgtattgcgttgttccgtcagaatttggaagacataaacaaagaactcggcgttcagaaaaaaatctttgatcagacaggcgagttaagaaaagaacttgaacagcgcatggaagaaataaacggcgatcttaaccgtcttgatcagcgtaaaaacgaaatcatgcagatggaaaaccagtttacccgcatcaagcggctggaagacgaagtaaacaacaagatgacgcgctttatcaatgaaaagacacgcatagatcaaatgaagaacgattttgacaaacttataaaaacttcgcagtctgttgaagaaaggcttgcccaagttacaaattcagacgacatccttgaggcagtacaattaaagatgcgtaaactggaagatattatcaaggaagccgaagaaaagtatcagcgcattgaacgcaagaatgaggtgcttgatgaaacaaacgaaggcatagcccgtaacttcaacaaccttcaaaaaacagagaacgcgattaacaacgccgaaaccatcatcgcaaagctttcggaacaatttgaaagtatgcgttcttccatcgaagccctatccgccgaaagtgttaaagcaaatgacgcgctggaaaaaatcgcggttttggatgaatcgcttgcgcaaatcgaaaagcgtatcgcggagatgaacgtcgcccgcgaatggcttgcgcgcacggaaacagaattaaaaaatttggacaaggatattcgcagccagcttcatcaaaccaaatcacagcttgataaagaaggcagtaaagtacaaatgacaagcaagggcgctccgcctcctcagacacgcgataacgtcataaggctgaaagcaaaaggctggacaaccgaagaaatagcaaactcattgaatctttcaagaggcgaagttgaactgatactggaagtatcttcccgcggatag

SEQ ID NO: 67722 - protein, 335 aa, Unknown
  Obtained from environmental sample
  misc_feature (1)..(335): Xaa is any amino acid
MMGEEPTLETAPPSRETATKNDERIALFRQNLEDINKELGVQKKIFDQTGELRKELEQRMEEINGDLNRLDQRKNEIMQMENQFTRIKRLEDEVNNKMTRFINEKTRIDQMKNDFDKLIKTSQSVEERLAQVTNSDDILEAVQLKMRKLEDIIKEAEEKYQRIERKNEVLDETNEGIARNFNNLQKTENAINNAETIIAKLSEQFESMRSSIEALSAESVKANDALEKIAVLDESLAQIEKRIAEMNVAREWLARTETELKNLDKDIRSQLHQTKSQLDKEGSKVQMTSKGAPPPQTRDNVIRLKAKGWTTEEIANSLNLSRGEVELILEVSSRG

SEQ ID NO: 67723 - DNA, 762 bp, Unknown
  Obtained from environmental sample
  misc_feature (1)..(762): n is a, c, g, or t
gtgaaccaaaccgattggaaaaattttgacgcggcaagagagcggtttcgtcacataactaaagaaattgaaaagagcctgccgaaattaaaaagaatacagcaaaaattcgccgatagccgctctgaagcaaagaacgccgcctacactgtagaaactccggttgtgtacaataccgcgcttgacgatattacaattgacgatgaaataaaacttattttagtggcggacaatcccggcagaagagaacaggccgcagagaacaggcgctatcttgtagggccatcgggaaaaatagcgcaaaaatttttccgcgacaatccgtctttgggcattgatttccttaaaaacgtgattatccttaacaaaaccccgattcactccccgcgcaccgccgaattgagccttctttgcagtatagaagaagaaaccggcggcaattcaatcgcccgcgctctggaaagctctcaaaaaaacatggctgatcttcttcttgaattccagcgggcgcttaatacgcaggtttggataacaggctattcggaaatgaaaaaaggcggtatttttgaaatttataccgacaggctcaaagaactgtacgcggataaatccgaattgtacaaacagattttctttttcaggcatttttcaatgaaccaatttaccattgatcttaaaaaacaggcgatagacggagaaacaaccgcaaaaacacttaatcgcataggccgcgcctacagaaaacgaatactgggattgtaa

SEQ ID NO: 67724 - protein, 253 aa, Unknown
  Obtained from environmental sample
  misc_feature (1)..(253): Xaa is any amino acid
MNQTDWKNFDAARERFRHITKEIEKSLPKLKRIQQKFADSRSEAKNAAYTVETPVVYNTALDDITIDDEIKLILVADNPGRREQAAENRRYLVGPSGKIAQKFFRDNPSLGIDFLKNVIILNKTPIHSPRTAELSLLCSIEEETGGNSIARALESSQKNMADLLLEFQRALNTQVWITGYSEMKKGGIFEIYTDRLKELYADKSELYKQIFFFRHFSMNQFTIDLKKQAIDGETTAKTLNRIGRAYRKRILGL

SEQ ID NO: 67725 - DNA, 2157 bp, Unknown
  Obtained from environmental sample
  misc_feature (1)..(2157): n is a, c, g, or t
atgaattccgtcctaaaaatcctgttagaaaacgttgattccccttcttcccgctttattttcccgaccgataccgcttcctcacggtgggcggattatgttctgcgcgcaaggggcggaactgtggcaatgaacaaatttatcgcgtgggatgtttttaagcaggattcgataaaatcaaaagtaaaaggcaaaaagagcatccccggcgcccttagaaaaatttttgtaagccgccttgtcaatgaaaattcagaaagccatgaaaaaggagcgccaatttttacatcgctgatacgcgcaaagtgggcgaagcaggcggctcatttcgcgccttggcttacgggcattttaccgcagcttggcgcatggttcaaaagaagcgcagggctggcaatagataccgtattaagcgaaaaggcgcatgaagcggcgcaaaattttgaaggcgacgacagggatttgtttgttctcgctcagcgttatgcgcaattccttgaggtgcacgggctttttgaacccgcgtgggaaacccctccgtttaacgacgatggaaaggaatattttatcttttttccgcagtccctttccgattacggcgaatacagggaactattgtccgcaagcgctcatgtaaaaataatcgatatttcaacaaatgacgctttagcgtcaaattcctgcgacacttttttttacaccaattcccgcagtgaaataacagaggccgctctttacatacgcgcattacacgagaaggaaggcgtagactgggactctgtcgcggtttgcattccagattctgaaaattacgaaccctatgttttgcgcgaattcgcaaacagaaatatcccctttgtaaaacgcataagtaaaccggtaaccgcatattccgccggacgtttcttcagctctgtaatcgaatgcgcttcgggtgattttgccttttccgcccttgtttcgcttgttttaaacaagaatctgccgtggaaagacacttccagcattgataaacttgtccaattcggcatagacaacaactgtatctgctcatgggaagaagagcgggacgggaaaaaacaaacgctaaatgtctgggaagacgcttttagcagtccttttggcggaatagaaatcgaaacaaaaaaattcttcggcgatcttaagaggcggttacaggctttaaggtcttcggcatcttttgcggaagtacgaaaacaatatttcattttccgtgaacatttttttgatatggaaaaatgcccgcaggaaaccgaccttatcctgtcccgctgtattgccgaattaatgtacctttgcgaaattgaaaaagactttcccgatgtaaaagctatcgatccttttttattttatactgaatatttaggcgaagtaaattatcttgcccagagtaaattttcaggcgtaaatattctcccctacaaaacagcggcatccgctccttttgactgccacataattcttggcgcgggacaggacagcctgtccgtcgtatacagccatctggattttctgccgcgaaaaaaacgtgaaaaactgggaatccccgatgaagacgcgtctttgatctttatcgaacttcacaaattcaactccgttaagcgcgccgcgtttttttgctgcgagcagtctttttccggttttacaatacctcactcaaaaatcggcgcgcctgcggaagcaaaagagcgttacgcgattgatccgaactgccggaataaattttcagacgacctttaccgcacggaaaattttaccggtgataacggctgtatatttgaaaaactgcatgaaaatcaaatagacggttttgaaaactggaaaagccgcagaaaacaggccgcggggaaaggcggcgaacttaataccgaaaaaaccctgcaaaaattgataaaagataaattcgcttacgaagaaaagatgcctgacaaatacggagtatccgcttcttcattggcaaaatactatcaatgttcgttaaaatggctctttgagcgcgttcttaatatcgaaaatgtgcaactggaagcaaatttaatggcggaaaacatagcgggacttgtataccacgccgcgctcaatcttttttttacggaaataaaagaaaagaaaagaggctttgttaaatcgggttaa

SEQ ID NO: 67726 - protein, 718 aa, Unknown
  Obtained from environmental sample
  misc_feature (1)..(718): Xaa is any amino acid
MNSVLKILLENVDSPSSRFIFPTDTASSRWADYVLRARGGTVAMNKFIAWDVFKQDSIKSKVKGKKSIPGALRKIFVSRLVNENSESHEKGAPIFTSLIRAKWAKQAAHFAPWLTGILPQLGAWFKRSAGLAIDTVLSEKAHEAAQNFEGDDRDLFVLAQRYAQFLEVHGLFEPAWETPPFNDDGKEYFIFFPQSLSDYGEYRELLSASAHVKIIDISTNDALASNSCDTFFYTNSRSEITEAALYIRALHEKEGVDWDSVAVCIPDSENYEPYVLREFANRNIPFVKRISKPVTAYSAGRFFSSVIECASGDFAFSALVSLVLNKNLPWKDTSSIDKLVQFGIDNNCICSWEEERDGKKQTLNVWEDAFSSPFGGIEIETKKFFGDLKRRLQALRSSASFAEVRKQYFIFREHFFDMEKCPQETDLILSRCIAELMYLCEIEKDFPDVKAIDPFLFYTEYLGEVNYLAQSKFSGVNILPYKTAASAPFDCHIILGAGQDSLSVVYSHLDFLPRKKREKLGIPDEDASLIFIELHKFNSVKRAAFFCCEQSFSGFTIPHSKIGAPAEAKERYAIDPNCRNKFSDDLYRTENFTGDNGCIFEKLHENQIDGFENWKSRRKQAAGKGGELNTEKTLQKLIKDKFAYEEKMPDKYGVSASSLAKYYQCSLKWLFERVLNIENVQLEANLMAENIAGLVYHAALNLFFTEIKEKKRGFVKSG

SEQ ID NO: 67727 - DNA, 561 bp, Unknown
  Obtained from environmental sample
  misc_feature (1)..(561): n is a, c, g, or t
atgaaggtaatttttgttgttgatgacagcgataccagcctctcaatagcgaaaagagcgctggaaaatcattatagggttttaacgatgtcatccggcgcgagaatgattaaatttttggaaaaaattactcctgatttgatcattctggatatccaaatgcccgaaatggacgggtttgaagccataaaaatcctgaaatccaagcctttatacgctgagatacccgttatatttcttacaagcagttcggacagcgatattgaggcaaaaggctttgaattaggcgcggtagacttcatcttaaaacctttttccgcgctcgtattgctgggccgtattaaaatgcaattggatattgaaagcataattggcgagcgtatagaaagagtcaaagttcttcaaaacgattttttaacagccgtcgcgaatacgatagaagaacgcgacaggaatacgattggccacaatgaccgtatcgcgacgggcattaaaacacttctaaccgcaatgaaggaacgtggagtatacgcggatgaaatatcatcgtgccgaatctga

SEQ ID NO: 67728 - protein, 186 aa, Unknown
  Obtained from environmental sample
  DOMAIN (2)...(115): Response regulator receiver domain
  misc_feature (1)..(186): Xaa is any amino acid
MKVIFVVDDSDTSLSIAKRALENHYRVLTMSSGARMIKFLEKITPDLIILDIQMPEMDGFEAIKILKSKPLYAEIPVIFLTSSSDSDIEAKGFELGAVDFILKPFSALVLLGRIKMQLDIESIIGERIERVKVLQNDFLTAVANTIEERDRNTIGHNDRIATGIKTLLTAMKERGVYADEISSCRI

SEQ ID NO: 67729 - DNA, 777 bp, Unknown
  Obtained from environmental sample
  misc_feature (1)..(777): n is a, c, g, or t
atgaagtccatctttatagtagacgacagcgatacaagcctgttattggctaaggaagcccttaaagaacactacagggttttaacgatgtcgtctgccgcgaggctttttaaacttatggaaaaatttattccggatttaatcctgctggatattgaaatgcccgagatggacgggtttgaaactttacaaaaattgaaatccaacaatttctacaaggacgttcccgtcatatttttgaccaactacagggaagactccattgaaagtttcggctttgaacttggcgttgttgactttatctcaaagccgttttcaacacccgtgctgatcaaccgtattaaaatgcagcttgacattgacactttaatccacgaacgcactgaaagaatcagacggcttcaagacggaatcatgacggttttagccaacgtgatagaagaacgggacagggacactgaagggcataatgaccgcacggcggcgtttatcaaaattcttatagatgcgatgacagaacgcggagtgtacgccgatgaaatgaaagggtggaatatggaaaaagtcattctttcttcccgtctgcatgacatgggaaaaataagaataatggacacgattttgaacaaacccggcaaattagatgaagatgaatatgaacggatgaaagcccatgccgaagaaggcgtgaagattatcgaaaggatgataaaaaatactggcgaagaggaatttttaagtaacgccaaattgtacgccgaatatcaccatgaatga

SEQ ID NO: 67730 - protein, 258 aa, Unknown
  Obtained from environmental sample
  DOMAIN (153)...(255): HD domain
  misc_feature (1)..(258): Xaa is any amino acid
MKSIFIVDDSDTSLLLAKEALKEHYRVLTMSSAARLFKLMEKFIPDLILLDIEMPEMDGFETLQKLKSNNFYKDVPVIFLTNYREDSIESFGFELGVVDFISKPFSTPVLINRIKMQLDIDTLIHERTERIRRLQDGIMTVLANVIEERDRDTEGHNDRTAAFIKILIDAMTERGVYADEMKGWNMEKVILSSRLHDMGKIRIMDTILNKPGKLDEDEYERMKAHAEEGVKIIERMIKNTGEEEFLSNAKLYAEYHHE

SEQ ID NO: 67731 - DNA, 1482 bp, Unknown
  Obtained from environmental sample
  misc_feature (1)..(1482): n is a, c, g, or t
atgactgaccctgaggccattgcgcttctgaatagtatcgttgaacctcaccgccttattcataccaaggcgggagaaattattgagaatcttaaaaacggggaaaatgatgaagcgataagaaaactgaatgatgaaattttcccgaatacacagacagtcatttccaatttacaagatattcaaaccaggtacggcgaattgcttaatgatataataacagaagaaatagctacaggcgtaagctcagaacaccttattatagttgtaattattgccggaataattataagcgttcttttatctatatttattacttcaagtattataaaacaaatatcccatacagcagaagcgcttaaaattattgcgtcaggagatttgacaaaaaatatcaatgtaaactcaaatgacgaaatgggcaatctttcccgtgatattaatactactatagataaaatcaaaagtatgattgttcttattaaaaaagaatcgtcaaacctcagcaatatcggaaacgaccttgccagcaatatgaccgaaaccgccgcggcaatcaatgaaatcacttcaaacattcagagcgtcaagggcagaataataaaccagagcgccagtgtaacagaaactaacgccacaatggaacaggtcattaccaacatcaataaactcaacggtcttgtagaaaatcaggctgaaacaatatcaaaacgatccgcttttattcaaacaatggtaaataatgtaggttcggtaaatcagactttgcaaaaaaatatagaaaatgtacaaaaccttaaagaagcctcggaggttggacgaagcggattacaggaagtagccgctgatattcaggaaatagcccgtgaatctgaaggtttattggagattaactcggtaatggaaaacatcgccagccagaccaatctgctttcaatgaacgcggcgatagaagcggcgcacgccggggaggcgggcaaaggcttcgccgtagtcgccgatgaaatccgcaaacttgctgaaagttccagcgaacagtccaaaacgattggcacagtactgaaaaagatagcggaatctatcanaaaaattacaagttccaccgacaacgtgcttgccagattcgaggcgattgattcaggcataaaaacggtagcggaacaggaagagataatacgtcatgcgatggaggagcaggctgaagggagcaatcaactccttcagggaaccacgaatttgaatggaattacccagcaggtaaaggccggttccgaagaaatgcttgaaggcagccaggaagttattagggaaagccggaatcttgaaaaagcaacgcaggaaataaccggcggcatgaacgagatggcgtcaggcgcggatcagatgaacatagcggtaaacaatgtcaatgagatgacccaaaagaaccgtgatgccattgatattttgataaaggaagtctcgcgcttcaaggtagagtga

SEQ ID NO: 67732 - protein, 493 aa, Unknown
  Obtained from environmental sample
  DOMAIN (180)...(449): Methyl-accepting chemotaxis protein (MCP) signaling domain
  misc_feature (1)..(493): Xaa is any amino acid
MTDPEAIALLNSIVEPHRLIHTKAGEIIENLKNGENDEAIRKLNDEIFPNTQTVISNLQDIQTRYGELLNDIITEEIATGVSSEHLIIVVIIAGIIISVLLSIFITSSIIKQISHTAEALKIIASGDLTKNINVNSNDEMGNLSRDINTTIDKIKSMIVLIKKESSNLSNIGNDLASNMTETAAAINEITSNIQSVKGRIINQSASVTETNATMEQVITNINKLNGLVENQAETISKRSAFIQTMVNNVGSVNQTLQKNIENVQNLKEASEVGRSGLQEVAADIQEIARESEGLLEINSVMENIASQTNLLSMNAAIEAAHAGEAGKGFAVVADEIRKLAESSSEQSKTIGTVLKKIAESIXKITSSTDNVLARFEAIDSGIKTVAEQEEIIRHAMEEQAEGSNQLLQGTTNLNGITQQVKAGSEEMLEGSQEVIRESRNLEKATQEITGGMNEMASGADQMNIAVNNVNEMTQKNRDAIDILIKEVSRFKVE

SEQ ID NO: 67733 - DNA, 2778 bp, Unknown
  Obtained from environmental sample
  misc_feature (1)..(2778): n is a, c, g, or t
atgtctattatcgataatgaattttacatagacccggaagacagcgctattaaacgcgtgttagtcacaatacggacaaattatccgattgacacttcttctctggaaagaaatatcgccattgagccgataataaccgccgactcaggttcgttaaagaaaaaatcgtatctgtactcattgacgtataacgaggatcgcacccgcgcttacattgtatccgaaccattgggaatgccggcaaaaacaattgaaatgcggcttacgatttactcgggcgtaagagacgctaacaatgaaggaaaagcggcgggaactatgaacgcttatgtgcaaattcccggtatgaacaattttgttcgtgtagataatgtagattgtataacagtgaaaaatgacaagcagttatacgatcgcgcttttgtaatggaaaccaaaggaactgtagacataaatgaattaacaaaaaatattacagtgtggatactgcctaaggatttacccgctcttcccggattaagggcgcagaagaactacgattgggacagcttaaaagaaatagtgcccgaagtattggcgttatcaaaaaaaattacgcttgaacctcttcacaacgcgcttaaatacagttcaactaacagttggaaatatgaagccgaagcggggcagtatatttactttaagttgaatgaaggaacaaaattttacggcggatatgtacttgcagaagcttacgaaaatattttcaggcagggaagtttcccgaaagaactttctatactttcggaaggttctattctttcatacagcggagacaaacggctttccattatgagccggggaataagagatgtagaatttaatatcgggcgtatcagacccgacgacatcaatcatcttgtgtcacagacttcgggcgatgttaccaatatcaattttagaaattacagttttaatcagtacaatattacggaacagtacaccgaaagaacaacagttcctgttgtaaacgatcgtgatatcggctatttctcttttgatttttcacggtatttggacaatataccgagcaaaaatttacggcacggtctttttgtctttaatgtccgcgctgtggacagttcttacagcgacaggcggcttataatcgtaacggatttgggcttttttgtgaaaacaagcgccgatgcaggcaaggatatttttgttcaatcaatcgctacgggaaatcctgtagcgggcgcggttgttactgttcttgggcttaacggcaacccgattttctcaacttctacagattcaggcggacgggctagaattcccgatttcggcaatacatataaaaacgaacgggctcccacggtttacacggttgtttcaggcgaagatatgtcatttatggcgtataacaccaacggacgcaatcttgattattccacttttgacatcggcggcatttacggggcaagcgacccaaaaacattaagagcgtttcttttctccgacaggggaatataccgacccggcgacgaagccaggatagggcttgtgattaaaagcggcgactgggcgggaaatttaggcggcactccgattgaatatcgtgtaacagaccctcgcggagcggaaatttacaacaggcgaataagactttcagccgaaggggtggaagaaatacgctttagcacgcatgactggtcgccgaccggaacttacacggcatcggtctatgttattcaagagtacaagcagggcgatgaattaagggaacgccatgtattccttggctctcaaactgtgaaagttgaggaatttttgcccgacactttaagcgtttccgcagtttttaatcctgtgccgcangacggctggattgctccgggcgaattaaaggcgagggtagcggtgcgaaatcttttcggtacggcggcatcaggcaacgaagtgaaagcgcagatcaatttggctccgggacatcagtatttccgccagtaccgagattatcagtttagagacccatatctgggcaaaaacagttttcaggaatttctcggaaccaaaaccacaaactcggaaggggctgccgagtttaacttaaatctggcaaaatttgaaaaagcgacttaccgcctttctttttacaccgaagcgtttgaaaaaggaagcggaaggaatgtgtccgccgaagcggctgtttatgtaagccctctgccttaccttgtaggctacaaagcggacggcaatttgaattatatttcacgtaactccgtgagggctttgtctttaatcgccataaacccgaagacggaaaaaacaagcgtgaataatcttactcttacaataaccgagatgcgttatgtatccgctcttgtccgacagcctaacggcgtatacaaataccagtcaattcaaaaagaatatcctgtaacaacaaagcaaattaccatacctgccgcagggcttgaataccgcctgcctacaaacaatccgggcgagtataaactttccattacgggagacggcgatttggaatacaattcgctaagtttcagcgttgcgggatcggataacgttcagcgcagtcttaaccgcaccgcagaacttgaaattacaatgaacaaaaacgatttcagaaacggcgaagaaatagaattgatgatcaaagcgccgtatgcgggatcggggcttatcactatcgagcgtgataaaatttacgcctacagttggttcaaaagcaacggaagaaacttcaatgcagaccatcactgttccgtctga

SEQ ID NO: 67734 - protein, 925 aa, Unknown
  Obtained from environmental sample
  DOMAIN (382)...(675): Alpha-2-macroglobulin family N-terminal region
  misc_feature (1)..(925): Xaa is any amino acid
MSIIDNEFYIDPEDSAIKRVLVTIRTNYPIDTSSLERNIAIEPIITADSGSLKKKSYLYSLTYNEDRTRAYIVSEPLGMPAKTIEMRLTIYSGVRDANNEGKAAGTMNAYVQIPGMNNFVRVDNVDCITVKNDKQLYDRAFVMETKGTVDINELTKNITVWILPKDLPALPGLRAQKNYDWDSLKEIVPEVLALSKKITLEPLHNALKYSSTNSWKYEAEAGQYIYFKLNEGTKFYGGYVLAEAYENIFRQGSFPKELSILSEGSILSYSGDKRLSIMSRGIRDVEFNIGRIRPDDINHLVSQTSGDVTNINFRNYSFNQYNITEQYTERTTVPVVNDRDIGYFSFDFSRYLDNIPSKNLRHGLFVFNVRAVDSSYSDRRLIIVTDLGFFVKTSADAGKDIFVQSIATGNPVAGAVVTVLGLNGNPIFSTSTDSGGRARIPDFGNTYKNERAPTVYTVVSGEDMSFMAYNTNGRNLDYSTFDIGGIYGASDPKTLRAFLFSDRGIYRPGDEARIGLVIKSGDWAGNLGGTPIEYRVTDPRGAEIYNRRIRLSAEGVEEIRFSTHDWSPTGTYTASVYVIQEYKQGDELRERHVFLGSQTVKVEEFLPDTLSVSAVFNPVPXDGWIAPGELKARVAVRNLFGTAASGNEVKAQINLAPGHQYFRQYRDYQFRDPYLGKNSFQEFLGTKTTNSEGAAEFNLNLAKFEKATYRLSFYTEAFEKGSGRNVSAEAAVYVSPLPYLVGYKADGNLNYISRNSVRALSLIAINPKTEKTSVNNLTLTITEMRYVSALVRQPNGVYKYQSIQKEYPVTTKQITIPAAGLEYRLPTNNPGEYKLSITGDGDLEYNSLSFSVAGSDNVQRSLNRTAELEITMNKNDFRNGEEIELMIKAPYAGSGLITIERDKIYAYSWFKSNGRNFNADHHCSV

SEQ ID NO: 67735 - DNA, 879 bp, Unknown
  Obtained from environmental sample
  misc_feature (1)..(879): n is a, c, g, or t
atgagccgccagagagtggtgctggataaaatgatcgagatgggctacaccaccagtgaagaagcggaagcgtctttcaacgagtattgggacaactacgactacaccagggcgtctgtggcggcttattataaccgcgtggacgccgctccctggttcagcgaatatgtgcgccgagaacttgatctaagaatgtacggctctatggattattaccgggacgggtacactgtctacactacgctgaacatgaagcaccaggaagcggcgaataaatacatggaagaagggataaaaagggcaaatgtggaatatgccagatcctcgggaacccggcttgttgacgcggaaagaacctggcttccgataatcgatcttctttccctctattttaaccttgatcagattcattccacttccgatgcccagaacgagcaaaaagccctgaaccgttacaccaagacaatcaaccccgtgctggacatggcggccctggcttttggaattccggaaataaggactttgaccggcgtggggttcgcgaatttaaagacttccaccgagcagaatgttgtggaaggcgccctgatttccatagaaaacgatacaggcttcattaccgccattgttggcggttccaagtatgatgagtcaaatcagcttatcagggcggtacaggggaacctccagccggggagttccttcaagcctctttactactcggcggccatagacagcaggaaattcacccccggcaccctcataaacgacctgcccattgtcttttacaacgaagacggaactccatatatgccgctgaatttcttgggaagtggaatggctcagtacttgtttttgacgccctggcgcagtcgatga

SEQ ID NO: 67736 - protein, 292 aa, Unknown
  Obtained from environmental sample
  misc_feature (1)..(292): Xaa is any amino acid
MSRQRVVLDKMIEMGYTTSEEAEASFNEYWDNYDYTRASVAAYYNRVDAAPWFSEYVRRELDLRMYGSMDYYRDGYTVYTTLNMKHQEAANKYMEEGIKRANVEYARSSGTRLVDAERTWLPIIDLLSLYFNLDQIHSTSDAQNEQKALNRYTKTINPVLDMAALAFGIPEIRTLTGVGFANLKTSTEQNVVEGALISIENDTGFITAIVGGSKYDESNQLIRAVQGNLQPGSSFKPLYYSAAIDSRKFTPGTLINDLPIVFYNEDGTPYMPLNFLGSGMAQYLFLTPWRSR

SEQ ID NO: 67737 - DNA, 630 bp, Unknown
  Obtained from environmental sample
  misc_feature (1)..(630): n is a, c, g, or t
atggggtctcgttccaattcggcaacttccacatggctggtgcgcctcctggcagcgtttacggtgattttggcagtttttattgggattggactcggcttatcccttgcggaaacaacaaacataaaaaaccaggaaaatttttttgaatttgcccccgccttacccacaaagatcctggatatagagggaaaccttataaccgaattttccgccgatgaaaagcgggctctggtttcattgaacgatttgcccaagcatcttatttacgcggtactggccagggaagattatgatttttacaaccacaaggggttcagcgtaaggggcatcgccagggcggtggtcggcaagctgctcggaaaagacctgggcggaggatcaacaataacccagcaaatagccggaacgctttatacggatcgcagggaatatagcttaacccgcaagataaaggaactctggtgggccttccagatggaacggcgttatacaaaaaacgaaatccttgaaatttaccttaaccagataatcatggggcccggtgtttacggggtggaagcggncagccagtatttcttcggacacagcgcaaaggaaatacccttgcggaatcggcgctcctggtga

SEQ ID NO: 67738 - protein, 209 aa, Unknown
  Obtained from environmental sample
  DOMAIN (57)...(209): Transglycosylase
  misc_feature (1)..(209): Xaa is any amino acid
MGSRSNSATSTWLVRLLAAFTVILAVFIGIGLGLSLAETTNIKNQENFFEFAPALPTKILDIEGNLITEFSADEKRALVSLNDLPKHLIYAVLAREDYDFYNHKGFSVRGIARAVVGKLLGKDLGGGSTITQQIAGTLYTDRREYSLTRKIKELWWAFQMERRYTKNEILEIYLNQIIMGPGVYGVEAXSQYFFGHSAKEIPLRNRRSW

SEQ ID NO: 67739 - DNA, 1272 bp, Unknown
  Obtained from environmental sample
  misc_feature (1)..(1272): n is a, c, g, or t
atgttacccaaattaaacttaggacgcctgaaggagggcgtccgaatggggttaaacatgaaagaaagaaaggcagtgacgagggaatacaaaccccgttatcaaaaggcatcaaaaaaagagaaaagggtcctgcttgacgaattcaccaggtgnacaggttaccacaggaaatccgctgtccgcctgttaagcgcaaagcccttaaagcaaatcatggcttgcatagacggcaagccggtaaaaatcaagccggagaaaaaacggccctccaacagaaaagggaaacgcatttataccgatgacgtcatcagcgccctccgccgagtctggacatttttctggttcaaatgcgggaagattctcgccccgcttatgagacagcagatggcgtatatagcccagtggccggctttcggtatcacaggggaaaccgcggaaatgctcaaaaggataagccctgcgtccatagaccgatacctcaaaaaagacaagcaagccttaaggctgaaagggaaaagtctcacaaaacctatagattcccttaaaagccgcatccctatccgtaccttctacacaagcgaggagcgcaagaagccggggttttggcaaatcgacacagttcaccattgcgggcaggccacatcaggccagtacctgcatactttgactgccaccgacatagcctcaggttggatagagctccgttcccttctcaataacgcccataagtggactttcgaggccttgtccaacatcaaaaacacggccattttgccagtccttgagtttcacagcgacaacggatcggaatttataaatgacgccactgaaatctggtgtaaaaacaacggcatcctttttaccagaagccgagaccacaagaaaaacgacaactgtttcgttgaacagaagaacggcgcggttgtccgcgagtatgtcggctatgacaggcttgagggattccaggaacaagccttcctcgccgctatctatcagccgttggttccattgcttaacttctttatgcctacccaaaagctcaaaagcaaaaccaggattggttccaaagagatcaaggtttacgacgatcctgaaagcccgttccaaaggcttttaaaatccaaagaagtgtcgcaggaaacaaaagattccctttcggctcaaatcgctctttacaatccggtagtgcttcagcataatgccaacaaagctatcgtccgccttaggcagcggctcgcccaatcgaaccgcataacagccaaggagtag

SEQ ID NO: 67740 - protein, 423 aa, Unknown
  Obtained from environmental sample
  DOMAIN (195)...(373): Integrase core domain
  misc_feature (1)..(423): Xaa is any amino acid
MLPKLNLGRLKEGVRMGLNMKERKAVTREYKPRYQKASKKEKRVLLDEFTRXTGYHRKSAVRLLSAKPLKQIMACIDGKPVKIKPEKKRPSNRKGKRIYTDDVISALRRVWTFFWFKCGKILAPLMRQQMAYIAQWPAFGITGETAEMLKRISPASIDRYLKKDKQALRLKGKSLTKPIDSLKSRIPIRTFYTSEERKKPGFWQIDTVHHCGQATSGQYLHTLTATDIASGWIELRSLLNNAHKWTFEALSNIKNTAILPVLEFHSDNGSEFINDATEIWCKNNGILFTRSRDHKKNDNCFVEQKNGAVVREYVGYDRLEGFQEQAFLAAIYQPLVPLLNFFMPTQKLKSKTRIGSKEIKVYDDPESPFQRLLKSKEVSQETKDSLSAQIALYNPVVLQHNANKAIVRLRQRLAQSNRITAKE

SEQ ID NO: 67741 - DNA, 1167 bp, Unknown
  Obtained from environmental sample
  misc_feature (1)..(1167): n is a, c, g, or t
atgttcggcctatttgtggaagggaaaagcgattttgaaagcatgggggaaaaacgggaaagcctgtttttcaaagaggcgcttgggctgccttgcgtgtacgcgaaagaaacggtaaggctttaccttgggaagatggcggaagacgccgacgggattatcgaacagttaagggaaagctccgcaaagataatacgccaagcgccgctgcacgggctttggatacagggtaaacactatcttcctgtggatatcgacacggcagcaatggacaactcgaagacaaagaaagaaggggtgagccggacgtaccgtggatttgacgggtttcatcctataatggcgtatgtagggaaagaagggtatatgctggactgtgaattgcggcctggcagccagcactgccagaatgggacagttgaatttatcgaagggttaatgggacggcttgggggcataaaaaaaggcgggcgtttattgttccgcctggacagcggcaacgattccttcgatacccttaaagcggtaacagggaaagggcgttattgcatcataaagcgtaacaaacgaagggaaaacgacgaaaaatggcttaaaagggcaaagcggcacgggaaacgggtagagtccaggaaaggaaaaaaagtctggataggaaccgtgcggatgcacccacagagaaaaggcgaagtccttgaggaggtcatatgcgtgttcgaggttatagaacggaagaccgacagccaggggaaccggtacttgtttccggaaatagaggtaaacagctggtggacgaaccttggctgcggggcagagaaagtgatagaactgtatcacggccatgccacaagcgagcagtttcacagcgaattgaaaagcgacatgggagttgagcggcttccgtccgggaagtttgcggtaaacaaaatagtgctggcagtggcgatgaatgcatataacgcgctgaagatgcttggccaaaaatccatagagaaggaaaacggcaagaaagtgaaacgcaagcggctgggaaaggtaatccgagatttgatatgcgttgcgggaaaattagtaaagcatggcagggaactgatattcaaaattaacgagaaagatcccatgctgccggcgtttctgcggctgaatgctttgttgggctgtccttag

SEQ ID NO: 67742 - protein, 388 aa, Unknown
  Obtained from environmental sample
  DOMAIN (82)...(321): Transposase DDE domain
  misc_feature (1)..(388): Xaa is any amino acid
MFGLFVEGKSDFESMGEKRESLFFKEALGLPCVYAKETVRLYLGKMAEDADGIIEQLRESSAKIIRQAPLHGLWIQGKHYLPVDIDTAAMDNSKTKKEGVSRTYRGFDGFHPIMAYVGKEGYMLDCELRPGSQHCQNGTVEFIEGLMGRLGGIKKGGRLLFRLDSGNDSFDTLKAVTGKGRYCIIKRNKRRENDEKWLKRAKRHGKRVESRKGKKVWIGTVRMHPQRKGEVLEEVICVFEVIERKTDSQGNRYLFPEIEVNSWWTNLGCGAEKVIELYHGHATSEQFHSELKSDMGVERLPSGKFAVNKIVLAVAMNAYNALKMLGQKSIEKENGKKVKRKRLGKVIRDLICVAGKLVKHGRELIFKINEKDPMLPAFLRLNALLGCP

SEQ ID NO: 67743 - DNA, 1173 bp, Unknown
  Obtained from environmental sample
  misc_feature (1)..(1173): n is a, c, g, or t
atgtattcggttaaaactcttaataaaatttcagctaggggtactagcttgtttggggaaaaatactcaataggcgattctatagagaatccagaggctattctagttaggagtgcgcaggttgataccgattcattctctggcgatttgctcgctgttgttcgcgctggcgcaggcgtgaataacataacaatagacaaagccagcgcaaaaggggtgtgcgttttcaatacccccggtgcaaatgcgaatgctgtttcggagcttgttttcacgactttgggtattgctttgaggaatatccataaatctttagcttggataggtagccttaggggcaaggaagataaagaaatcagcgaggcggttgaaaagaataaatctgcgtttgtgggtgccgagttggtgggaaaaactataggcgttgtaggtcttggcaagataggtgttttggttgcaaacggagccataggtcgcggcatgaaggtcatagcttacgagccttatcctagcattggcaatatgcttatgctcaacaacacggttaaggtagtgcagagccttgatgaggttatagccgtcgcagatgttttaaccgtgcacgttccgtttatatcggctacaaaggatttgttaaacgaaaccaacttggctcttttcaaaggttcttatttgttgaactttgcaaggaacggaattgtcagcgaagctggcgttaaagattttttgggaaaaaacaaaagtaatgtttacttaactgattttcctagcaaagcggatttggaaaacgaacagattatctccttccctcatctcggtgctagcacggaagaggcggaagagaactgcgctgttatggcggtggagcaacttaaagattatcttgaatttggcatagtccgcaattccgtgaatttcccaacggttgagagtcgcccttctgcaagcgttaaaaaccgtattgttgttataaacaacgatgttcctaatatgatagctttaatatcaaaagtttttggagatgctggcataaacataaacagctttaaaaacgaaagcaatggaaagataggctataatataatagacatagatactgcggttccacagagtttaatagatatgctcaaaaagactcagtatataattcgcgttagggttatagaattttga

SEQ ID NO: 67744 - protein, 390 aa, Unknown
  Obtained from environmental sample
  DOMAIN (4)...(305): D-isomer specific 2-hydroxyacid dehydrogenase, catalytic domain
  misc_feature (1)..(390): Xaa is any amino acid
MYSVKTLNKISARGTSLFGEKYSIGDSIENPEAILVRSAQVDTDSFSGDLLAVVRAGAGVNNITIDKASAKGVCVFNTPGANANAVSELVFTTLGIALRNIHKSLAWIGSLRGKEDKEISEAVEKNKSAFVGAELVGKTIGVVGLGKIGVLVANGAIGRGMKVIAYEPYPSIGNMLMLNNTVKVVQSLDEVIAVADVLTVHVPFISATKDLLNETNLALFKGSYLLNFARNGIVSEAGVKDFLGKNKSNVYLTDFPSKADLENEQIISFPHLGASTEEAEENCAVMAVEQLKDYLEFGIVRNSVNFPTVESRPSASVKNRIVVINNDVPNMIALISKVFGDAGININSFKNESNGKIGYNIIDIDTAVPQSLIDMLKKTQYIIRVRVIEF

SEQ ID NO: 67745 - DNA, 918 bp, Unknown
  Obtained from environmental sample
  misc_feature (1)..(918): n is a, c, g, or t
ttgagcggctggagcggcggcaggagcagcaactggagttgcagctggagcagcaggcgcggcagcagctggagctggggtggcggcaggagccggagtagcggctggaacagcacctttaggtgcagcggcagctggggtagcagctggaactggagtagcggctggaacagcgcctttaggtgcagcggcagctggggtagcagctggagccggagtagcggctggagctggagtagcggcaggtgcatgagttgcggcagcagcagccggagccggagcagcggcaggtgcatgagttgcggcagcagccggagccggagcagcagcaggtgcggcagcagcaggagcagcggccggagctggagtagcagctttaggcgcggcaacggcagcaggagcagcagcaggaactggagcagcggcaggcgcggcagcagccggagtagcggctttaggcgcggcagcggcaggagcagcagcaggaactggagcagcggcaggcgcggcagcagccggagcagcagcaggcgcggcagcagccggagtagcggctttaggcgcggcggcagcaggagcagcagccggtgccggagcagcagcaggtgcggcagcagccggagcagcagcaggcgcggcagcagccggagcagcagcaggcgcggcagcagccggagtagcggctttaggagcggcggcagcaggagcagcagccggtgccggagcagcagcaggtgcggtagcagccggagtagcggctttaggagcggcagcggcaggagcagcagccggtgccggagtagcagctggtgcttgggcaccagcgataccaaagatagcaaggattgcagttacaaaaaaaggtttgaaacacttgttcatgaaaaatctcctttgggatatatggcattaatatag

SEQ ID NO: 67746 - protein, 305 aa, Unknown
  Obtained from environmental sample
  misc_feature (1)..(305): Xaa is any amino acid
MSGWSGGRSSNWSCSWSSRRGSSWSWGGGRSRSSGWNSTFRCSGSWGSSWNWSSGWNSAFRCSGSWGSSWSRSSGWSWSSGRCMSCGSSSRSRSSGRCMSCGSSRSRSSSRCGSSRSSGRSWSSSFRRGNGSRSSSRNWSSGRRGSSRSSGFRRGSGRSSSRNWSSGRRGSSRSSSRRGSSRSSGFRRGGSRSSSRCRSSSRCGSSRSSSRRGSSRSSSRRGSSRSSGFRSGGSRSSSRCRSSSRCGSSRSSGFRSGSGRSSSRCRSSSWCLGTSDTKDSKDCSYKKRFETLVHEKSPLGYMALI

SEQ ID NO: 67747 - DNA, 1644 bp, Unknown
  Obtained from environmental sample
  misc_feature (1)..(1644): n is a, c, g, or t
atgaacaagtgtttcaaacctttttttgtaactgcaatccttgctatctttggtatcgctggtgcccaagcaccagctgctactccggcaccggctgctgctcctgccgctgccgctcctaaagccgctactccggctgctaccgcacctgctgctgctccggcaccggctgctgctcctgctgccgccgctcctaaagccgctactccggctgctgccgcgcctgctgctgctccggctgctgccgcgcctgctgctgctccggctgctgccgcacctgctgctgctccggcaccggctgctgctcctgctgccgccgcgcctaaagccgctactccggctgctgccgcgcctgctgctgctccggctgctgccgcgcctgccgctgctccagttcctgctgctgctcctgccgctgccgcgcctaaagccgctactccggctgctgccgcgcctgccgctgctccagttcctgctgctgctcctgctgccgttgccgcgcctaaagctgctactccagctccggccgctgctcctgctgctgccgcacctgctgctgctccggctccggctgctgccgcaactcatgcacctgccgctgctccggctccggctgctgctgccgcaactcatgcacctgccgctactccagctccagccgctactccggctccagctgctaccccagctgccgctgcacctaaaggcgctgttccagccgctactccagttccagctgctaccccagctgccgctgcacctaaaggtgctgttccagccgctactccggctcctgccgccaccccagctccagctgctgccgcgcctgctgctccagctgcaactccagttgctgctcctgccgccgctccagccgctcaaactcaggctgcagcaccaacagataccaatgttgtgaagcccaaaccagaaaagagaaagaaaaaaagaatcgagtttgccacagttgacttccccgccgattttgaaattcaggcaaaaaaagttatgcccgttacttctaaagattttccagatgacaatttggatgaatggtggggcagagcaaatctaaagattgaaacgcaatccgagtatttcaaaggtaaagtgcatctgcgtatgtaccccggtgaattcggtgataaagttttaagcgtaaagagagacgctgacgataatcttatagaaacttcgcaaactcgcgacagaattgagatttacgaagcatgggcatggcacagaggtgattacttcaatttcaaaataggccgttggagcaacaccacgcgttttggaagcgaaacctttggcggctacttagatgctaaaaaagatgttaatttttctagtgggaaaactttggatggcttaggcaaagaaaatatgcgtaggcaagcaggttttatgagcacttatgatccggaaaattcggttcagtttggcttccataactttgcggaaaatatatctttagacctatccttgataagcatggacaaacacctgaataaaggcgacttgcgcatcaatttacgttttgaagaccttgccagcgtaagcggcttgaatgctggtcttggctatcgttccaatttgttcgatgaaatttacagcaaatacggcgatgtaacccatacatag

SEQ ID NO: 67748 - protein, 547 aa, Unknown
  Obtained from environmental sample
  SIGNAL (1)...(26)
  misc_feature (1)..(547): Xaa is any amino acid
MNKCFKPFFVTAILAIFGIAGAQAPAATPAPAAAPAAAAPKAATPAATAPAAAPAPAAAPAAAAPKAATPAAAAPAAAPAAAAPAAAPAAAAPAAAPAPAAAPAAAAPKAATPAAAAPAAAPAAAAPAAAPVPAAAPAAAAPKAATPAAAAPAAAPVPAAAPAAVAAPKAATPAPAAAPAAAAPAAAPAPAAAATHAPAAAPAPAAAAATHAPAATPAPAATPAPAATPAAAAPKGAVPAATPVPAATPAAAAPKGAVPAATPAPAATPAPAAAAPAAPAATPVAAPAAAPAAQTQAAAPTDTNVVKPKPEKRKKKRIEFATVDFPADFEIQAKKVMPVTSKDFPDDNLDEWWGRANLKIETQSEYFKGKVHLRMYPGEFGDKVLSVKRDADDNLIETSQTRDRIEIYEAWAWHRGDYFNFKIGRWSNTTRFGSETFGGYLDAKKDVNFSSGKTLDGLGKENMRRQAGFMSTYDPENSVQFGFHNFAENISLDLSLISMDKHLNKGDLRINLRFEDLASVSGLNAGLGYRSNLFDEIYSKYGDVTHT

SEQ ID NO: 67749 - DNA, 879 bp, Unknown
  Obtained from environmental sample
  misc_feature (1)..(879): n is a, c, g, or t
ttgctatctttggtatcgctggtgcccaagcaccagctgctactccggcaccggctgctgctcctgccgctgccgctcctaaagccgctactccggctgctaccgcacctgctgctgctccggcaccggctgctgctcctgctgccgccgctcctaaagccgctactccggctgctgccgcgcctgctgctgctccggctgctgccgcgcctgctgctgctccggctgctgccgcacctgctgctgctccggcaccggctgctgctcctgctgccgccgcgcctaaagccgctactccggctgctgccgcgcctgctgctgctccggctgctgccgcgcctgccgctgctccagttcctgctgctgctcctgccgctgccgcgcctaaagccgctactccggctgctgccgcgcctgccgctgctccagttcctgctgctgctcctgctgccgttgccgcgcctaaagctgctactccagctccggccgctgctcctgctgctgccgcacctgctgctgctccggctccggctgctgccgcaactcatgcacctgccgctgctccggctccggctgctgctgccgcaactcatgcacctgccgctactccagctccagccgctactccggctccagctgctaccccagctgccgctgcacctaaaggcgctgttccagccgctactccagttccagctgctaccccagctgccgctgcacctaaaggtgctgttccagccgctactccggctcctgccgccaccccagctccagctgctgccgcgcctgctgctccagctgcaactccagttgctgctcctgccgccgctccagccgctcaaactcaggctgcagcaccaacagataccaatgttgtga

SEQ ID NO: 67750 - protein, 292 aa, Unknown
  Obtained from environmental sample
  misc_feature (1)..(292): Xaa is any amino acid
MLSLVSLVPKHQLLLRHRLLLLPLPLLKPLLRLLPHLLLLRHRLLLLLPPLLKPLLRLLPRLLLLRLLPRLLLLRLLPHLLLLRHRLLLLLPPRLKPLLRLLPRLLLLRLLPRLPLLQFLLLLLPLPRLKPLLRLLPRLPLLQFLLLLLLPLPRLKLLLQLRPLLLLLPHLLLLRLRLLPQLMHLPLLRLRLLLPQLMHLPLLQLQPLLRLQLLPQLPLHLKALFQPLLQFQLLPQLPLHLKVLFQPLLRLLPPPQLQLLPRLLLQLQLQLLLLPPLQPLKLRLQHQQIPML

SEQ ID NO: 67751 - DNA, 657 bp, Unknown
  Obtained from environmental sample
  misc_feature (1)..(657): n is a, c, g, or t
atgggagtcgcccgtaaaacccttgttgtctccgacaaggaaaggcgcatgaccgcgattcatgaggcaggccacgccttgctgcactacttcctgaaaaacgcggatcccctgcacaaagttaccatcgtgcctcacggacgggcgcttgggatggcaatgtcgcttcccgaagaagacagttacagccgcacaagggcctggatacttgaccgcatcgtaatctgctacggcggctggtcggctgaaaaactgttctatgatgaaaccaccacgggaacaaaacaggatcttgaacaggcgaccgagatggcgcggcgtatggtctgcgaatggggcatggcggaggagatggggccggttacctacggacaggaagaagaacccatctttttaggaaaagaaatcgcaaggcacaaggattactcagaagaaaccgcccagaaaattgacaggacgataaagcgcatacttgatgaaggacagcggcaggcgggagaaatcctaagcgcccacaaagaaaaactgcaaaaactctccgacgccctgcttgtaagggaaacacttgtagacgatgagatcagaacactcctgggttttccgcccagagaaaattctgcatcgctgattgacaagcctgcttcgccggagagttga

SEQ ID NO: 67752 - protein, 218 aa, Unknown
  Obtained from environmental sample
  DOMAIN (1)...(197): Peptidase family M41
  misc_feature (1)..(218): Xaa is any amino acid
MGVARKTLVVSDKERRMTAIHEAGHALLHYFLKNADPLHKVTIVPHGRALGMAMSLPEEDSYSRTRAWILDRIVICYGGWSAEKLFYDETTTGTKQDLEQATEMARRMVCEWGMAEEMGPVTYGQEEEPIFLGKEIARHKDYSEETAQKIDRTIKRILDEGQRQAGEILSAHKEKLQKLSDALLVRETLVDDEIRTLLGFPPRENSASLIDKPASPES

SEQ ID NO: 67753 - DNA, 933 bp, Unknown
  Obtained from environmental sample
  misc_feature (1)..(933): n is a, c, g, or t
atgctgcgggaaaaaggagtcagcgtatcgggagccacagggggaataagcccgttaagactgtttctggatatactcccctggataatcggttttggcttcatctggtttatgttcagaaacatgcagggctcgggaaacaaagcgtttcagtttggtaaaagccgtgccaaaaggtaccaggatgaggggaagaagatcacatttcaggatgtggccggtcagaaggacgccaaatatgaacttgaagaagtggtttcctttctgaaagatccgcagaaatttaccaagatgggagcgcgcatacccaaaggggtgttgcttgtgggcatgcccggcaccggtaagaccctgatggctaaagccgtagccggggaagccaaggtcgcttacttccacatgtcaggctcggattttgttgaaatgttcgtaggcgtcggtgccagccgcgtccgcgatctttttgatcaggggcgtcgcagcgctccctgcataattttcattgacgagctcgacgcggtcgggcgtacccgcggggcgggctacggcggcggtcatgacgaacgggaacagaccctgaatcagcttctggttgaaatggacggttttgattccaaggacggcgtgataatcctcgccgccaccaaccgccccgacgtgcttgatcccgccctgctcagacccggccgttttgatcgccaggttgtagtggctatgccggacatcaaggagcgggaagatatcctcaaaattcacgcggcaaaaatcccacttgacggcgaagttgacctgagcagaatcgcgagggcgacacccggcatgagcggcgcggatatagcgaacctcgtaaacgaggcggctctctttgccgcgcgtaaagataagaccaaggtagagatgactgacttgaggaagccagagacaaggttctga

SEQ ID NO: 67754 - protein, 310 aa, Unknown
  Obtained from environmental sample
  DOMAIN (105)...(239): ATPase family associated with various cellular activities (AAA)
  misc_feature (1)..(310): Xaa is any amino acid
MLREKGVSVSGATGGISPLRLFLDILPWIIGFGFIWFMFRNMQGSGNKAFQFGKSRAKRYQDEGKKITFQDVAGQKDAKYELEEVVSFLKDPQKFTKMGARIPKGVLLVGMPGTGKTLMAKAVAGEAKVAYFHMSGSDFVEMFVGVGASRVRDLFDQGRRSAPCIIFIDELDAVGRTRGAGYGGGHDEREQTLNQLLVEMDGFDSKDGVIILAATNRPDVLDPALLRPGRFDRQVVVAMPDIKEREDILKIHAAKIPLDGEVDLSRIARATPGMSGADIANLVNEAALFAARKDKTKVEMTDLRKPETRF

SEQ ID NO: 67755 - DNA, 354 bp, Unknown
  Obtained from environmental sample
  misc_feature (1)..(354): n is a, c, g, or t
gtgaattttgaggatatcttcccgctccttgatgtccggcatagccactacaacctggcgatcaaaacggccgggtctgagcagggcgggatcaagcacgtcggggcggttggtggcggcgaggattatcacgccgtccttggaatcaaaaccgtccatttcaaccagaagctgattcagggtctgttcccgttcgtcatgaccgccgccgtagcccgccccgcgggtacgcccgaccgcgtcgagctcgtcaatgaaaattatgcagggagcgctgcgacgcccctgatcaaaaagatcgcggacgcggctggcaccgacgcctacgaacatttcaacaaaatccgagcctga

SEQ ID NO: 67756 - protein, 117 aa, Unknown
  Obtained from environmental sample
  misc_feature (1)..(117): Xaa is any amino acid
MNFEDIFPLLDVRHSHYNLAIKTAGSEQGGIKHVGAVGGGEDYHAVLGIKTVHFNQKLIQGLFPFVMTAAVARPAGTPDRVELVNENYAGSAATPLIKKIADAAGTDAYEHFNKIRA

SEQ ID NO: 67757 - DNA, 879 bp, Unknown
  Obtained from environmental sample
  misc_feature (1)..(879): n is a, c, g, or t
atgacagattggccgagacgccctcacgacaaaatattttccgtagtagaccgcgcccagttggaacaaatccgcatggaattgaatttccagttatcgggcgaagtagacgacgaccacgcccttgaaatcgggaaattcctcggagcgcagacaatcgtatccggcgcgataagcgaactggccgaccgccaccgcatgagaatccgcgccctcaacgtgcaaactaccgaagtgcagggacagtacaaccgcaacataaacacaagcaaattgattgtcgccttaatgaaggggggaaaatcatctaacactgtttatggggcaaattctcaaaagtcagccgcaacgccaacggcaacatcaacagtgagtacaccggcgcaacccctttacaaaataggcgacacgggacccgccggaggcatggtcttttatgacaagggaaacaacagaaacggctggcgttatttggaagccgcccccgcaagcacggaacgggaaacttttatggctggcgattctccctattcgcttggaaattcaaatctggcgggagccggttttgaaaacacccaaaacatgatgaaaagcatagagaagacgggaggcggcatcggttccgcgccctattattgcgccaaccttgtcctgaacggatttaatgactggtatctgccttcgctcgacgaactcgctttaatgtatgccaatttacacgcatataaccagggcgattttaagcaaagggattattggcactcatcggaacacggcgttgtttggggaacatacagttttaccaggggcgaaaaaggacagcacagttacgcctatganaacgacaaacgcctaacccgcgcctgtcggcggttttaa

SEQ ID NO: 67758 - protein, 292 aa, Unknown
  Obtained from environmental sample
  misc_feature (1)..(292): Xaa is any amino acid
MTDWPRRPHDKIFSVVDRAQLEQIRMELNFQLSGEVDDDHALEIGKFLGAQTIVSGAISELADRHRMRIRALNVQTTEVQGQYNRNINTSKLIVALMKGGKSSNTVYGANSQKSAATPTATSTVSTPAQPLYKIGDTGPAGGMVFYDKGNNRNGWRYLEAAPASTERETFMAGDSPYSLGNSNLAGAGFENTQNMMKSIEKTGGGIGSAPYYCANLVLNGFNDWYLPSLDELALMYANLHAYNQGDFKQRDYWHSSEHGVVWGTYSFTRGEKGQHSYAYXNDKRLTRACRRF

SEQ ID NO: 67759 - DNA, 609 bp, Unknown
  Obtained from environmental sample
  misc_feature (1)..(609): n is a, c, g, or t
atgaaagatttggatgattttaacaaactggaagaaagagcgtgggcattaacaggacaactggaagaaagagcgcagaaatcgggacaagccattaacggcattgacgagcgaagcgaaaaaaaagcgtatgaaatgacagaggaatattacgcaaaccaggcaaacaacgaacaaataataaccaaagaaagaataaaattcactgacggcgatgtatacgaaggcgatgtagtaaacggcaaacctaacggcaaaggcaaatatacattaacggcatcaggcgatttatacgaaggcgatttcattgacggcaagcccaacggtaaagggaaatatacatggtcggaaggagccgtatacgaaggcgattgggcaaacggcaaacccaacggcaaaggaaaaatgaaactaattgacggaacagaatacgaaggcagttttgttgacggaattgaaaacggcaaaggaaaaataacttatgcggatggcaactcttacgaaggcgatttcgtcaaccgcaaatgccacggcataggaaaaatgacttatgcagacggcactgttgaagaaggaagatttgagaataacaaatttttgggagaataa

SEQ ID NO: 67760 - protein, 202 aa, Unknown
  Obtained from environmental sample
  DOMAIN (74)...(96): MORN repeat
  misc_feature (1)..(202): Xaa is any amino acid
MKDLDDFNKLEERAWALTGQLEERAQKSGQAINGIDERSEKKAYEMTEEYYANQANNEQIITKERIKFTDGDVYEGDVVNGKPNGKGKYTLTASGDLYEGDFIDGKPNGKGKYTWSEGAVYEGDWANGKPNGKGKMKLIDGTEYEGSFVDGIENGKGKITYADGNSYEGDFVNRKCHGIGKMTYADGTVEEGRFENNKFLGE

SEQ ID NO: 67761 - DNA, 1017 bp, Unknown
  Obtained from environmental sample
  misc_feature (1)..(1017): n is a, c, g, or t
atgcagacggcactgttgaagaaggaagatttgagaataacaaatttttgggagaataaaatggcaaaagcgcagtatttgaaagtttcgtatgactttattgacgatgaaaagggcgaattaatgctgataatcgaagcgcctcctaagggcagggcggacgataataacgcgaaactcgtctatgacagtggggcaagtgaagctctgctgtacagaaacagcgaacaaattatccaactgcccattgtgagtgacgaagctcacaaaatgctgttggacggacgcaaaatattgcttgttacggaaatgaacggcgaagatataaacgacgtttatgaagcgaagatcgaattttcgaaaatttccgcggcggataaaaaaatagaattcgaaaactcttacgacattttacagaacaaaaccggcgacattatgttcagcgttttggaacgggagggcgagccggacaatcccaaacttgtctatgacggcggcggccacgcgctgttgcaccgcaacggcggacatgtcgtcatccttgactacattaaccctgacattcgccaaccgctgacaaagacaaaggaagtgttgataggggaacatcccaaaaaagataaaaaaaattttgtccgcgaatatgtggcagccgtaaaagttgtaaagcgcctgcccgaagaatacgatttgcttatcaataaacatgaagaagaaacggaagaaggcaaaatcaattctcctgatattgatgaatacggagacgacaatacacccgaaaaatccggcgagcgcgtccgccttatgttaaagcaagatcccaaagaagcgaaacgagtcgcgcaattctacaccgacatggcagaagacggcaaccccgccgcccaatacgaactggcaaacttctatctggaaggcatcggcgttgaaaagagcaaggcgaaagcaaaagaatggcttgaaaaagccgccaaacagggacacgaggaggcaatcaaattactaagtacaatatag

SEQ ID NO: 67762 - protein, 338 aa, Unknown
  Obtained from environmental sample
  DOMAIN (293)...(328): Sel1 repeat
  misc_feature (1)..(338): Xaa is any amino acid
MQTALLKKEDLRITNFWENKMAKAQYLKVSYDFIDDEKGELMLIIEAPPKGRADDNNAKLVYDSGASEALLYRNSEQIIQLPIVSDEAHKMLLDGRKILLVTEMNGEDINDVYEAKIEFSKISAADKKIEFENSYDILQNKTGDIMFSVLEREGEPDNPKLVYDGGGHALLHRNGGHVVILDYINPDIRQPLTKTKEVLIGEHPKKDKKNFVREYVAAVKVVKRLPEEYDLLINKHEEETEEGKINSPDIDEYGDDNTPEKSGERVRLMLKQDPKEAKRVAQFYTDMAEDGNPAAQYELANFYLEGIGVEKSKAKAKEWLEKAAKQGHEEAIKLLSTI

SEQ ID NO: 67763 - DNA, 531 bp, Unknown
  Obtained from environmental sample
  misc_feature (1)..(531): n is a, c, g, or t
atgacggcgcggtttttgtacggcgaatattttaattttacaccgacattcaagatttttatggcaactaaccacaagcctgtgattaaaggcacggattacggcatttggcggcggataaagttaattccttttgccacacggataccggaagaaaagcaggacaaacaccttgaattgaaattacaggaggaggcaagcggtattttgaactggctgttggaagggacggcgcattggaaacgggaacaactgaaagcgcccaaggcggtattatttgctactgacgaataccgggatgaaatggacgttatcggcaacttcataaaggaaaaatatgtccagaaaaaagagatgtcaattacgattaagaagttatacaaggcttattctgattggtgcgaggaaaaccacgaacaccctgtcagtgaacgattttttactttgcggcttaaagagatggggtttgtgcagagtagaacttctacggaaaggttttgggtggggattgggattatagataacaaataa

SEQ ID NO: 67764 - protein, 176 aa, Unknown
  Obtained from environmental sample
  DOMAIN (1)...(157): Poxvirus D5 protein-like
  misc_feature (1)..(176): Xaa is any amino acid
MTARFLYGEYFNFTPTFKIFMATNHKPVIKGTDYGIWRRIKLIPFATRIPEEKQDKHLELKLQEEASGILNWLLEGTAHWKREQLKAPKAVLFATDEYRDEMDVIGNFIKEKYVQKKEMSITIKKLYKAYSDWCEENHEHPVSERFFTLRLKEMGFVQSRTSTERFWVGIGIIDNK

SEQ ID NO: 67765 - DNA, 834 bp, Unknown
  Obtained from environmental sample
  misc_feature (1)..(834): n is a, c, g, or t
atgatggaaagcaagattggtgatgagagtatttttctcagtattgacgaactgaaaaaggggaaggtacagctaacggacgcaacaaacgcaaggcggctttttgaagagcatggtaaggatattcggtatatagccgcatggaaaaaatggattgtttggaacggcaggttttgggatacagatgagggcggggcattggttcacgaaaaagggcttgaaatgataaggaatatttatgacgagcttcttaaaaccgatgacccaagggaacggatggagattgaaaaatacggaattataagcgaaagcacaaggcggcgggagtcgctgataaaggctgcacaatggattacggaactgaatgtaaagccggaagagcttgatattaacccgtggctgctgaatgtccggaacggaacggtagacgtggcaagcggagaattcaaaacgcaatgccagaaagaaatgattacgaaaatagcgaatgttgaatataaccccaacgccgattgtccgcaatggaaaaaatttgtccgtgaaataatggactacaaagccgaattgattgaatttttacagacggcgataggctgggcgattactggggacatatcagagcagataatgtttattttgtttggaacaggcgcaaacggaaagtctacgtttctaaatacaatcatgtacctgttgggcgattacgctacagctacgcctaccgaaacttttatgaaaaaaaatggcgaccaggcaactaatgacatagccagattgaggggntacacgatttgttacaactacagaagcggagcaaggccggcgcatctctga

SEQ ID NO: 67766 - protein, 277 aa, Unknown
  Obtained from environmental sample
  misc_feature (1)..(277): Xaa is any amino acid
MMESKIGDESIFLSIDELKKGKVQLTDATNARRLFEEHGKDIRYIAAWKKWIVWNGRFWDTDEGGALVHEKGLEMIRNIYDELLKTDDPRERMEIEKYGIISESTRRRESLIKAAQWITELNVKPEELDINPWLLNVRNGTVDVASGEFKTQCQKEMITKIANVEYNPNADCPQWKKFVREIMDYKAELIEFLQTAIGWAITGDISEQIMFILFGTGANGKSTFLNTIMYLLGDYATATPTETFMKKNGDQATNDIARLRGYTICYNYRSGARPAHL

SEQ ID NO: 67767 - DNA, 612 bp, Unknown
  Obtained from environmental sample
  misc_feature (1)..(612): n is a, c, g, or t
atggaaaataagactatgaaattcgatgtgattctggcgggagtcggcgggcagggggttctctctgttgccgccattatagcccaggccgcggtcaatgaagggcttaaggtgcgccagtccgaggttcacggcatggcgcagcggggtggggcggtcttggctcatttgcgtatttccgacacggctattgccggtgaccttgttccaaagggcagctcggatattatcatttcaatggagcctttggaaagcctccgctataccgattggcttgccccatcgggggccctggtcacagccgccgagccttttgtcaatatcaataattaccctgaaattgagagcgttatcgcctctatcaggaactacccctattgcaggattattgaggcggccgctctggcaaaagaggccggccttgcccgcgcggtgaataccgttatggtcggcgcggcctcaggcttcctgccgataaaggtgaaaacgctggaagacacaatcgccgctgtattcgcggcaaaagaggcggcggtgctgacggctaatacaaaagcgtttcagttgggcaggcaggcggcggaaaacgcgtctaaaggccggaatgtatga

SEQ ID NO: 67768 - protein, 203 aa, Unknown
  Obtained from environmental sample
  DOMAIN (16)...(192): Pyruvate ferredoxin/flavodoxin oxidoreductase
  misc_feature (1)..(203): Xaa is any amino acid
MENKTMKFDVILAGVGGQGVLSVAAIIAQAAVNEGLKVRQSEVHGMAQRGGAVLAHLRISDTAIAGDLVPKGSSDIIISMEPLESLRYTDWLAPSGALVTAAEPFVNINNYPEIESVIASIRNYPYCRIIEAAALAKEAGLARAVNTVMVGAASGFLPIKVKTLEDTIAAVFAAKEAAVLTANTKAFQLGRQAAENASKGRNV

SEQ ID NO: 67769 - DNA, 1278 bp, Unknown
  Obtained from environmental sample
  misc_feature (1)..(1278): n is a, c, g, or t
atgccgcgaggcgatcttgaagccctgcagctgcaaaaattaaaagatcagatcggttttgccctgcgtacttctttttacaaagaaaggcttggcaaggcggggatcaaaagcccggacgatataaaaacattaggcgatttgaggaagattccctttaccaccaaacatgatctccgtgacggttttccatacggctttttaagcataccaaaagaggaagtggtcagactccacgcttcaagcggcactacaggcattccaacaacaatttatttcaacagggatgatataaaacgctgggccggctatatggcccgttgcatttttggatcaggatgcacaaaatccgacgtgttccagaacatgataacatacggactgttcaccggtggcttgggcatgcaccagggcggcgaagaagttggtatgcttgtgatcccttcgggggcggggaacacggcgcggcagttccgcctgatgcaggactttgggacaacggtggtacacgccactcccagcttccttctccatgttgaaaccaaaatgaaagaagccggcgttaagagggaaagcctgtcccttaaaaaagcgtttgccggcgcggagccgtattccgaagacacgcggcggcgcatagaagccctgttaattatcgacgtgtataattcctacggtctttccgagatgaacggccccggcgtcgcttttgaatgtcagtgcaaggacggaatgcatatctgggaagacggctatatcgcggagatcgtcaatcccgatacacttgaacctgtcaaagacggtgaaaccggagagctggtgcttaccatactctgtcgtgaggcgacaccgcttctgcgctaccgtacccgcgaccttacctctttttacacggagccgtgcgcctgcggcagaacccaccgccgactgcgccgcattacagggcgcagcgacgatatgctgataattaacggcgtaaacgtcttccccagccagatcgaggaagtgatcatgggcatgaaggaagtgggaaacaactaccttattgtggttgaaaaagacggcgctctagatcggctgacggtaaaaaccgaagtcggcccggatattttcatggacgatgcccgccccctcaatgcccttaaggaaaagataagggaaacccttcaggtgtccatttcaatcagccccagggttgaactccacgagagcggcagcatggcggtttctgaaggcaaagcggtaagggtgcaggacaagcggcctaaagacgtgtaa

SEQ ID NO: 67770 - protein, 425 aa, Unknown
  Obtained from environmental sample
  DOMAIN (7)...(348): AMP-binding enzyme
  misc_feature (1)..(425): Xaa is any amino acid
MPRGDLEALQLQKLKDQIGFALRTSFYKERLGKAGIKSPDDIKTLGDLRKIPFTTKHDLRDGFPYGFLSIPKEEVVRLHASSGTTGIPTTIYFNRDDIKRWAGYMARCIFGSGCTKSDVFQNMITYGLFTGGLGMHQGGEEVGMLVIPSGAGNTARQFRLMQDFGTTVVHATPSFLLHVETKMKEAGVKRESLSLKKAFAGAEPYSEDTRRRIEALLIIDVYNSYGLSEMNGPGVAFECQCKDGMHIWEDGYIAEIVNPDTLEPVKDGETGELVLTILCREATPLLRYRTRDLTSFYTEPCACGRTHRRLRRITGRSDDMLIINGVNVFPSQIEEVIMGMKEVGNNYLIVVEKDGALDRLTVKTEVGPDIFMDDARPLNALKEKIRETLQVSISISPRVELHESGSMAVSEGKAVRVQDKRPKDV

SEQ ID NO: 67771 - DNA, 1140 bp, Unknown
  Obtained from environmental sample
  misc_feature (1)..(1140): n is a, c, g, or t
atgagcaatcagcaaaaggcagttattgttgaaagcgaagattttctgacaaagcaaattataacttatatcgggaataaacgatccctgttggattttattacaaaagggattcaaattgtacaaaaacgcttacaaaaagataaattggatatttttgatgtttttacaggttcaggtattgtcgcccggctctgcaaacaattttcccgctttcttattgttaatgatctggagaaatatgccgcagtaacaggtgaatgttatttgtcaaataaaaatgaaaatgatatgcctcttttagaagagatgtatcataaacttgtcacaagtatcacgaatacgactttagacgaaggcgttatcacaaaattatacgcccccaaagacgataataatattcagtgtgatgagagggttttttacacgcgcagaaacgcgatgtatattgacacaatgcgtaatcttatagaaacggtaccttcgcaataccaaaagtttttttttgcaccgttacttgccgaagcgtctgttcacgcgaatacctcaggcgtttttaagggatttcacaaaaacaaaaaaacaggaatagggcaattcggagggagtaatagcgacgctctccttcgcattaaaggcgatattgttctgccgtttccattattcagtaattttaattgtgaatataccgtatataacggtgactcaaacgtaattgttaaagaagcgccaaaggttgatcttgcgtatttggatcctccctacaatcaacacccctacggttcaaattactttatgctcaatttgatacttgaaaacaaatacccggaaagggtaagtaacgtatccggaataccggataactggaatcgttccgcgtataataaaaaacaatacgcgtataaggcgttgtctgatcttgtaaatgacataaaagcaaaatatatccttatatcgtttaattcggaagggtttattactcttgatgagatgaaagatatgttgcaaaaatcgggaaaggtacaggttctggaaacttcatataatacgtttcgcgggtgccgtaatttgtcgagtctcgctgaacagggcgcccgtgatattcatgtcaccgaatatctttatttattggagaaatga

SEQ ID NO: 67772 - protein, 379 aa, Unknown
  Obtained from environmental sample
  DOMAIN (23)...(334): D12 class N6 adenine-specific DNA methyltransferase
  misc_feature (1)..(379): Xaa is any amino acid
MSNQQKAVIVESEDFLTKQIITYIGNKRSLLDFITKGIQIVQKRLQKDKLDIFDVFTGSGIVARLCKQFSRFLIVNDLEKYAAVTGECYLSNKNENDMPLLEEMYHKLVTSITNTTLDEGVITKLYAPKDDNNIQCDERVFYTRRNAMYIDTMRNLIETVPSQYQKFFFAPLLAEASVHANTSGVFKGFHKNKKTGIGQFGGSNSDALLRIKGDIVLPFPLFSNFNCEYTVYNGDSNVIVKEAPKVDLAYLDPPYNQHPYGSNYFMLNLILENKYPERVSNVSGIPDNWNRSAYNKKQYAYKALSDLVNDIKAKYILISFNSEGFITLDEMKDMLQKSGKVQVLETSYNTFRGCRNLSSLAEQGARDIHVTEYLYLLEK

SEQ ID NO: 67773 - DNA, 798 bp, Unknown
  Obtained from environmental sample
  misc_feature (1)..(798): n is a, c, g, or t
atggacactgccgaaataaccgccaagttaaacgatctgcgtgacgcaatagcttcaggcggccttatcgccaaccttgccggttcagccgatgcccttaaatccaacggaggcttgatcgcccagcggttcaaaaagttcggccctcccaagaaacgggcggcagttaaaacggcggctgtcaccgtttccggccccgaagtgtttgcctcgccgtcactgcaagtcggctttgccgccatggctctgcaagccgcgaaatttgacactcttgaacaggttgccgaaacagtgcttgcccaccagctttccacaggcgcattgtgggaaaacatccgcatgaagggcggcgcttacggcgcctccgccgccagcaccggtcttgaacgctgtttttctctgtctacttaccgcgatcccaatccgctgcgttcactggaaacattctcatcaatacttaaagacagcgccgccaacactgtagatttttcaaaaggctatgatttggagaagatgattatcggctgctatgcgaacctaacccgccccctaacgccttcagaaaaatccgccaaagattttttccacttcctttcccgcattgacaatgactaccgcaagcgaaacctgaaacggctcatcagcattggcgaaaacgatatttccggcgctctggccgggattgcgtcacagcttgcctcgcagcccgtcccaaaccgtgttgttattgccggaacgaacagcgcggaacaggcggctaaagcgcttggcgtggaagttcaattactacctgtgtag

SEQ ID NO: 67774 - protein, 265 aa, Unknown
  Obtained from environmental sample
  misc_feature (1)..(265): Xaa is any amino acid
MDTAEITAKLNDLRDAIASGGLIANLAGSADALKSNGGLIAQRFKKFGPPKKRAAVKTAAVTVSGPEVFASPSLQVGFAAMALQAAKFDTLEQVAETVLAHQLSTGALWENIRMKGGAYGASAASTGLERCFSLSTYRDPNPLRSLETFSSILKDSAANTVDFSKGYDLEKMIIGCYANLTRPLTPSEKSAKDFFHFLSRIDNDYRKRNLKRLISIGENDISGALAGIASQLASQPVPNRVVIAGTNSAEQAAKALGVEVQLLPV

SEQ ID NO: 67775 - DNA, 339 bp, Unknown
  Obtained from environmental sample
  misc_feature (1)..(339): n is a, c, g, or t
gtggattttcacgctcaggcaagcgcggaaaaaaagacttttttttacgccgccgacggtctttgttccgccgtgataggttcgcacatcagagttcaaaccgcggatgaaactatcatgcccaaaggaacagcgtgtataagcgacgccggcagaacaggaagccttcaatctgtcgggggctgtgaaataacttcgcgcataaacgaataccttacaggcatccctcactggacaaaagaagcgtgggacgcgccgcaattacagggtgtgtatctggatatcgacaaagacggtaaagcgctctccattgagagagttcgtattgatactgaataa

SEQ ID NO: 67776 - protein, 112 aa, Unknown
  Obtained from environmental sample
  misc_feature (1)..(112): Xaa is any amino acid
MDFHAQASAEKKTFFYAADGLCSAVIGSHIRVQTADETIMPKGTACISDAGRTGSLQSVGGCEITSRINEYLTGIPHWTKEAWDAPQLQGVYLDIDKDGKALSIERVRIDTE

SEQ ID NO: 67777 - DNA, 663 bp, Unknown
  Obtained from environmental sample
  misc_feature (1)..(663): n is a, c, g, or t
atgacaaacgaagaaattttaaagcgtattgatcatacgctcttaaagatgaccgcctcatgggatgagattaaagctctctgcgatgaggcggttaaattcaaaaccgcgtccgtttgtgtgccgccttcttatgtaaaacccattcataacgaatttaaggatttaaacatctgcacggtcatcggctttccgttaggctattcaataacagccgcaaaagttctggaagcggaacgcgctgttttaagcggcgcgaatgaaatcgacatggtgattaacgtaggcgatgtaaaaaacggcagctttgattttgtgcttgaagaaatcaagcttattaaaaaagcgtgcggcgaaaaaatattaaaagtgataatagagacctgctacttaaccgaggatgaaaaaatccgtctttgcaaaattgttacggatgccggagccgattttatcaagacttccaccggttttggaacagcgggcgcgacgcttgccgacgtacagctttttaaaaagcacatcggcgcgggagtgaaaataaaagccgcgggcggcgtaaaaacacgcgaagatttggaaacatttattaacgcgggagccgagaggattgggacaagctccgcggttaaactattggctggcggcgcggcgtcaggctattaa

SEQ ID NO: 67778 - protein, 220 aa, Unknown
  Obtained from environmental sample
  DOMAIN (5)...(214): DeoC/LacD family aldolase
  misc_feature (1)..(220): Xaa is any amino acid
MTNEEILKRIDHTLLKMTASWDEIKALCDEAVKFKTASVCVPPSYVKPIHNEFKDLNICTVIGFPLGYSITAAKVLEAERAVLSGANEIDMVINVGDVKNGSFDFVLEEIKLIKKACGEKILKVIIETCYLTEDEKIRLCKIVTDAGADFIKTSTGFGTAGATLADVQLFKKHIGAGVKIKAAGGVKTREDLETFINAGAERIGTSSAVKLLAGGAASGY

SEQ ID NO: 67779 - DNA, 1074 bp, Unknown
  Obtained from environmental sample
  misc_feature (1)..(1074): n is a, c, g, or t
gtgcagattgcgcccgctgttcgcgtagcgttagcggaagaattcggtcttgaaccggggacagtgtttacaaagaaaatatacgccgccctgcgccgtttgggatttaaaacggtttttgacacaaacttttcagccgaccttaccataatggaagaaggctccgagcttgtaaaacgcttaaccgaaaaaggcactatcccgttgataacttcatgctgcccggcgtgggtagattacatggaaaagtattacaacgatatgattcccaacttttcaacggcaaagtcaccccagcagatgatgggtgcgatgattaaagcttactgggctgaaaaagccggagtaaatcccgacaagatatattcagtgtctgtcatgccgtgtaccgctaagaaatgggaaacaaaacgcaatgacgatatgaagagcgcggggcatggttacgatgttgatattgtaattaccacaagggaactttcccgaatgatcaaacaggcgggaattgacattcttaaacttgccgatgaagagccggacagtccgcttggaccgtacaccggagccgcgacaattttcggtgcgacgggcggtgtaatggaagccgcagtccgcagcgcatactaccttgttacaaagaaagaactccccgatgtagaatttaaacccgcccgcggtcttgacggcgtaaaggaaggggaagtcgattttggcaacggaacaaagatacgcattgcggtagctcatcagatgggtaatattgccgcggttctggataagattcgcgaagcgaaaaaagccggtaaagagacgccgtatcactttgtagaagtaatggcatgccgcggcggatgtgtcgcgggcggcggacagccctacggttgtaaggacgatattcgcgaaaggcgcgcaagcggtctttatacggacgatcaaaaatcgcagtaccgctgttcgcatcagaatccttttatcgatcaggtttacaaggaattccttggagagccgggcggtcacaaggcgcataaacttctacacacaaaatatgtggaacgtcctttatatgtgaagtaa

SEQ ID NO: 67780 - protein, 357 aa, Unknown
  Obtained from environmental sample
  DOMAIN (294)...(353): Iron hydrogenase small subunit
  misc_feature (1)..(357): Xaa is any amino acid
MQIAPAVRVALAEEFGLEPGTVFTKKIYAALRRLGFKTVFDTNFSADLTIMEEGSELVKRLTEKGTIPLITSCCPAWVDYMEKYYNDMIPNFSTAKSPQQMMGAMIKAYWAEKAGVNPDKIYSVSVMPCTAKKWETKRNDDMKSAGHGYDVDIVITTRELSRMIKQAGIDILKLADEEPDSPLGPYTGAATIFGATGGVMEAAVRSAYYLVTKKELPDVEFKPARGLDGVKEGEVDFGNGTKIRIAVAHQMGNIAAVLDKIREAKKAGKETPYHFVEVMACRGGCVAGGGQPYGCKDDIRERRASGLYTDDQKSQYRCSHQNPFIDQVYKEFLGEPGGHKAHKLLHTKYVERPLYVK

SEQ ID NO: 67781 - DNA, 2502 bp, Unknown
  Obtained from environmental sample
  misc_feature (1)..(2502): n is a, c, g, or t
atgccgtggaacgataccgcgcagattgacttcttaaaccccgaagcgcgcgaagcggtaatacgcacaattatcggcgtgtgtcagcaattttctatcgtgcgctttgacgccgcaatgacgctcgcaaaacggcacattcagaggctgtggttcccgccccccggaagcggcggagcaatcgcaagccgcgcggaacattctatcaccaccgaagaatttaaccgccgtataccgaatgaattctggcgcgaagtagttgatcgctgcgcggctgaagcgccgaacacattgcttcttgccgaagctttttggatgatggaaggctattttgtccgcacacttggaatgcaccgcgtctacaactcggcttttatgaatatgctaaaaaacgaggaaaacgcaaagtaccgcgcgaccgtaaaaaacacaatggaattcgatcctgaaattttaaaacgctttgtcaattttatgaacaaccccgatgaagaaacggcggttgcgcaattcggcaagggcgataaatatttcggtatttgtacgttgcttgtaacaatgcccggcttgcccatgttcggacacggacaaattgaaggctttgaagaaaagtacggaatggaataccgccgttcctatcgtgatgaaattcccgacggctacatggtagaccgccacgagcgcgaaattttcccgttgatgaaacgccgctccgtgttttccggcagcgccaactttaggatttacgatctttactgcaacggctccgtaaacgaaaatgttttcgcctactcaaaccgcgcgtggataaacggacgcgaggaaaaagcgttgattttctacaacaattcctactatgaaacttccggctggataaaagtaagcgatcccgccattccctgcgaaggcggaacgcgaagggacaatttaagcgaagcccttgcaatccacggcgaaagccaatacttcacccttctgcgcgaacaaaaatcaaacctgtggttcgtccgttcttccaagtcaatttgcgaaaacggattttttgtcggattgaaaggatacgaaactcaagttttcctagatgtttatgaagttgaagatgacgcaaaaggcagatgggcaagactgaacaacgacttgaacggaagcggagtcatcgatcctttcggcgcgataaaagatattttccttggagagctttattatcgcttcctggaaatcttaaaaccggaaataattatcgatatgaatgagtctctggataaaaaagactacgcggactcgtttaaggaatctgttgaaacttttattaataccgcggcgcattttatcgccggagcaaacggctcttacgatgaatggacagcgaaagataaaacaggcggcaagattaaatttacagcggttaaaaccgccgcgatagaagaagaatttaaagccttcataaacagattgaaaaaactcaaagacgcgttgtcggcatcggctcctaagtcggcaagcgacaaagctaaatcgcccatctttacccgtatcacggaatgtgattcaaaaggacagcttctttattctaccgcgctcagttacggactgctttcgttactgcgcctgataataggcaaagaagcggatggaagccacgcggcaagcctcgcttttgatcactgggatctgggtcgcaaaatgagggatatctaccgcagattcggcgcgtcagacgcgcaggcatggcggataaccgacattgcgagagcggtattgagccgcaccggattaaatggctcgtcaatcaaagccgcgcctatccgcaaagaagcgctaaaatttgaagccgccgattttgccgccttggttattgaagaaaattatcgaagcgaagactttaggcgcatactgggaataaacatttttaacgatgtcgcatggtttaacaaagagggatttgaagacgccctattctactcgtccgtcttcttcatggtagaaagcgacaccattgtaaaaagtccgattgacgaacgaatcgaccgcattgccaaagtctacgaagtgcttatcaaagccgaagaaaaatcggagtatcgttttgacaacctgattgacatattaacagcaaaaccctcgaaagccaaaaagcttacagaagttgccggaaaagcaaaggcaaaaacagttgtgaaaaaacctgcgccgaaagcgaaagcaaagacagcggtgaagaaagctgagccgaaagcgaaagcaaaacctgcggcgaagaaggctgcaccgaaaccgaaggcaaaaactgccgtgaagaaagttgcgccaaaggcgaaggcgaaacccgcggcgaagaaagttgcgccaaaggcaaaggcgaaaactgcggcaaagaaagctgcgccaaaggtgaaaacgaagactgccgtgaagaaagctgcgtcaaaggcgaaggcaaaagctgccgctaaaaaaacagtggcaaaaccaaaggcgaaaatagggaagaagaaaaaatag

SEQ ID NO: 67782 - protein, 833 aa, Unknown
  Obtained from environmental sample
  misc_feature (1)..(833): Xaa is any amino acid
MPWNDTAQIDFLNPEAREAVIRTIIGVCQQFSIVRFDAAMTLAKRHIQRLWFPPPGSGGAIASRAEHSITTEEFNRRIPNEFWREVVDRCAAEAPNTLLLAEAFWMMEGYFVRTLGMHRVYNSAFMNMLKNEENAKYRATVKNTMEFDPEILKRFVNFMNNPDEETAVAQFGKGDKYFGICTLLVTMPGLPMFGHGQIEGFEEKYGMEYRRSYRDEIPDGYMVDRHEREIFPLMKRRSVFSGSANFRIYDLYCNGSVNENVFAYSNRAWINGREEKALIFYNNSYYETSGWIKVSDPAIPCEGGTRRDNLSEALAIHGESQYFTLLREQKSNLWFVRSSKSICENGFFVGLKGYETQVFLDVYEVEDDAKGRWARLNNDLNGSGVIDPFGAIKDIFLGELYYRFLEILKPEIIIDMNESLDKKDYADSFKESVETFINTAAHFIAGANGSYDEWTAKDKTGGKIKFTAVKTAAIEEEFKAFINRLKKLKDALSASAPKSASDKAKSPIFTRITECDSKGQLLYSTALSYGLLSLLRLIIGKEADGSHAASLAFDHWDLGRKMRDIYRRFGASDAQAWRITDIARAVLSRTGLNGSSIKAAPIRKEALKFEAADFAALVIEENYRSEDFRRILGINIFNDVAWFNKEGFEDALFYSSVFFMVESDTIVKSPIDERIDRIAKVYEVLIKAEEKSEYRFDNLIDILTAKPSKAKKLTEVAGKAKAKTVVKKPAPKAKAKTAVKKAEPKAKAKPAAKKAAPKPKAKTAVKKVAPKAKAKPAAKKVAPKAKAKTAAKKAAPKVKTKTAVKKAASKAKAKAAAKKTVAKPKAKIGKKKK

SEQ ID NO: 67783 - DNA, 354 bp, Unknown
  Obtained from environmental sample
  misc_feature (1)..(354): n is a, c, g, or t
atgtttagcataggaaatcgacgttttgtcggaagtaaacagaaacttgctgactggataattgaagctattaataccaattgcaaagggagtagtttttttgaagtgtttgcaggaacatctgtcgtttcatacatgctagctgctcaaatgaaacgtcttgttataaatgatacgttgcaagcaaataatgttatttatgaagcattttatggtaagggtagaaaatcacaaaaaaaattgaatgattataaaaaacgatttaattgtattagtagaagtaaaattaaaaaaggctgggttacaaaaaatatggcgggtaaatattttggaaaaaaagactgttctgtatag

SEQ ID NO: 67784 - protein, 117 aa, Unknown
  Obtained from environmental sample
  misc_feature (1)..(117): Xaa is any amino acid
MFSIGNRRFVGSKQKLADWIIEAINTNCKGSSFFEVFAGTSVVSYMLAAQMKRLVINDTLQANNVIYEAFYGKGRKSQKKLNDYKKRFNCISRSKIKKGWVTKNMAGKYFGKKDCSV

SEQ ID NO: 67785 - DNA, 1035 bp, Unknown
  Obtained from environmental sample
  misc_feature (1)..(1035): n is a, c, g, or t
atgacagactcctttaaaatctgtacaataaacattatgaactcagcgttagaaacattaaaaacaaggggctttgtacagcaatgtaccgatattgaaggcttgtcaaaactaatggactccggtcccgtcactttttacgagggaaccgaccctaccgggggaagtctgcatatcggtcacatggttccctattttgcgttccgccatcttcgcgacgcggggcataaggggatcgcccttctcggcggaggtacggcaagaatcggagacccttcgggaaaaagcgaaatcagaaaaatgctcgattatgaccagttggataaaaacaccgaatctatccgcgtccagcttgatcgttttgtcggttttgacggcaaaaccgcttttacggcaaacaataaagactggcttgccaatttaaactatatcgactttttgcgcgacatcggaaaacatttttccgttaaccgtatgcttagttttgaagcatacaaaatgagaatggaaacggggctttcttttattgaatttaattatcagcttttacagagttatgactttttggaattgtaccgccgccatgaatgccgtttacaaatcggcggcgatgaccaatgggggaatattgtcgcgggcgtggagcttgtgcgccgaatagaaggcgttgaagtctttgggctgacattcccgcttgttaccacggctgacggaaagaaaatgggcaagacggaaaaaggcgcgctcttcctggaccccgccattaccaccccttatgactttttccagtattggcgcaatgtgcatgatcaggatattcttcgctttttacttatgtttacatttctgcctgttgatgaatgtaaagccatgtgcgaatcgggaaaaaatccaaacgacgcaaaggaacgtcttgcgtgggaaataacagctattattcacgggaaagacgaagccgataaagctctggcgggcgctaaggcggcttttggcagtttggcgggcggcgataaaacnggcaatgcctcattgtga

SEQ ID NO: 67786 - protein, 344 aa, Unknown
  Obtained from environmental sample
  DOMAIN (39)...(331): tRNA synthetases class I (W and Y)
  misc_feature (1)..(344): Xaa is any amino acid
MTDSFKICTINIMNSALETLKTRGFVQQCTDIEGLSKLMDSGPVTFYEGTDPTGGSLHIGHMVPYFAFRHLRDAGHKGIALLGGGTARIGDPSGKSEIRKMLDYDQLDKNTESIRVQLDRFVGFDGKTAFTANNKDWLANLNYIDFLRDIGKHFSVNRMLSFEAYKMRMETGLSFIEFNYQLLQSYDFLELYRRHECRLQIGGDDQWGNIVAGVELVRRIEGVEVFGLTFPLVTTADGKKMGKTEKGALFLDPAITTPYDFFQYWRNVHDQDILRFLLMFTFLPVDECKAMCESGKNPNDAKERLAWEITAIIHGKDEADKALAGAKAAFGSLAGGDKTGNASL

SEQ ID NO: 67787 - DNA, 1563 bp, Unknown
  Obtained from environmental sample
  misc_feature (1)..(1563): n is a, c, g, or t
atgattgaaaaaacgaaccaagaaattgacgaaccgcaaggcggggaagaccctttaaccgaagcggttaaaaatctgttcgggctgtcatacctgttcccgtatcaaagacttgtaatgacaaatattctggaagccgcgcaggcggcggggattccggtaaaatggacgggggaaagcgaaaccctgcccgaagcggagccgacggaatccgctacgctttccgaccgcgaaacttccggcaggcagatagttattctgccgacgggcgcgggaaaatccctatgcttccaattgcctgcaatgttgatagaagggcttacattagtcatctatcctattttgtcgctgatggcggatcagcagaggcggttaagcgagcgcggtttttctccggtaacaatcaggggcggtcaaagcaaggaagagcgcgatgagatttggcaaaaacttgagagcggacagagccgatttataatagcaaaccctgaagtgttgcttacagcgcaggtaaaagaaaaactggaaaaaataaaagttgttcacgttgtaattgacgaggcgcattgtgtgagcgaatggggagagagctttcgtccaagttacctggaaatcggctccatcataaattctcttaatccgccgcttgttaccgcttttaccgccacagcaagcacgcccgtacttgaaaaaataaaaagatatattttcggcgacggcgacgttaatcaaatcgcgggcaacccggatagacctaatatttattacaccgcaaaaggatgcattaatcgcaatttggcggtacgcgatctgcttattatcaataaacgtcccgccatcgtattctgctcctcgcgcccgggaaccgaaaaactcgcgcactaccttcgcggagaaattaaagaaatgggatatgactggtacaatgaaattcgtttttaccatgccggattaagcagggaagaaaaagccgaaacggaaaaatggctgttaaaaaattcgcaagctgtgttatgttcaacctgcgcttttggcatgggcgttgataaatccgatgtacgcactgtgatacacagggactgcgccccgtccgttgaagcgtacttacaggaatcaggcagagccggacgagacggggaacaatctaaagctattcttttgtggggaccggaagacgagattgcgcttgcaagggcgaaaactccggcggatcgtaaaagacttttagcgttattcagttacgcaaaggatactaaacactgccgcagacactcgctgctcgccatgcttaactacgattccggcggagaagttccggaaaagttatgctgtgatgtttgcgagaaagaagccgcagacggattgcgggaagagttatcaatgttaaattttttccgtaagaacaaaaggcgttttacacagagcgaagccgccggagttttggcgcagagcgaaacaatacgctgggcaaaagaagaagcctcccaagtcatcggctatttactaaaagccggaaacttaaggaggcttcgcttcccatggaaaaacaaacttactctttga

SEQ ID NO: 67788 - protein, 520 aa, Unknown
  Obtained from environmental sample
  DOMAIN (29)...(226): Type III restriction enzyme, res subunit
  misc_feature (1)..(520): Xaa is any amino acid
MIEKTNQEIDEPQGGEDPLTEAVKNLFGLSYLFPYQRLVMTNILEAAQAAGIPVKWTGESETLPEAEPTESATLSDRETSGRQIVILPTGAGKSLCFQLPAMLIEGLTLVIYPILSLMADQQRRLSERGFSPVTIRGGQSKEERDEIWQKLESGQSRFIIANPEVLLTAQVKEKLEKIKVVHVVIDEAHCVSEWGESFRPSYLEIGSIINSLNPPLVTAFTATASTPVLEKIKRYIFGDGDVNQIAGNPDRPNIYYTAKGCINRNLAVRDLLIINKRPAIVFCSSRPGTEKLAHYLRGEIKEMGYDWYNEIRFYHAGLSREEKAETEKWLLKNSQAVLCSTCAFGMGVDKSDVRTVIHRDCAPSVEAYLQESGRAGRDGEQSKAILLWGPEDEIALARAKTPADRKRLLALFSYAKDTKHCRRHSLLAMLNYDSGGEVPEKLCCDVCEKEAADGLREELSMLNFFRKNKRRFTQSEAAGVLAQSETIRWAKEEASQVIGYLLKAGNLRRLRFPWKNKLTL

SEQ ID NO: 67789 - DNA, 390 bp, Unknown
  Obtained from environmental sample
  misc_feature (1)..(390): n is a, c, g, or t
ttgatcgcgagaggttttgttcctagacagtatatgatgtctgttctcagcacagaacttattgacgcggcgagaattgacggcgcgggcgagtacaggatattcaatattattattcttcctattatgattcccgctctagccgctcagtcaatctttacctttgtaggttcgtggaataactttattacgccgtttatattgattaacagcgataagaaatttaccttgccgatgcttgtacaaagtttgcgcggtaatatttatcgcgcggaatacggcgcaatctatcttggaatagccgtttctcttataccgattttaatattctattcatttatgtcgcgctttataatttccggtattactatgggcggtatcaaagagtaa

SEQ ID NO: 67790 - protein, 129 aa, Unknown
  Obtained from environmental sample
  misc_feature (1)..(129): Xaa is any amino acid
MIARGFVPRQYMMSVLSTELIDAARIDGAGEYRIFNIIILPIMIPALAAQSIFTFVGSWNNFITPFILINSDKKFTLPMLVQSLRGNIYRAEYGAIYLGIAVSLIPILIFYSFMSRFIISGITMGGIKE

SEQ ID NO: 67791 - DNA, 1518 bp, Unknown
  Obtained from environmental sample
  misc_feature (1)..(1518): n is a, c, g, or t
atgagtgagatagttatagtgttggatttcggcgggcagtataaagagcttattgccagctcggtcaggagcttgtccgtatactcggaaatcatactgggcagtacaacggctgccgaaatcaagaagctaaacccgattggcataatcctgacaggcggaccgaaaagcgtttactcaaacgattcgcccaagtgcgatccgaagattttctcgttgggtatacctgtcctcggtatctgctacggtctgcacctgatttgccatacgctcggcggcaaagtcgcgcccggcgattccggtgaatatgggcgtgtaaccgtaacgcctggcggaagcccgtcaaaattattcggtaaggagccttttaccgcccttatgagccacagggacgccgcagagcgtctacctgaaggttttcatgtaacggcaaaaaccgccgcctgcattgccgcctttgaaaacagcgcgaaaaagatctacgccgtgcagttccaccctgaaaccaagcacaccgagggcgggcgcgaaattctccgcaaatttttatacgatgtctgccatgccgcangtgattataaacttgacgattacatagaaacgcaaatagcccaaatacgaaaaaaagttggcgataaaaaggcgctgctcgctttgtccggcggggtcgactcgtccgtttgcgcgagccttttgtccctggcaataccggggcagctgacctgcatctttgtcgatcacggcttcatgcgcttgaacgagggcgacgaaatagagcgcgctttttccaaacggaatctccgcttcatccgcgtcaacgcgcaaaaacgtttcctttacaaagtgaaaggtgtgacggaacctgagaaaaaacgcaagatcataggcgaagaatttatccgcgtgtttgaggaggaatccacaaagttaggcgaaattccttttctggcgcaggggactatatacccggatgtcgttgagtcaggcggcaaatacggcgcggttatcaaaagccatcacaacgtaggcgggcttccggaagggcttaagttcacaggaatcctggaaccgctgtccgggctttttaaagatgaggtacgcgtgcttggcagaaagctgaagctttcagcctcgcttgtaaaccgtcagccgtttcccggccccgggctcgccatccgagtcatgggtgaagttactgaagaaaagctggaaactttacgtaaggctgatgcgattctccgcgaagagcttgacaacctcaaaaacagacccgatcagtatttttgcgcccttacaagcacacgctccgttggcgttaaaggggatgacagaacatacgattgcgtaattgccgtcagagccgtaaagaccgacgactttatgacctgcgaatacgcccctctgccgcacaagcttttaagccgcatatcatcaagaataacggcggaaataccgtccgcgagccgcgtcgtttacgatattacatcaaagccccccgctacggtagaatgggagtaa

SEQ ID NO: 67792 - protein, 505 aa, Unknown
  Obtained from environmental sample
  DOMAIN (18)...(168): Peptidase C26
  misc_feature (1)..(505): Xaa is any amino acid
MSEIVIVLDFGGQYKELIASSVRSLSVYSEIILGSTTAAEIKKLNPIGIILTGGPKSVYSNDSPKCDPKIFSLGIPVLGICYGLHLICHTLGGKVAPGDSGEYGRVTVTPGGSPSKLFGKEPFTALMSHRDAAERLPEGFHVTAKTAACIAAFENSAKKIYAVQFHPETKHTEGGREILRKFLYDVCHAAXDYKLDDYIETQIAQIRKKVGDKKALLALSGGVDSSVCASLLSLAIPGQLTCIFVDHGFMRLNEGDEIERAFSKRNLRFIRVNAQKRFLYKVKGVTEPEKKRKIIGEEFIRVFEEESTKLGEIPFLAQGTIYPDVVESGGKYGAVIKSHHNVGGLPEGLKFTGILEPLSGLFKDEVRVLGRKLKLSASLVNRQPFPGPGLAIRVMGEVTEEKLETLRKADAILREELDNLKNRPDQYFCALTSTRSVGVKGDDRTYDCVIAVRAVKTDDFMTCEYAPLPHKLLSRISSRITAEIPSASRVVYDITSKPPATVEWE

SEQ ID NO: 67793 - DNA, 612 bp, Unknown
  Obtained from environmental sample
  misc_feature (1)..(612): n is a, c, g, or t
atgattaaagtaattgattacaaagcggggaacgccccaagcgttatgcacgcaatcaccagccttggttacaaggcggaattcgcacgccagggagatgagcttgcggacgcgactcatatcttgctgccgggagtaggcagcgcgggggcaactatggaatccctgcgcgaattgaacataattgcggcgctggaagatgctgtcttcaagaaaaaagttttttttcttggcatctgcgtcgggttgcagattctttttcagcacagcgaagaagatgacgcggactgtctcggatggctaaaaggcaaggtaactaaattcgacgcctcaaaggtcagggttccgcagatgggctggaacaaggttagctttacggaaagtcagatcaataacaaaaacgcaaaagaaggctatttttattttgtaaactcttttcacgcaaaacctgagaacaaggaagatctgtggggaacggccgattataacggccagttcacggcggctgttcacagggacaatatattcgccacccagtttcacgttgaaaaaagcggcaaagcggggctcgctattcttggcggctttcttagccttggtaaaaggggctga

SEQ ID NO: 67794 - protein, 203 aa, Unknown
  Obtained from environmental sample
  DOMAIN (31)...(189): CobB/CobQ-like glutamine amidotransferase domain
  misc_feature (1)..(203): Xaa is any amino acid
MIKVIDYKAGNAPSVMHAITSLGYKAEFARQGDELADATHILLPGVGSAGATMESLRELNIIAALEDAVFKKKVFFLGICVGLQILFQHSEEDDADCLGWLKGKVTKFDASKVRVPQMGWNKVSFTESQINNKNAKEGYFYFVNSFHAKPENKEDLWGTADYNGQFTAAVHRDNIFATQFHVEKSGKAGLAILGGFLSLGKRG

SEQ ID NO: 67795 - DNA, 804 bp, Unknown
  Obtained from environmental sample
  misc_feature (1)..(804): n is a, c, g, or t
atgctgacgaaaagacttattgcctgctttgacattattaacggcacggtaacaaaagcggtgcagtttcaggacaacattaacgtcgcccccgccgaagaactggcggaaacaatgtacaacgagcagatcgacgaactgattttttatgatattacggcgagcgcggaaaagcgcgggattgatattgaaaccgtaaaaaaggtcgcccgccgtttgtttatccccttcacagtcggcggcggtataaaaaaccttcaagatatgtacgaggcgttaaaagcgggggctgaaaaaatcagcgtcgattcgatggccgttagaaacccgcaaattattaccgagggctccaaagcctttggcgctcaatgtatcgtgctttcaacccaggtaaagcgcacagggcttaccccaagcggatacgaggtttatatagacggggcaaggctggcgacgggcatggacgccattgagtgggtaaagcgcggacaagagcttggcgctggtgaaatatgcgtaaacagcattgatcgtgacggaaccctttccggctacgatatcgaacttatgaaacttgccgaatccgccgtatcggttccgctaattgcttcaggcggagcgggaaagcccgaacacctgaaagatctttttaccgctacggaagcacaggcggctataatcagcagtatgctgtactcgccaaggctggaacgaaatttcccggtaagagagctgaaggattatttgatacaaaacggcgtagccgcacgtcctgttctgcctgaggaagcaccatgcaaatag

SEQ ID NO: 67796 - protein, 267 aa, Unknown
  Obtained from environmental sample
  DOMAIN (5)...(237): Histidine biosynthesis protein
  misc_feature (1)..(267): Xaa is any amino acid
MLTKRLIACFDIINGTVTKAVQFQDNINVAPAEELAETMYNEQIDELIFYDITASAEKRGIDIETVKKVARRLFIPFTVGGGIKNLQDMYEALKAGAEKISVDSMAVRNPQIITEGSKAFGAQCIVLSTQVKRTGLTPSGYEVYIDGARLATGMDAIEWVKRGQELGAGEICVNSIDRDGTLSGYDIELMKLAESAVSVPLIASGGAGKPEHLKDLFTATEAQAAIISSMLYSPRLERNFPVRELKDYLIQNGVAARPVLPEEAPCK

SEQ ID NO: 67797 - DNA, 579 bp, Unknown
  Obtained from environmental sample
  misc_feature (1)..(579): n is a, c, g, or t
ttgatggtaatgtttgaaaaaagcgctcttgaattagtagccctcattaaagcgaaaaaactcggcgtagtcgaattgacaggcgcgtacattgacgcgataaaaaaaaacgatagtcgttataacgcctttataacactggcaaaagagaaggcgttgacttgcgcaaaagaaattcaatcgcgaatcgaatcaggcgaggcgctttcgccgcttgcgggcgtgccaatcgccgttaaagataacatttccaccgagggaatcgaaacgacctgcgcgtcaaaaatgctcaaagggtacacgcccgtgttcaacgcaacggttattgagaaactggaaaaagccggcatggttgtcatcgggaagaccaacatggacgagtacgcgatgggcggctccagcgagaccggggcgtccggcccggtacacaatccctgggatactgcgcgtgtctcaggtggttcatccggcggcagcgttgcggctgtggttgcgggggagatacccatcgcgcttggttcagacacgggcggcagcatacgccagccctgcgctttttgcggtgccacgggcatttaa

SEQ ID NO: 67798 - protein, 192 aa, Unknown
  Obtained from environmental sample
  DOMAIN (25)...(192): Amidase
  misc_feature (1)..(192): Xaa is any amino acid
MMVMFEKSALELVALIKAKKLGVVELTGAYIDAIKKNDSRYNAFITLAKEKALTCAKEIQSRIESGEALSPLAGVPIAVKDNISTEGIETTCASKMLKGYTPVFNATVIEKLEKAGMVVIGKTNMDEYAMGGSSETGASGPVHNPWDTARVSGGSSGGSVAAVVAGEIPIALGSDTGGSIRQPCAFCGATGI

SEQ ID NO: 67799 - DNA, 1011 bp, Unknown
  Obtained from environmental sample
  misc_feature (1)..(1011): n is a, c, g, or t
atggcgatcaggcgaaagattgttgtgatgggcggcatgcctaaggacgacgccgagcttgttggggcggcggcggagcgctacgggcttgagctgtcggcgacgttgcgtcttgtcggcggtattttggcggggagcaatgagtatccggccggggtgatatcctatctgccgtgcaatcacgagaagatcagtcatttctttgccgtgcagcatatagattttgttgatgatataccgttttaccagtgtgtcggcgaaggcgcggttcctccgtatgtgtacgatcttccgatcagcggcgtttttgtctcgccgctctcagaggcggcggcggcgagtttggtgctctctgttgtacgcagtaacgccgcgctctccaggcgtatggcgcttgaggcgcaggttatgagcgatcgtaaccagaaggatcgccttgcttctatcggtatggaattatgctatgagaacgaccttccggcgcttttggggcatattctgacggtgaatcgcgaggcggtttgcgccgacgcggggtgtatatacgtgcgggaccgtatggtggacaacactttgtgcgacacgttgcgttttatgctatgtcagagcgattcctttgtcgacggcatagtgacggctccccagcttaaggtcaacaccgacacgctcgtcggttgcgcggtctataccgggcagtttattgaggtcgacgacgtggataagatacgccccgacgcgccgtttcgggccgataggagctttgtctgctcgccgggctactgctgcaagtcggtactgacggtgccgctcataaatgttgaagacgaggtggttggcgtgttgcagcttataaacaaaaagttggataggggcataaagctttcgtccgccgaagaggtaaaagcgcacgcgtatccgttctccaccgacgacataggggtgattcgcttcttgtcgcgttacgcggcgctgtcgatagatcggatcagcctctacaacgtagccacgtag

SEQ ID NO: 67800 - protein, 336 aa, Unknown
  Obtained from environmental sample
  DOMAIN (158)...(326): GAF domain
  misc_feature (1)..(336): Xaa is any amino acid
MAIRRKIVVMGGMPKDDAELVGAAAERYGLELSATLRLVGGILAGSNEYPAGVISYLPCNHEKISHFFAVQHIDFVDDIPFYQCVGEGAVPPYVYDLPISGVFVSPLSEAAAASLVLSVVRSNAALSRRMALEAQVMSDRNQKDRLASIGMELCYENDLPALLGHILTVNREAVCADAGCIYVRDRMVDNTLCDTLRFMLCQSDSFVDGIVTAPQLKVNTDTLVGCAVYTGQFIEVDDVDKIRPDAPFRADRSFVCSPGYCCKSVLTVPLINVEDEVVGVLQLINKKLDRGIKLSSAEEVKAHAYPFSTDDIGVIRFLSRYAALSIDRISLYNVAT

SEQ ID NO: 67801 - DNA, 783 bp, Unknown
  Obtained from environmental sample
  misc_feature (1)..(783): n is a, c, g, or t
gtgtcgctttgctgcggagaaggtgcgccgctcttcatcctcggcaacgggtctaacgtgctgataagcgacgccggtttcggcgggctagtggtaaacctgtccaagaatttttcggcgctaagctgggacggcgccactgctttcgtattgagcggctacccgttggacgctttgacagccgctgccgcggagaaggggtgcgccgggatggaacgtttgtctggcatccccgggacggtaggcggcgcggtggtaatgaacgccggcgcatttgacgccgacgtctcccatacgttgcgcagcgtacgcgtgtttaagacttccgcgtatacagtagagaccgtttccgccaaggatttgaatctgggttacagaaccagcgtcttcaaaaacagcggcgacgtggtgctagaggcgactttcgatttcaccctcggcgacgcggcgcagcttaagtcactgcgggatgagatcataggtaagcgcaaagcgaagcaaccggtagactccccaagttgcggaagcgtcttcaagcgtccccccaacggtttcgccggcactatgatagagtcctgcggtctaaaaggcttcaaagtaggcatggccgaggtctcggagaaacattcgaatttcattatcaataccggaagcgccaaagcggaggacgtcaggtcggtgataaggcacgtccagaaaacagtcttcgaaaaacacgggatactgttagaacctgaagtaatttttttaggtgaatttcaggaacctttgtataaatgttga

SEQ ID NO: 67802 - protein, 260 aa, Unknown
  Obtained from environmental sample
  DOMAIN (1)...(117): FAD binding domain
  misc_feature (1)..(260): Xaa is any amino acid
MSLCCGEGAPLFILGNGSNVLISDAGFGGLVVNLSKNFSALSWDGATAFVLSGYPLDALTAAAAEKGCAGMERLSGIPGTVGGAVVMNAGAFDADVSHTLRSVRVFKTSAYTVETVSAKDLNLGYRTSVFKNSGDVVLEATFDFTLGDAAQLKSLRDEIIGKRKAKQPVDSPSCGSVFKRPPNGFAGTMIESCGLKGFKVGMAEVSEKHSNFIINTGSAKAEDVRSVIRHVQKTVFEKHGILLEPEVIFLGEFQEPLYKC

SEQ ID NO: 67803 - DNA, 642 bp, Unknown
  Obtained from environmental sample
  misc_feature (1)..(642): n is a, c, g, or t
atgcaaatggattacaaaaagatagtaaccggtcagctggaagtcaacacctacgttgtcccgcaagcaaatactcccaacggcgcaaaccgcgactgcctggtgatcgacccgtccgaccactgccgcgatgtcgtaaaatatattgaaaaagaaaaattacacccaatatcaatactgctgacgcacggccacttcgaccacataatgggaattccggagatactcaacgcatcccccgacgctaagatattcattcacgataacgatagggatatgttatccgactcgaatcgcaacggctcgatcttaatgggagcggattttgccgttaacagcggtatcaattcgttgacagaaggcgtgacgcatgtcggcgatttcgaattcacggtactgcacgtccccggccacacgcagggcggctgcgcctttgtcttcggcgacgtttgtttctgcggcgacacaatctttgccggttccgtcggcagaacggacttacccggaggaaattccggtcagttgataacgagcatacgcgaaaagattatgacgctgccgccccaaactgtactgtgcccgggccacggcggacggacttcggttgaacgggaggcgcggagcaatccgtttttgtgttga

SEQ ID NO: 67804 - protein, 213 aa, Unknown
  Obtained from environmental sample
  DOMAIN (14)...(196): Metallo-beta-lactamase superfamily
  misc_feature (1)..(213): Xaa is any amino acid
MQMDYKKIVTGQLEVNTYVVPQANTPNGANRDCLVIDPSDHCRDVVKYIEKEKLHPISILLTHGHFDHIMGIPEILNASPDAKIFIHDNDRDMLSDSNRNGSILMGADFAVNSGINSLTEGVTHVGDFEFTVLHVPGHTQGGCAFVFGDVCFCGDTIFAGSVGRTDLPGGNSGQLITSIREKIMTLPPQTVLCPGHGGRTSVEREARSNPFLC

SEQ ID NO: 67805 - DNA, 642 bp, Unknown
  Obtained from environmental sample
  misc_feature (1)..(642): n is a, c, g, or t
gtgttgattatgatcgaaatgccctacttagactcatacatggcctacctgcagcttgagaagacgttaagcggcaataccgccgtctcatatcgcttcgatttgcagaggctcgccgtgtacctcgcccagcacgacgctatcgatttacagaaagtcacgccgcagcttttgtccgcttacgtcagattgctgtacgacttgggcttcgccgcgacctccatacagcgcacggtgtcgtccatgcgtagtttcttcgctttcatagccgtggagggatacatatcaagcgaccccacggaactgctcgagagcccaaagcgtacgcggacgctaccgtcggtgttgtcggtggaagaggttgaggctgtaatcaacgccgttgatttggagggaaaaaacggtatacgcgatcgggcgatcatcgagacgctttacgccacgggaatgcgcgtgtcggagctctgcgcctttacgatggagcagcttctggaaaaggagcaactggtccgagtatttggcaagggatcaaaagagcgcatagtgccaataggcgacagcgcgctctattggatcggtcagtacctagagaaggagagggggctgtcggcaaggccgtattccgggagtacgctattttga

SEQ ID NO: 67806 - protein, 213 aa, Unknown
  Obtained from environmental sample
  DOMAIN (10)...(93): Phage integrase, N-terminal SAM-like domain
  misc_feature (1)..(213): Xaa is any amino acid
MLIMIEMPYLDSYMAYLQLEKTLSGNTAVSYRFDLQRLAVYLAQHDAIDLQKVTPQLLSAYVRLLYDLGFAATSIQRTVSSMRSFFAFIAVEGYISSDPTELLESPKRTRTLPSVLSVEEVEAVINAVDLEGKNGIRDRAIIETLYATGMRVSELCAFTMEQLLEKEQLVRVFGKGSKERIVPIGDSALYWIGQYLEKERGLSARPYSGSTLF

SEQ ID NO: 67807 - DNA, 1242 bp, Unknown
  Obtained from environmental sample
  misc_feature (1)..(1242): n is a, c, g, or t
atggaaacaaaccttaatcaccgcaaagccggaattaatctgcggcttgtaacgcaaaacggacagcctgcggcgaatcaggaaattaaaatagagcagaggagtcatcagtttttattcggcgtcggcgggtttgacgctgtagagcttacaggcggaaagccggatggttccgctgtagatgaaaaacgcgcggcgtatttacaggaaaaacttgacaaactttttgccattaacaattacgcgacattgcctttctaccttggacgttatgagccgcaggaaggcaaacccgacgagaagcggttaaaagccggagcgcgctggttcgcggagaggaacataactacaaaaggtcaccccctgtgctggcatactgtatgcgccccatggcttatgaattattccaatgctgaaatactaaaaaaagttatcgcgcgaattgagcgcgacgtatccgcttttgccggattaattgatatgtgggatgtaattaacgaagttgtcatcatgccgatttttgacaaatacgacaatgccgttacacgaatatgcaaggaatacggacaggtgcgtattgtaaaagaagtatttgaggcggcaaagcgcgcgaatccaaacgctgtattgctgttgaatgattttgatatgtcgaaggattatgaaattcttatagataaatgtttgcagacgggtattccgattgacgtaatcggtatacagtcgcaccagcatcagggatattggggcgcggaaaaagtccgcgatgtgcttgagcgtttttcccgttttggcttacccctgcattttacggaaaatacgataatctcaggcgatataatgcccgcgcacatagttgatctgaacgattggcaagtggaaaaatgggacactactcccgaaggcgaagagcggcaaaaaaatgaattaatcgaaatgtacgaaattcttttctctcatccgcaggtacatgcaattacaacatggtccggcgcggacgacgcatggctccacgcgcccgcaggcttgcttcgcactgacaacagcgaaaaacccgcgtacaaggcgttacgcgccaaaatagaaaacgaatggcgcacggaaaaaacagcccgcacggacgaaaacggcaatgttaacatggaaggttttaagggcgcgtatgaaatctcatgtatgggcaaaaacgctctttttgaacttgacgggaaaaataactctttggaactgcggttgatttaa

SEQ ID NO: 67808 - protein, 413 aa, Unknown
  Obtained from environmental sample
  DOMAIN (67)...(361): Glycosyl hydrolase family 10
  misc_feature (1)..(413): Xaa is any amino acid
METNLNHRKAGINLRLVTQNGQPAANQEIKIEQRSHQFLFGVGGFDAVELTGGKPDGSAVDEKRAAYLQEKLDKLFAINNYATLPFYLGRYEPQEGKPDEKRLKAGARWFAERNITTKGHPLCWHTVCAPWLMNYSNAEILKKVIARIERDVSAFAGLIDMWDVINEVVIMPIFDKYDNAVTRICKEYGQVRIVKEVFEAAKRANPNAVLLLNDFDMSKDYEILIDKCLQTGIPIDVIGIQSHQHQGYWGAEKVRDVLERFSRFGLPLHFTENTIISGDIMPAHIVDLNDWQVEKWDTTPEGEERQKNELIEMYEILFSHPQVHAITTWSGADDAWLHAPAGLLRTDNSEKPAYKALRAKIENEWRTEKTARTDENGNVNMEGFKGAYEISCMGKNALFELDGKNNSLELRLI

SEQ ID NO: 67809 - DNA, 1152 bp, Unknown
  Obtained from environmental sample
  misc_feature (1)..(1152): n is a, c, g, or t
atgatacgaaaaatgtttgaagaaggcatacagttaaaaaaacagcatggagaagacaaggtttttgatttctcgctaggaaacccggatattgaaccgcccccagcctttcacgaagcttttataaaaatggctcaggaagacgagaaaggctcacacgggtatatgccaaacgccggcttcccccatgtcagggaggctctggcaaaaaaagtctgcaaagagcagaatgtaaaaattgacggctcacatataatcatggcggtgggagcggcaggggggcttaacgtggtcttcaagacaatctgcaaccccggcgatgaaattatcgtatcgcgcccctattttatggagtaccgcgcctataccgccaaccacggcgcaaaacttgtcgaagctgactctcttactgattttaatttggacattgaggcaataaaatctgcgttaaacgaaaaaacagccgcaatccttataaattcacctaacaatccgacggggaaggtatattcggcttccgtccttgcctctctttcttctcttcttgcggaacacggaaaaaagaccggacgttttccataccttgtatcagacgagccctaccgtgaaattgcgtataacgttgaagttccgcctgttttaagctgttacagacagtcaattgttgtcagttcctattcaaaaagcctgtctcttcccggcgagcgcatcggttttatcgccgtaagcccggatgcggacgataaggacgatcttttaaacggtttaatttacgctacaaggatactggggtttgtaaacgccccagctcttatgcaaaaaatagtcgcgtccctcatagatgcgcgcgtcgacgtttcaatttatgcgcgaaggcgggacgcttttatgaaagtgttgaataatgcaggaatagaatattccactccgcagggggcattttatcttttctgcaaagtcccgaaaagcaaaacaggaaaacaggaaaccgacgacaaagcgtttgtagaacaccttaaaaaacatctggttttaggagtgcccggaagcagtttcggcaaaagcggctggctgcgttttgcctactgtgttgacgaaaaaataattaacgcttctcaaaacgcttttaaatcggcagtggaaagctggtaa

SEQ ID NO: 67810 - protein, 383 aa, Unknown
  Obtained from environmental sample
  DOMAIN (30)...(303): Beta-eliminating lyase
  misc_feature (1)..(383): Xaa is any amino acid
MIRKMFEEGIQLKKQHGEDKVFDFSLGNPDIEPPPAFHEAFIKMAQEDEKGSHGYMPNAGFPHVREALAKKVCKEQNVKIDGSHIIMAVGAAGGLNVVFKTICNPGDEIIVSRPYFMEYRAYTANHGAKLVEADSLTDFNLDIEAIKSALNEKTAAILINSPNNPTGKVYSASVLASLSSLLAEHGKKTGRFPYLVSDEPYREIAYNVEVPPVLSCYRQSIVVSSYSKSLSLPGERIGFIAVSPDADDKDDLLNGLIYATRILGFVNAPALMQKIVASLIDARVDVSIYARRRDAFMKVLNNAGIEYSTPQGAFYLFCKVPKSKTGKQETDDKAFVEHLKKHLVLGVPGSSFGKSGWLRFAYCVDEKIINASQNAFKSAVESW

SEQ ID NO: 67811 - DNA, 606 bp, Unknown
  Obtained from environmental sample
  misc_feature (1)..(606): n is a, c, g, or t
atggcgaaaataaagctcactaaaaacgagctgaaaaatcaaaaagattcccttaaaatgttccagcgctaccttcccacgctgatgctcaaaaaacagcaattacaaggggagattcggctgaccgaattgcggctcaaggaactgcgcgacaaaaaggaacgtctcgacgaatccttcaaaacatggatcggcgttttcggcgagaaggacgtcttcacaaaggatattctgaaaataaccaaactgaagaccggtactggaaacatcgccggcgtcgccattcccattttcgagggcgcggaatttaaaactacgccttacgatcttttcgggacgcccctctggcttgacatggcggtcgagaaaatggagcaggccctccttctcgatcttgaggccgagattgtcgaggagcagcgcaagcggctggatcacgaattacgcgtaacgacgcagcgggtcaacctttttgagaaagtcaagattcccgaaacaaaagtcagcatcaaaaaaatacaggtttaccttggcgaccagcagaccgccgccgtggtacgcgggaagatcgccaagagcgggcttgtaaaggcggcaacgaaatga

SEQ ID NO: 67812 - protein, 201 aa, Unknown
  Obtained from environmental sample
  DOMAIN (2)...(196): ATP synthase subunit D
  misc_feature (1)..(201): Xaa is any amino acid
MAKIKLTKNELKNQKDSLKMFQRYLPTLMLKKQQLQGEIRLTELRLKELRDKKERLDESFKTWIGVFGEKDVFTKDILKITKLKTGTGNIAGVAIPIFEGAEFKTTPYDLFGTPLWLDMAVEKMEQALLLDLEAEIVEEQRKRLDHELRVTTQRVNLFEKVKIPETKVSIKKIQVYLGDQQTAAVVRGKIAKSGLVKAATK

SEQ ID NO: 67813 - DNA, 1194 bp, Unknown
  Obtained from environmental sample
  misc_feature (1)..(1194): n is a, c, g, or t
atgaataaagtatacagcaaaattgaatcaataacaggaagcgttattacagttaaggctgacggaatccgttacggagaccttgccgaagtagatacagtattcggcacctcgcttgccgaagtaaaccgtctgcagggtgatactgttgcgctgcaggtattcgcgggcggacgcggtatttcaacaggcgatacagtccgttttctcggacgcccgatgcaggttccgttttcggaaaaccttatgggcagggtattttccggttcaggcaaaccgcgtgacaaaggtcccgagttaagcgaaaacatgataccaatcggcggtccgtcggttaatccttctcagcgtattataccgaggaagatgatccgtacaggaatttccatgatcgatctttttaacactcttgtcgtgtcgcagaaactgccgatcttctcggtctcgggcgagccttacaacgagcttctcgcacgtatcgcgatgcaggcggaagttgacgtaatcgtgcttggcggcatgggtttgaaatatgacgactaccttaccttcaagaacacgcttgaaaacgccggcgccctcgcgcgcacggtcatgttcatgcacaccgccagcgaccccaccgtcgaatgccttatgatccccgacatgtccctcgcggtcgccgaacagttcgccctaaagggtaaggacgtgctggtgcttcttaccgacatgaccaacttcgccgacgcgatgaaagaaatatccattatacaggaacaggtaccttccaaccgcggctatcccggcgacttatacagccagcttgccagccgctacgaaaaggctgttgactttgaaaaagccggctccattacagtcctgggcgtaacgacaatgcccggcgacgacgtaacccacccggtgcctgacaataccgggtatatcaccgagggccagtactacctgaagcacggcagaatagagccattcggctccttaagccgccttaaacagcaggttaacggcaaaacccgcgctgaccaccgcgccctgatggacggcatgatcaagctgtactccgcattccgggacaccctggaaaagaaggcgatgggctttatgatgtccgcctgggacgagaaactcctcaaatatggcgcgcagtttgaatcgaaaatgatggatctctcggtcaatatccccccttga

SEQ ID NO: 67814 - protein, 397 aa, Unknown
  Obtained from environmental sample
  DOMAIN (8)...(71): ATP synthase alpha/beta family, beta-barrel domain
  misc_feature (1)..(397): Xaa is any amino acid
MNKVYSKIESITGSVITVKADGIRYGDLAEVDTVFGTSLAEVNRLQGDTVALQVFAGGRGISTGDTVRFLGRPMQVPFSENLMGRVFSGSGKPRDKGPELSENMIPIGGPSVNPSQRIIPRKMIRTGISMIDLFNTLVVSQKLPIFSVSGEPYNELLARIAMQAEVDVIVLGGMGLKYDDYLTFKNTLENAGALARTVMFMHTASDPTVECLMIPDMSLAVAEQFALKGKDVLVLLTDMTNFADAMKEISIIQEQVPSNRGYPGDLYSQLASRYEKAVDFEKAGSITVLGVTTMPGDDVTHPVPDNTGYITEGQYYLKHGRIEPFGSLSRLKQQVNGKTRADHRALMDGMIKLYSAFRDTLEKKAMGFMMSAWDEKLLKYGAQFESKMMDLSVNIPP

SEQ ID NO: 67815 - DNA, 423 bp, Unknown
  Obtained from environmental sample
  misc_feature (1)..(423): n is a, c, g, or t
ttgacgcgaaaagtaggttacgctcatggtttcttacgccgcggttctgaagttgaacagatgatgaaagtagtcggcgaagaaggcacaagtattgatgactttgttatttaccttaaaggtgaactgatagactctgtttacttccagcaaaactcttttgacgcggtagacgctgcggtaaaacctgaacggcaaatttatatgtttgccaaactgataggcgtattggcaaccatcttcgaatttcatgataaaaacgaggcaaggtcatggtttaacagactcaggcagaaattcctggattacaacggttcggaatggaagagcgaacgttttgaaaagcttgaaacagaaataacaaaagccctgagtgaacagtcaaaaggcatcgataaaactgccgaaaaataccttgcgtag

SEQ ID NO: 67816 - protein, 140 aa, Unknown
  Obtained from environmental sample
  misc_feature (1)..(140): Xaa is any amino acid
MTRKVGYAHGFLRRGSEVEQMMKVVGEEGTSIDDFVIYLKGELIDSVYFQQNSFDAVDAAVKPERQIYMFAKLIGVLATIFEFHDKNEARSWFNRLRQKFLDYNGSEWKSERFEKLETEITKALSEQSKGIDKTAEKYLA

SEQ ID NO: 67817 - DNA, 1104 bp, Unknown
  Obtained from environmental sample
  misc_feature (1)..(1104): n is a, c, g, or t
atgggaaacacatcgccgattgaaattgccataagctcaaaaagttacccggctttaatggcgaccgcgcaggatattcagcatataataataaattatctgccggagatagaaaatccggtaataaatgtcgatgaaggcgctccgcagttacagatagaaattgaccgcgaccgtgcgtcaagtttcggattgtctctggcttctatcgcgtctgaaattcttacggcaatggacgggactaccgcaacatctatgagtaacggcaggcggcttatagacgtacaggtgcgattaaagagcgaggacaggcaaggtttgcccaatttggacgcaatttccgtaatcagcaaaagcggaactcgcgtgtcgctttccaatgtggcaagaattaacgaaggaagagcgccttcttccatacggcgcgaaaaacaggagcgcgttattcgcctaacaggaggactagcgccgggtatcgccgctaccgatatgcaaaaaatacttatagaaaccgtgaatcagcatcttattcagcgggaaggagtaacggtgcgtttccttggagaggcgagcgatattcaatcttatacgtcgcgttacatattgatagtagccgtcgcggtctttttggttttcggagtcatggcaagccagtttgaatcttttgtcgacccattgatcattttcttttctataccgctgttatttatcggagtaatatggatatacaaaataagcggacaggcgatgacaatgttttccattgtcggtatcatcgcccttgtaggcgtcgtcgtaaataacggaattgttttagtcgattacacaaatacactgcgcgcgcgaggcatgaaagtacgcgaggcgtgtctggaagcgggaaaaaggcgtttgcgcccgattttaatgacaagccttacaacgattcttggaatggctcctatcgcgttcttcccgggagccggcgcggataccattcagccgattggtaaaacttttgtcggcggtcttatggtaagtacgcttatgacgatttttgtaactcctgtaatgtactccgtccttaacacaagacacgataaaaaaataaaggctaagcattga

SEQ ID NO: 67818 - protein, 367 aa, Unknown
  Obtained from environmental sample
  misc_feature (1)..(367): Xaa is any amino acid
MGNTSPIEIAISSKSYPALMATAQDIQHIIINYLPEIENPVINVDEGAPQLQIEIDRDRASSFGLSLASIASEILTAMDGTTATSMSNGRRLIDVQVRLKSEDRQGLPNLDAISVISKSGTRVSLSNVARINEGRAPSSIRREKQERVIRLTGGLAPGIAATDMQKILIETVNQHLIQREGVTVRFLGEASDIQSYTSRYILIVAVAVFLVFGVMASQFESFVDPLIIFFSIPLLFIGVIWIYKISGQAMTMFSIVGIIALVGVVVNNGIVLVDYTNTLRARGMKVREACLEAGKRRLRPILMTSLTTILGMAPIAFFPGAGADTIQPIGKTFVGGLMVSTLMTIFVTPVMYSVLNTRHDKKIKAKH

SEQ ID NO: 67819 - DNA, 993 bp, Unknown
  Obtained from environmental sample
  misc_feature (1)..(993): n is a, c, g, or t
atggaaaaaataaaagccgtaattgcgggacttggacgaatagcctctctgcttgaagaagacacattacgcgaaaaaccatgcactcacgcgggggcgattgccgctaacaacgattgcgtccttgccgcaggctgtgacatagacgaggaaagacgcactgttttcgccgaaaaatggcaggttcccgtcttcgcggacgcggcggaaatgatcactatccacaagccgcaaattcttgtaatagccactcacccggacagccactaccactactgccgccttgccgcggaaatgaatgtccccgttgtgatttgcgaaaagccgcttgcggataatatttctaaggcgcggaaaatagcgcgtcttgcggaaaagggaaatcccgtcatcattacaaatcatgaacggcgttactcgcaggactatatccgcgcaaaagaaattcttaaagagggaaaattgggaacgcttttaagcgtccgcgctgttctttacatgggaaaaacaaaccgccttgtaaacgcgttttggcatgacggaacgcaccttgcggacgcgataatgttccttacgaactccgtattgaaacaccgccgaagttggggcgcgaaactgacttccaaaagcggaaccgcgtggcttgaaggctctcttaaaaataagaaagacccgcctatcccgcttttaatggaaataggcgcgggacgcgatcatttggtttttgaaattgagttctcatgcgaaaaaggcagattacgaatcggcaacggagtatttgaagttttggaaagcgttccaagcccatacgccgaaaaattccgctcccttaaaaacacaggcgaaattttttccgggcagacgggttattttgccaatatgttaaaagacgcagttgcctgcgcaaaagacccgaatcacacgcctgtttcaagagcgattgacggcttgcgtgttattgaatatttaaacagcgtaaaaaaatggcggtaa

SEQ ID NO: 67820 - protein, 330 aa, Unknown
  Obtained from environmental sample
  DOMAIN (4)...(135): Dihydrodipicolinate reductase, N-terminus
  misc_feature (1)..(330): Xaa is any amino acid
MEKIKAVIAGLGRIASLLEEDTLREKPCTHAGAIAANNDCVLAAGCDIDEERRTVFAEKWQVPVFADAAEMITIHKPQILVIATHPDSHYHYCRLAAEMNVPVVICEKPLADNISKARKIARLAEKGNPVIITNHERRYSQDYIRAKEILKEGKLGTLLSVRAVLYMGKTNRLVNAFWHDGTHLADAIMFLTNSVLKHRRSWGAKLTSKSGTAWLEGSLKNKKDPPIPLLMEIGAGRDHLVFEIEFSCEKGRLRIGNGVFEVLESVPSPYAEKFRSLKNTGEIFSGQTGYFANMLKDAVACAKDPNHTPVSRAIDGLRVIEYLNSVKKWR

SEQ ID NO: 67821 - DNA, 426 bp, Unknown
  Obtained from environmental sample
  misc_feature (1)..(426): n is a, c, g, or t
atgaaattctcggtaaaataccagtcaagaggcggcaatacccaagccgtcgccgaggtaatcgccggtacattgggcgttaaggcggagccggttgatactccaataaccgaaaatgttgatatattgtttataggcggggctttatacgcgtggcggattgataaaaaattgaagaaattccttgatactgtacctgcggaaaaaatcggtaaaatagcggtttttggaaccagcgggggaaaagagagcgtaattaaaaaaataaccgaatatgccgcaaaaaagggactaaaagcggatgaacgcagtttatatttaccaatggggttacaagggaacgctttgttcggacgcaagggcggtaatttagataatgatcaaaaaaataaaatcaaagaatttgcgtccggctttttgagatga

SEQ ID NO: 67822 - protein, 141 aa, Unknown
  Obtained from environmental sample
  misc_feature (1)..(141): Xaa is any amino acid
MKFSVKYQSRGGNTQAVAEVIAGTLGVKAEPVDTPITENVDILFIGGALYAWRIDKKLKKFLDTVPAEKIGKIAVFGTSGGKESVIKKITEYAAKKGLKADERSLYLPMGLQGNALFGRKGGNLDNDQKNKIKEFASGFLR

SEQ ID NO: 67823 - DNA, 858 bp, Unknown
  Obtained from environmental sample
  misc_feature (1)..(858): n is a, c, g, or t
atggcgatgtatttaaaaatgcaggcgacaggcggcaaactgacggaattcatgcgaaccggcgggcttaccgatcttccccttatttggaaaccttttctttcggctccgcttgcttttattctggtaattgcggttccggcggctttatcatacataatcggatattttatttttaagaacagggttaaaggcgtttacttttcgattatttcacaggcgcttacatgggcggcgtattcaatgtttatagcgatgtcgccgtacaccaacggaaatatcggtatatctgaaataagatcaattcttgggagtattcgcggcggcgcaaataagggaactttgctcactcttttttacgccgcgattgtcattctaatacttgcctacgcgctgtgcgtttttttaaccggagcgaaattcggtaaacttcttatcgcaatccgggacggggaaaaccggacttatttttcgggctaccgcgtcagtttgtataaaacatttgtttatgttatgtccgcgtgtctggcgggaattgcgggagcagtctttgttaatttcaacggcagtatttccccgtcccaaatgaccatcgcattttccattaacatgattatatgggtggcgataggcggcaggggtacgattatcggggctgtaatcggcgcgctccttgtgaatctgtgcgaatataattttagctccggaagtatagttgaaatctggcagtatattatcgggtcgatattctgcattacgatactttttttcaagggcggaattattgggttgttcacgcatcaaatcccggagttgattgaaaaactaaaaggaaggatacgcaatgccgcaagttga

SEQ ID NO: 67824 - protein, 285 aa, Unknown
  Obtained from environmental sample
  DOMAIN (1)...(254): Branched-chain amino acid transport system / permease component
  misc_feature (1)..(285): Xaa is any amino acid
MAMYLKMQATGGKLTEFMRTGGLTDLPLIWKPFLSAPLAFILVIAVPAALSYIIGYFIFKNRVKGVYFSIISQALTWAAYSMFIAMSPYTNGNIGISEIRSILGSIRGGANKGTLLTLFYAAIVILILAYALCVFLTGAKFGKLLIAIRDGENRTYFSGYRVSLYKTFVYVMSACLAGIAGAVFVNFNGSISPSQMTIAFSINMIIWVAIGGRGTIIGAVIGALLVNLCEYNFSSGSIVEIWQYIIGSIFCITILFFKGGIIGLFTHQIPELIEKLKGRIRNAAS

SEQ ID NO: 67825 - DNA, 783 bp, Unknown
  Obtained from environmental sample
  misc_feature (1)..(783): n is a, c, g, or t
atgccgcaagttgacgaaaacacaattcttaccatcaacagtgtatcggtttgcttcgacggtttttacgcccttaccgaagtagacgtttccgtaaaacgcaacaccgttcacttttttatcggtccgaacggagcggggaaaacaacgctgttggatattatctgcgcgaaaacccgccctactctcggcaacgttgtattttttcccaaagaaaaagagaagatacgtcttacaggaatgaaagaatacgagatagtgcgcagcggagtgggcaggaaatttcaagtgccgtctgtgtttgtaaatcttacggttttagataacatgattctttcattaaagaggcataaaagcattttagattcgatattcctaaatccgtccgccgaagaattcgcgcaaataggcgagattcttgaaaaggtgggattgtcggaacgaagggatgtaaaagccggttcccttgcgcacggcgaaaaacagtggctggaaatcgccatgcagattgcggcaaagcctgaactcatcatgctggacgaacctgtcgccggaatgggcagagcggaaacggacaagacggcggaaatacttgccgagataaaaaaagaatgtaccgtaatcgtagtggaacacgacatggaatttgtaaagatggcggcggacacggttaccgttctgcacgagggcaaggtgttgaccgagggaattgtttccgacgtgcttgcggacaagacagtacaagctgtgtacttaggcagaggcggtgaacgcaatgcttga

SEQ ID NO: 67826 - protein, 260 aa, Unknown
  Obtained from environmental sample
  DOMAIN (35)...(230): ABC transporter
  misc_feature (1)..(260): Xaa is any amino acid
MPQVDENTILTINSVSVCFDGFYALTEVDVSVKRNTVHFFIGPNGAGKTTLLDIICAKTRPTLGNVVFFPKEKEKIRLTGMKEYEIVRSGVGRKFQVPSVFVNLTVLDNMILSLKRHKSILDSIFLNPSAEEFAQIGEILEKVGLSERRDVKAGSLAHGEKQWLEIAMQIAAKPELIMLDEPVAGMGRAETDKTAEILAEIKKECTVIVVEHDMEFVKMAADTVTVLHEGKVLTEGIVSDVLADKTVQAVYLGRGGERNA

SEQ ID NO: 67827 - DNA, 711 bp, Unknown
  Obtained from environmental sample
  misc_feature (1)..(711): n is a, c, g, or t
gtgaacgcaatgcttgatattatagatctggacacatactacggcgaaagccggataatcaataaacttaatctttcaataaaaaaaggaagcgtcacctgtttaatcggaagaaacggcgtcggcaaaaccacaacgctcaaaagcattatgggtttggtaaaaactccatcggggaaaataatttttgatggacatgacataattaaacttccggcttacgaccgcgtgaggctcggcataggctatgtgccgcagggacgggatatttttccgcagatgactgtacgcgaaaatcttgaattgggattacagccgcttgccggaaaaaaacaaaaggcggaaatccccgaatatctttttgaactgtttcccgctttgccgaaattcgcaaagcgtaaaggcggcgatttatcgggcggtcaacagcaacagctcgctatagcccgcgctcttgcggcggaaccgaaaattttaatactggacgaaccgacagagggtattcagccctcgattattcaggacattggcagggcgataaggagaatcaacactgaaaaagggataactgttcttcttgtggaacagtacctggaatttgtactggagatttcagaccatctgttcattatggaaaaaggaaacgtcgtgttaagcggagcgaccgccgaacaggacgcggaacatattcaaaagatattaacgatatag

SEQ ID NO: 67828 - protein, 236 aa, Unknown
  Obtained from environmental sample
  DOMAIN (30)...(214): ABC transporter
  misc_feature (1)..(236): Xaa is any amino acid
MNAMLDIIDLDTYYGESRIINKLNLSIKKGSVTCLIGRNGVGKTTTLKSIMGLVKTPSGKIIFDGHDIIKLPAYDRVRLGIGYVPQGRDIFPQMTVRENLELGLQPLAGKKQKAEIPEYLFELFPALPKFAKRKGGDLSGGQQQQLAIARALAAEPKILILDEPTEGIQPSIIQDIGRAIRRINTEKGITVLLVEQYLEFVLEISDHLFIMEKGNVVLSGATAEQDAEHIQKILTI

SEQ ID NO: 67829 - DNA, 690 bp, Unknown
  Obtained from environmental sample
  misc_feature (1)..(690): n is a, c, g, or t
atgcaagggaatacaactgaacatttgggagatttgcttgcaagcctacccgaaaacaccacagccaccccatatactgtcaaattgataattagttattttgtcaatcaaaccacaatggcttccgaagggtcgcagtttaaaaacaaccccacaaaatacgtttgccttgacctttcagacagtacttttaccaacatgcctaattacgctttttttgaaaattgcaccagccttgtcagtgtaaccttccctgtaaccttaccgaacagcgttaacagtattgcgactggtgcttttagaggttgtaccaaccttaccagtgtgaccttaccgaacaatgttaccagcattggtagtcaggcttttatgaattgcaccagccttacaaatgtaaacataccgaataacgttaccactatttctcctcaagcttttcaaaattgcaccagccttacaagtataacaatacccgacagcgttacaacccaaattggtcctcaaacttttcaaaattgcaccagccttatcagcgtaagatttgaaagagttggtattacttttgccgctggagcgtttattgacactgctaacacgacatctttgcagactgcgtatactgccggaggcataggaacatatacaagaccagatacgacaagcacaacatggacgaaaatatcggactga

SEQ ID NO: 67830 - protein, 229 aa, Unknown
  Obtained from environmental sample
  misc_feature (1)..(229): Xaa is any amino acid
MQGNTTEHLGDLLASLPENTTATPYTVKLIISYFVNQTTMASEGSQFKNNPTKYVCLDLSDSTFTNMPNYAFFENCTSLVSVTFPVTLPNSVNSIATGAFRGCTNLTSVTLPNNVTSIGSQAFMNCTSLTNVNIPNNVTTISPQAFQNCTSLTSITIPDSVTTQIGPQTFQNCTSLISVRFERVGITFAAGAFIDTANTTSLQTAYTAGGIGTYTRPDTTSTTWTKISD

SEQ ID NO: 67831 - DNA, 903 bp, Unknown
  Obtained from environmental sample
  misc_feature (1)..(903): n is a, c, g, or t
ttgcggggccggaagtcaaggtcgaaaaaatttcaagaaaaacttgactctacccgcacccgtccgcgccggttcgggaagacgctgaaccaaacgatgctcaagtgtttttttgaagatacggcgccgataggcggcaaggatacgcgggcattgtttcgtgggttgaagatagaggatgctagggaaaggtatctggagcatcaggggaagtatccggtgatatttctgagtttcaaggatgttggaaaagaaaacatcgatagggcttgtatggcgtttaagggtatgatatcggaggaatttcgccggcacaattatgtcaaggagaaaatcggcgattcgatagatttgaaaaagtttgaaaacctctcttccggcgacggtgaactaacgttggaattgtcgattcccaatattgaactgaaatacatctacaaaaccaaaatacaagaatggttcaaaaagcgaatagcgggaaagaatcttgacgcgctgcacaaggctgttctgagcggggatgccgagacgttccaaaatgaattatcggcgcttctttcggagagcataagttacatggatggcgccgaaagcctttaccacggagttatgatcggtgcgctggcgcggttaagcggttacagattgaagtccaacagagagagcggagacgggcgtagcgatttggtcttgtacagcgagaacgaacaagacggcaaagcgatcatttttgagtttaaggtggccaaagaattcgacaagctacccgttgcgtgtgaaaacgccctaaaacagatagaggacaagaattacgccgctgattgggacaaagagggctataaaaatattgtcaaatacggcataggcttctacggcaaacggtgcgaggtaaaaaatgtatga

SEQ ID NO: 67832 - protein, 300 aa, Unknown
  Obtained from environmental sample
  DOMAIN (1)...(300): Protein of unknown function (DUF1703)
  misc_feature (1)..(300): Xaa is any amino acid
MRGRKSRSKKFQEKLDSTRTRPRRFGKTLNQTMLKCFFEDTAPIGGKDTRALFRGLKIEDARERYLEHQGKYPVIFLSFKDVGKENIDRACMAFKGMISEEFRRHNYVKEKIGDSIDLKKFENLSSGDGELTLELSIPNIELKYIYKTKIQEWFKKRIAGKNLDALHKAVLSGDAETFQNELSALLSESISYMDGAESLYHGVMIGALARLSGYRLKSNRESGDGRSDLVLYSENEQDGKAIIFEFKVAKEFDKLPVACENALKQIEDKNYAADWDKEGYKNIVKYGIGFYGKRCEVKNV

SEQ ID NO: 67833 - DNA, 1617 bp, Unknown
  Obtained from environmental sample
  misc_feature (1)..(1617): n is a, c, g, or t
atgggtataggaggcctgaaaatgaagctgttgccgaccggtttgcaggaatttgagtatcttcgtcgaaaagacgccatttacgtcgataagaccgatatggtttatgaactcgtatccgggctcagaaagcagttcttcctttcgcgtccgcggcggttcggcaagtcgcttacgtgctggacgcttgacgcgttgtttagcgggaagcgggagctgtttgaggggttggccatatctaaaaccgactgggagtgggatagctatccggtcatacacttggatatgagcaaggtaagtacgagcagaggggtagatggcgtcagaaaatcaatatccgaccaaacaggggatcttgccgacaaactaaaaatagaccttcacggggaaacagagcccggcaggatgctggagttagttatcgtcagggtctccgaaaaactcaacaaaccggcggttgtaatagtagacgaatacgacaagccttttttagacttctacaacaagccgccgatggcgcaggaagttcgcgagattatgagggattattacgcacaactgaaagcgaacgagccgcatatacggtttttgtttatgaccggaatttccaagtttaccaaagccggagtcttctcaacgctgaacaacctgaacgatatgtctattgatgaagattttggtacgttgctcggatacacggaaaaggagctcgttgaaaattttggcgaatatcttgaagccggagctaaaaaaatgaattgctccgttgatgatttggttgaaaaaatgagagaatactacgatgggttttgcttcgacggtgtgcagcgtgtgtactgcccgttttctgtgcttaattttttcgcaggctacaaattcatgaattactggataaacagcgcaaacccgcagataatcgccgactacatgaaagacagacatctcaccgtagaacagttcagaggcctccaagtgtcatgggactttgcgctgagacccggcgaaattgaaaccgcgccgcctgagagttttctctatcagtccggatacctaacgctccgggagggcgtctccgacgacttttcacttgattatcccaacgccgaagttcttgagtccatgtcgcagttggtaacaatgaacattgcccagagcgtcaacggcaactattttattgatttccgtaccccgcttttggacgcggtgcgggagagaaacgccgatctctttgttgagaccataaaccgtctcttggcaagcattccatacgatgattacgccaaggcggcgcaaccggctataaggcgatcaggcgtcccggcgagggagtggctctaccgctcgtcgattttgtcgtttctgcatggttgcggcgtcctcgcattcggcgaaccgcacacctgcaaggggcgctccgacctgctgttgtgtcacaagggcgccgcatgggtgatagagataaaagtcgcgtataatgacgacgcaaaggcaaaagctgccgaggcccttaaacaaataaacgacaaccaatacgccgatccgtacaaaaacgcaagaaagctgggaatcgctatagacgataagacacggcgggtgggggaatgggtcgcgggataa

SEQ ID NO: 67834 - protein, 538 aa, Unknown
  Obtained from environmental sample
  DOMAIN (8)...(535): Protein of unknown function (DUF1703)
  misc_feature (1)..(538): Xaa is any amino acid
MGIGGLKMKLLPTGLQEFEYLRRKDAIYVDKTDMVYELVSGLRKQFFLSRPRRFGKSLTCWTLDALFSGKRELFEGLAISKTDWEWDSYPVIHLDMSKVSTSRGVDGVRKSISDQTGDLADKLKIDLHGETEPGRMLELVIVRVSEKLNKPAVVIVDEYDKPFLDFYNKPPMAQEVREIMRDYYAQLKANEPHIRFLFMTGISKFTKAGVFSTLNNLNDMSIDEDFGTLLGYTEKELVENFGEYLEAGAKKMNCSVDDLVEKMREYYDGFCFDGVQRVYCPFSVLNFFAGYKFMNYWINSANPQIIADYMKDRHLTVEQFRGLQVSWDFALRPGEIETAPPESFLYQSGYLTLREGVSDDFSLDYPNAEVLESMSQLVTMNIAQSVNGNYFIDFRTPLLDAVRERNADLFVETINRLLASIPYDDYAKAAQPAIRRSGVPAREWLYRSSILSFLHGCGVLAFGEPHTCKGRSDLLLCHKGAAWVIEIKVAYNDDAKAKAAEALKQINDNQYADPYKNARKLGIAIDDKTRRVGEWVAG

SEQ ID NO: 67835 - DNA, 3381 bp, Unknown
  Obtained from environmental sample
  misc_feature (1)..(3381): n is a, c, g, or t
ttggcgctcgaaaaagactcgttgcaataccgtctgcctttggcctatacggactcgctcgaaaaattcgcggtaaaggcgaccgtttggaagagcaatcttaaacctgtcgtacccgaatccgagtccgccgaagaactccgctttgacaaggtcggcgagaactatgccgccgcgctgacccgcgaaaaataccgccccgctcgcgcgttgaatttcgctctgccgacgcctgtagacattccgcaggttatgatgcaatcggcgcagggaagccactattttctcgcgtcggtcgcgccgaagatggaaacgcgtaagaaactttggaataacgaattggcaatcatctgggacgtctctttaagcggctcgcaacgcgacttgaaacgtgaaatggatttgcttaatatcatctttaccgataagaaaaacgccgacgtccatctttactttttgaacaatcggtttaagaagattgccaacaagggaacgggcaacggtgaatataaagtgactaacgggaagtgggacgaattaaagagcgtcttggaaaaagcggctttcgacggtggcaccgatttttcacagatcaacgcggatgatattaccggaaatgaaattttattgttctcagatggaatatcaacgctcagcgacgccgattttctgaaaaataccaaggcaagccctcctatacactgcgtcgtttcttccgcgaaggccgattacagcgcgatgaaattgattacgggcaagacaaagggtaaattcgtgaatatcacagctctatctccgaaaaatttgaaaggcgagctgttgaacgaaacgctgcaattcttgggaacggagcacggaaaatccgtacgcgaggtctatccgagcgtcgcgacgccggttcgcggcaatttctcggtagccggcatttccgatgcaaacgacgcggagataacgctgctgttcggcttcggaaataaggttgagaggcggataacggtaaaattggacgcgaaaagcgccggcaagcagggaaacgcgtataagatttgggcgcaaaagaaaatagcggagcttgatttaaactacgagaaaaaccgcgccgaactcacgggtctcggacagcaattcggcatcgttacgcgaaacacctcgcttattgtgcttgaaacaatcgacgactacatacgctacaacattgaaccgcccgacgaattacgggcggaatatctgcgcagaatgaaggacaggggatggggcggacagttgggcggcgccgcaaagaataagaacgagatagacggtttgttggaagaattgatgggcggcgccgcagtgtccggcgaatactccgccaggagcgtaaataacaataacgacggcggcgttctcggcaccgttctcaggcagcgtccgggcagccccgtagcgtcggccgatattttcggtaagggcggtttcgccacagacatcgacgcgatactttccggcgtgggcggcctcaaatcgggcggcgacggcggggcggggcgtaaaggcacggccggcatcgggtatgggtcaggatacggttccggattcggcggaggcggcggaggggtggacgacctgttaggcggattaatgggcggcggcagcggcggtctcgaactaaagaagaggggcgagcttagagtctcttcgcccgacttcctgcatggcggcaaccttaccggcggcagaagcagggcgagtatacagcgtgtcgtcatgcaaaacatggccgcgcttcgctatgcctacaataaacgtttgcgtgaaaaaccgggtctgtgcggtaaaatcacgatcaagttcgccattgacgaattcggaaaggtggcgttcgctatggtgatggaatccacgatgaatgattccctgcttgaacaaaccgtattggccagagttaagagttggaattttgagaagattgataggcccggcgacttgacggatgtcacgtatccgttcgttttcgacgacggcggcccatgttcgaacacaacggcacggccggcgcaaacaaatgaaagagccgatagcgccaaacaagaacagagaacggccgcgcaggcaagcggaaaaaccgacagtttcgaggatacgatggataggattgaacagcaagcaaaggaaagagccgaacgggaaaaggtccaacgagaagcggaggaaagactcgagcaagcgaggcaacaagctagggaaagagccgaaaaggccgaaagagaggcgcaagcacgggaaagggcgagagccgaactgcaagcgcgggaaagggccgagcagatagagagagaaataagggcctattacggcgacacgctcaatggggcggtggcggccgtccaaaatttaaaacaatggtggagcatcgatttcgcgcctccaaaatccaatcaaacacctaaatatccgatgccggatgaggttttctcggagacgggctaccaaaaagacggcttcgttaagaataccgactatttgaagaaaatgacgggaaaaacaacggtcgattaccaaacatacttagatataagaaaagattacgcaagctcgccgactttttattttaacatggcaagctggttctacgcgtgcggggacaaggaaacggcgcttcgcgtacttacgtccatcgccgatcttgaactcgaaaacgcctcgctctatagattgctgggctataggctgaaggaattcggcgaatacgcgctcgaaaagttcgtctgcaaaaaggtggttctgtggcggcctatggaaccgcaaagctaccgcgactacgccctggccctcgccgacaacggggaggatcaggcagccctaaattggctctatggcctgctcacaaaaacctattcggcaaatatcagaagccgcagcggcgggatagaggaggtcgtggttatggaaataaaccggctgatcgccaaaaacgctaatctgaacacgtcaaaggtttataagcgcctgatagccaatatgcccgtcgacgttcgcgtggtgataaactggaatatgaacagcaccgacattgacctgtacgtaacagacccgaacaacgaagagtgctactaccgcaacagaaaaacgagcatcggcggacgtataagcgccgacaatacgaacggttacgggccggaacaattccttttgaagaaagcggtcaagggaaaataccggatctacgtaaattattacggcgaccgccaagttaccggcgccggcccgtcgaccgtcatggcggagatttacacaaaatacgccgataaaaccgagcgccgccaagtcgtatgtttgcaaatgtcaaacgcgaagacgattgactccaagtatgtggaggtggcgaattttgagttttga

SEQ ID NO: 67836 - protein, 1126 aa, Unknown
  Obtained from environmental sample
  misc_feature (1)..(1126): Xaa is any amino acid
MALEKDSLQYRLPLAYTDSLEKFAVKATVWKSNLKPVVPESESAEELRFDKVGENYAAALTREKYRPARALNFALPTPVDIPQVMMQSAQGSHYFLASVAPKMETRKKLWNNELAIIWDVSLSGSQRDLKREMDLLNIIFTDKKNADVHLYFLNNRFKKIANKGTGNGEYKVTNGKWDELKSVLEKAAFDGGTDFSQINADDITGNEILLFSDGISTLSDADFLKNTKASPPIHCVVSSAKADYSAMKLITGKTKGKFVNITALSPKNLKGELLNETLQFLGTEHGKSVREVYPSVATPVRGNFSVAGISDANDAEITLLFGFGNKVERRITVKLDAKSAGKQGNAYKIWAQKKIAELDLNYEKNRAELTGLGQQFGIVTRNTSLIVLETIDDYIRYNIEPPDELRAEYLRRMKDRGWGGQLGGAAKNKNEIDGLLEELMGGAAVSGEYSARSVNNNNDGGVLGTVLRQRPGSPVASADIFGKGGFATDIDAILSGVGGLKSGGDGGAGRKGTAGIGYGSGYGSGFGGGGGGVDDLLGGLMGGGSGGLELKKRGELRVSSPDFLHGGNLTGGRSRASIQRVVMQNMAALRYAYNKRLREKPGLCGKITIKFAIDEFGKVAFAMVMESTMNDSLLEQTVLARVKSWNFEKIDRPGDLTDVTYPFVFDDGGPCSNTTARPAQTNERADSAKQEQRTAAQASGKTDSFEDTMDRIEQQAKERAEREKVQREAEERLEQARQQARERAEKAEREAQARERARAELQARERAEQIEREIRAYYGDTLNGAVAAVQNLKQWWSIDFAPPKSNQTPKYPMPDEVFSETGYQKDGFVKNTDYLKKMTGKTTVDYQTYLDIRKDYASSPTFYFNMASWFYACGDKETALRVLTSIADLELENASLYRLLGYRLKEFGEYALEKFVCKKVVLWRPMEPQSYRDYALALADNGEDQAALNWLYGLLTKTYSANIRSRSGGIEEVVVMEINRLIAKNANLNTSKVYKRLIANMPVDVRVVINWNMNSTDIDLYVTDPNNEECYYRNRKTSIGGRISADNTNGYGPEQFLLKKAVKGKYRIYVNYYGDRQVTGAGPSTVMAEIYTKYADKTERRQVVCLQMSNAKTIDSKYVEVANFEF

SEQ ID NO: 67837 - DNA, 570 bp, Unknown
  Obtained from environmental sample
  misc_feature (1)..(570): n is a, c, g, or t
atgttttgcatgacgacacgctgtatactcgccctgcttctgccgccggtaaggttgccgccatgcaggaagtcgggcgaagagactctaagctcgcccctcttctttagttcgagaccgccgctgccgccgcccattaatccgcctaacaggtcgtccacccctccgccgcctccgccgaatccggaaccgtatcctgacccatacccgatgccggccgtgcctttacgccccgccccgccgtcgccgcccgatttgaggccgcccacgccggaaagtatcgcgtcgatgtctgtggcgaaaccgcccttaccgaaaatatcggccgacgctacggggctgcccggacgctgcctgagaacggtgccgagaacgccgccgtcgttattgttatttacgctcctggcggagtattcgccggacactgcggcgccgcccatcaattcttccaacaaaccgtctatctcgttcttattctttgcggcgccgcccaactgtccgccccatcccctgtccttcattctgcgcagatattccgcccgtaattcgtcgggcggttcaatgttgtag

SEQ ID NO: 67838 - protein, 189 aa, Unknown
  Obtained from environmental sample
  misc_feature (1)..(189): Xaa is any amino acid
MFCMTTRCILALLLPPVRLPPCRKSGEETLSSPLFFSSRPPLPPPINPPNRSSTPPPPPPNPEPYPDPYPMPAVPLRPAPPSPPDLRPPTPESIASMSVAKPPLPKISADATGLPGRCLRTVPRTPPSLLLFTLLAEYSPDTAAPPINSSNKPSISFLFFAAPPNCPPHPLSFILRRYSARNSSGGSML

SEQ ID NO: 67839 - DNA, 453 bp, Unknown
  Obtained from environmental sample
  misc_feature (1)..(453): n is a, c, g, or t
gtgacgcagatgaatcaggtaacacagcggaacgcggccagttccgaagagtcggccagcgcctccgaggagttgagcgctcaagccgcggaacttgcgaatttggtgcacactttcaagttaagctccggcggcgggtatcgtccggcggcgcctcaagggggcgattggcacagtcagcaaagtcagcacgggcacggcggcgggtatgtgcacggcggcggtatgccgtcgcttccgccggcaaaaccggcaaaggcggcgaaaccgccgttgacggcgccggctattcccaataggagagggggcgggatcccaagcttgtcgagcgtaagcgcggataacagccggcgcagtttgccgacgcctccggcgccggcggtgaagtcagcaagggcgataaagcctgaagagataataccattggacgacgacgatttgggcgaattttaa

SEQ ID NO: 67840 - protein, 150 aa, Unknown
  Obtained from environmental sample
  misc_feature (1)..(150): Xaa is any amino acid
MTQMNQVTQRNAASSEESASASEELSAQAAELANLVHTFKLSSGGGYRPAAPQGGDWHSQQSQHGHGGGYVHGGGMPSLPPAKPAKAAKPPLTAPAIPNRRGGGIPSLSSVSADNSRRSLPTPPAPAVKSARAIKPEEIIPLDDDDLGEF

SEQ ID NO: 67841 - DNA, 1974 bp, Unknown
  Obtained from environmental sample
  misc_feature (1)..(1974): n is a, c, g, or t
atgaagaatctaaaggtctcaatgaaattattggtaggtttcggcgttatggtcgcgttaatcgtgtccatcagtcttataagcgttttcaacctgctcaatattgataacacgtactctaatgtcattgtaagccacgccctgcctttgaacccggcgattaacgtcgtgggagaccttcaagccatgcgttccgaaacacgtaactgcgtcatatttaccggcaacaaggataaggtgcgggaggcgagaaaagcgctggacggcctcaccaaggagtttgaggacagcgccgcgtcgttcggcaagagcatcattaagccggaagtcaaggcgaagtatgacgaggctatgaaacaatatcacgaaatttttaagccgggcgtgtataaaattgccgaagaaggggaaaaagggacgccgagtgagaaaatgattgagcatttggccgagataaaacaagcgtcggatttggtgacggataatatggtatacgccacagacgttaaagcgggtcagttgttaagctcctcggaagactgtaccaaacagtccaggagcattgccgttatgatgatcgccgttctcgtagtcagcgtcgtcatcgccgtgattttcggcgtctataccagttccatcatcagcaaaccattgaccactaccgtaaatatgataaacgagatggctcgcgggcatttgggcatgagactgcaccttgaccgcaaagacgagatcggcgttatggccaaaacgatggattctttcgccgacgatatgcaaaatatcgtcataggcaccatgaagaaaatttcggaaggcgacctgagcacaaaaattgatttgaaagatcccaccgacgaggtcaactccgcgctcaagaacacgatagaggctttgcactctctcatcatagacgacggcggcaaggttcttcaggcggccgccggcaaggacctgtcgcagaggcttacacgcgaatacaagggcgattacgccaaaatgaaagataacataaacaccgtcgtgggcaacctcgaccattcaatgagccaggtgtcggaggccgtgtcgcaggtaacgaacgcgagcggcgaaatttcagacggcgcccagagtttggccgagggagccaacgaacaggcgagttcgctcgaagaggtgtcgtctagccttgaggagatgtcctcaatgacaaagcagaacgcggacaactccaatcaggcgaagatattggcgaccgaggccaaagaagccgccaacgagggcgacgcctccatgaagaggatggccgaggctatcaaagagatcaagacatcgtccgacaacaccgccaagattgtcaaatccatcgacgacatcgcattccagaccaacctcttggcgctcaacgcggctgtggaggcggccagagcgggcgaggccggcaagggcttcgcggtcgtggccgaggaggtgcgcaacctcgccatgcgcagcgccgacgcggctaagaacacggcgaacatgatagaggagtcggtgaagaacgccgacggcggcgtcaagatcacggaagaggtagccaagtcgctcagccaaattgtggaccgcgtaggcaaggtcggcgacctgatcgccgagatcgcggcggcctcaagcgagcaggctctgggtatagagcaggtgaaccaccgccgtgacgcagatgaatcaggtaacacagcggaacgcggccagttccgaagagtcggccagcgcctccgaggagttgagcgctcaagccgcggaacttgcgaatttggtgcacactttcaagttaagctccggcggcgggtatcgtccggcggcgcctcaagggggcgattggcacagtcagcaaagtcagcacgggcacggcggcgggtatgtgcacggcggcggtatgccgtcgcttccgccggcaaaaccggcaaaggcggcgaaaccgccgttgacggcgccggctattcccaatag

SEQ ID NO: 67842 - protein, 657 aa, Unknown
  Obtained from environmental sample
  DOMAIN (192)...(261): HAMP domain
  misc_feature (1)..(657): Xaa is any amino acid
MKNLKVSMKLLVGFGVMVALIVSISLISVFNLLNIDNTYSNVIVSHALPLNPAINVVGDLQAMRSETRNCVIFTGNKDKVREARKALDGLTKEFEDSAASFGKSIIKPEVKAKYDEAMKQYHEIFKPGVYKIAEEGEKGTPSEKMIEHLAEIKQASDLVTDNMVYATDVKAGQLLSSSEDCTKQSRSIAVMMIAVLVVSVVIAVIFGVYTSSIISKPLTTTVNMINEMARGHLGMRLHLDRKDEIGVMAKTMDSFADDMQNIVIGTMKKISEGDLSTKIDLKDPTDEVNSALKNTIEALHSLIIDDGGKVLQAAAGKDLSQRLTREYKGDYAKMKDNINTVVGNLDHSMSQVSEAVSQVTNASGEISDGAQSLAEGANEQASSLEEVSSSLEEMSSMTKQNADNSNQAKILATEAKEAANEGDASMKRMAEAIKEIKTSSDNTAKIVKSIDDIAFQTNLLALNAAVEAARAGEAGKGFAVVAEEVRNLAMRSADAAKNTANMIEESVKNADGGVKITEEVAKSLSQIVDRVGKVGDLIAEIAAASSEQALGIEQVNHRRDADESGNTAERGQFRRVGQRLRGVERSSRGTCEFGAHFQVKLRRRVSSGGASRGRLAQSAKSARARRRVCARRRYAVASAGKTGKGGETAVDGAGYSQ

SEQ ID NO: 67843 - DNA, 483 bp, Unknown
  Obtained from environmental sample
  misc_feature (1)..(483): n is a, c, g, or t
gtgttacctgattcatctgcgtcacggcggtggttcacctgctctatacccagagcctgctcgcttgaggccgccgcgatctcggcgatcaggtcgccgaccttgcctacgcggtccacaatttggctgagcgacttggctacctcttccgtgatcttgacgccgccgtcggcgttcttcaccgactcctctatcatgttcgccgtgttcttagccgcgtcggcgctgcgcatggcgaggttgcgcacctcctcggccacgaccgcgaagcccttgccggcctcgcccgctctggccgcctccacagccgcgttgagcgccaagaggttggtctggaatgcgatgtcgtcgatggatttgacaatcttggcggtgttgtcggacgatgtcttgatctctttgatagcctcggccatcctcttcatggaggcgtcgccctcgttggcggcttctttggcctcggtcgccaatatcttcgcctga

SEQ ID NO: 67844 - protein, 160 aa, Unknown
  Obtained from environmental sample
  misc_feature (1)..(160): Xaa is any amino acid
MLPDSSASRRWFTCSIPRACSLEAAAISAIRSPTLPTRSTIWLSDLATSSVILTPPSAFFTDSSIMFAVFLAASALRMARLRTSSATTAKPLPASPALAASTAALSAKRLVWNAMSSMDLTILAVLSDDVLISLIASAILFMEASPSLAASLASVANIFA

SEQ ID NO: 67845 - DNA, 393 bp, Unknown
  Obtained from environmental sample
  misc_feature (1)..(393): n is a, c, g, or t
ttggctgagcgacttggctacctcttccgtgatcttgacgccgccgtcggcgttcttcaccgactcctctatcatgttcgccgtgttcttagccgcgtcggcgctgcgcatggcgaggttgcgcacctcctcggccacgaccgcgaagcccttgccggcctcgcccgctctggccgcctccacagccgcgttgagcgccaagaggttggtctggaatgcgatgtcgtcgatggatttgacaatcttggcggtgttgtcggacgatgtcttgatctctttgatagcctcggccatcctcttcatggaggcgtcgccctcgttggcggcttctttggcctcggtcgccaatatcttcgcctgattggagttgtccgcgttctgctttgtcattga

SEQ ID NO: 67846 - protein, 130 aa, Unknown
  Obtained from environmental sample
  misc_feature (1)..(130): Xaa is any amino acid
MAERLGYLFRDLDAAVGVLHRLLYHVRRVLSRVGAAHGEVAHLLGHDREALAGLARSGRLHSRVERQEVGLECDVVDGFDNLGGVVGRCLDLFDSLGHPLHGGVALVGGFFGLGRQYLRLIGVVRVLLCH

SEQ ID NO: 67847 - DNA, 414 bp, Unknown
  Obtained from environmental sample
  misc_feature (1)..(414): n is a, c, g, or t
gtggccgaggcgctcagccagatcgtagaccgcgcgggcaaggtgggcgacctgatcgccgagatcgcggcggcctccaacgagcaggcgcttggcatagagcaggtgaacaccgccgtggcgtccatgaaccaagtcacccagcagaacgcggccaactccgaagagtcggcgagcgcctccgaggagctctccagccaagcggcggagctcgctaacatggtgaacgagtttaaactgagcaccagcggcggtatgggtgtaaggcgcagtctgccgccgccgagaccgcagcagcaacggcccgtcgtcgcggcccttcccaacaaatcggcgggagcgggcaaatccgccaaaacggtgacttcgtcggaggtcattccgttagacgacgatgatttgggcgaattttaa

SEQ ID NO: 67848 - protein, 137 aa, Unknown
  Obtained from environmental sample
  misc_feature (1)..(137): Xaa is any amino acid
MAEALSQIVDRAGKVGDLIAEIAAASNEQALGIEQVNTAVASMNQVTQQNAANSEESASASEELSSQAAELANMVNEFKLSTSGGMGVRRSLPPPRPQQQRPVVAALPNKSAGAGKSAKTVTSSEVIPLDDDDLGEF

SEQ ID NO: 67849 - DNA, 768 bp, Unknown
  Obtained from environmental sample
  misc_feature (1)..(768): n is a, c, g, or t
ttggttttctttccgctttgtccgcggcatggtttgcgtcgcgaaaagccgctaaaatacaaccggcggaggtgctgcgttatgagtaatattcttgtaaggactcaagacatagttaaaaattatttatccggtgcggagacccttcatatattaaaaggaataaacctcgagatagaggaaggaacctccctgtctataacgggacagagcggaagcggcaaaagcaccctgcttaacattttaggcggccttgaccgcgccgacggcggaagcgtctttatcggcgatgatgaaattacgtctctctcggaaaaggaaatgtccgtattcagatcaaaaaaagtgggctttatttttcagtttcattacctgcttaaagattttaccgctcttgaaaacattatgattcccgcctacatagccggattgaaaaaaaaggacgcgcttgactgggcaagaatactgcttgccgacgtaaaccttgaagaacgcggcagtcatttcccgtcccagctttccggcggagaacgccagcgcgtagctgtcgcaagatcaatggtaaacgatccggcgttaatccttgcggacgaaccgacgggcaacttagaccccgcgaacagcgacattgtctcggaactgctctatgccgccgcgcaaaagaggggcaaaaccttaattgtcgtaacccatgacgaaaaagcggcggcaagggcttctgtccgccttgtccttgaaaacgggcagttgcaggggcatacactttga

SEQ ID NO: 67850 - protein, 255 aa, Unknown
  Obtained from environmental sample
  DOMAIN (27)...(251): RecF/RecN/SMC N terminal domain
  misc_feature (1)..(255): Xaa is any amino acid
MVFFPLCPRHGLRREKPLKYNRRRCCVMSNILVRTQDIVKNYLSGAETLHILKGINLEIEEGTSLSITGQSGSGKSTLLNILGGLDRADGGSVFIGDDEITSLSEKEMSVFRSKKVGFIFQFHYLLKDFTALENIMIPAYIAGLKKKDALDWARILLADVNLEERGSHFPSQLSGGERQRVAVARSMVNDPALILADEPTGNLDPANSDIVSELLYAAAQKRGKTLIVVTHDEKAAARASVRLVLENGQLQGHTL

SEQ ID NO: 67851 - DNA, 1311 bp, Unknown
  Obtained from environmental sample
  misc_feature (1)..(1311): n is a, c, g, or t
ttgaaaaacggatgggttttattcacggcattacgctatatttttaaaggcaggtcaaattcacccgttttggctgtgcttggaatcgctttcggcgttcttgccctgataataattatttcgataatgaacggttttcagcttggctttatcgaaagcattatagaaatctcatcatatcacctgcgtttggattccgttcctcccgaattaattccaagggcgcgggatatattaatgacggttccgggcgtaaaggcggcggttccttttaaggaatttcaggctcttgtaaagggaagaagggcggtacagcaggcggttttggcaagaggagttccggcggacgttcttgaatcggacaaattaatggaagaaaaactggagtttgaagaaggctcttttgacatttacagcccggactcggttttattgggaactgaacttgcaaggaggcttgggcttgacacgggagacagcgtaacattatattcgataacaggaattttatccgcgcaggaggacagcggtctggatgaatttacaataaagggaattttcaggacgggtttttatgaatacgactgcagttgggcgtttatcaatattgaaagcggcgcttttctggcggaggacaacggcgttaacaacggagtaagaataggcgtaaaaattaaaaaccgttttcaggacaggcttgttttggaacgcgttaagaaaagattttcaaaggaagaagattttaaggacgtaaaattttcaagctggcgggactataaccgttcttttttcggagcgcttagaaccgaaaaactttttatgtttatacttgtagggcttatttttattgtagtggcgcttaatatatttcaatcgcagagaagggcggtcttgcagcgccgggaggaaatcggtctgttacgcgccataggcggacaggagagggcggttcgttttgtttttgtcctggacggcgcgtttatagggcttacgggcgcgggtgtaggccttattttcggcctgttaatagcgtcccatattccccagtttttttcaatagtagaaatcattgtaaataatgttataggcctgcttaatactgtagccggtttttttggagcgcaaaaaaccgcaaatttcgccgttttctcgcctgccgttttttacattaaagaaattccttcaaggataatacccggggaagttatattaatattcatgtttggttttctttccgctttgtccgcggcatggtttgcgtcgcgaaaagccgctaaaatacaaccggcggaggtgctgcgttatgagtaa

SEQ ID NO: 67852 - protein, 436 aa, Unknown
  Obtained from environmental sample
  DOMAIN (218)...(429): Predicted permease
  misc_feature (1)..(436): Xaa is any amino acid
MKNGWVLFTALRYIFKGRSNSPVLAVLGIAFGVLALIIIISIMNGFQLGFIESIIEISSYHLRLDSVPPELIPRARDILMTVPGVKAAVPFKEFQALVKGRRAVQQAVLARGVPADVLESDKLMEEKLEFEEGSFDIYSPDSVLLGTELARRLGLDTGDSVTLYSITGILSAQEDSGLDEFTIKGIFRTGFYEYDCSWAFINIESGAFLAEDNGVNNGVRIGVKIKNRFQDRLVLERVKKRFSKEEDFKDVKFSSWRDYNRSFFGALRTEKLFMFILVGLIFIVVALNIFQSQRRAVLQRREEIGLLRAIGGQERAVRFVFVLDGAFIGLTGAGVGLIFGLLIASHIPQFFSIVEIIVNNVIGLLNTVAGFFGAQKTANFAVFSPAVFYIKEIPSRIIPGEVILIFMFGFLSALSAAWFASRKAAKIQPAEVLRYE

SEQ ID NO: 67853 - DNA, 1329 bp, Unknown
  Obtained from environmental sample
  misc_feature (1)..(1329): n is a, c, g, or t
atgaaatttaacagattgcatattctgtgtttaatatcgctgtttactttcgtttgttttaatatttacgctcagcctgtaacaaacgcgaaagacgattcgcaggcggcgcaacagtatgttcaatggatacaacaagcggttgacgagcaacgatgggatgaagctcttgccggagccacacgcgcaatggatttttacaacgtttcttccgatatcccataccttttggctgttgttcagttgcaatttaaaagtagtataaagcaaaagacggtagttgaaagtttaaataaagcaattgacgctaaccgttgggtaaagtacagcgaatataacgcgcagttgttaaaagcgcaaatgcttatctctatgcgcgaatatcaggacgctattgcctgtctggacaaagcggacgcggcaggctcccgcgccgattctgtaatgctgcgtcttcttgctttgcgcggaatggcggagggaaaagagcccggctatgattacgtttacgcgtcggcgcaatttagaagtcaaactctgcttgcaatggacaggttcccgcgtgatccgcgccccttacgtatattttttgaatatgcgcataacagaaaaccgcagccgtctgaattgccggagagcgatattaaccttcttgaactcgctcttaagcggcttccgttcttgcaggaagcagacccggaacttgcgtggatggcggctccgtttatgagaaatattgatgatgcccgaagaagcgccgccgcttatagatcgggaaatttatctaatgatgaaaattttaagcctaatccggcttccatacctgtggcgctcaatcttggacttattgatgataaaacggcaatagaagaagtgtttcccgcagttacggaaaatgaaccagccattaaaaaagatttaataatcgatacttacaaattgcttcgcagtgaggaagggcgcgattcatttacccgtaaactccttgttttttcaggctttataattaccgacgatgataacgacggttacatagaaaacaccgtgcattaccgaatgggatttatagattatttaattgataattttagtaataatattctcagctttaaagttgattttggaccggacaacgatccggaaaaagtttccgtttttatttcaaaaaatgattcttcgcgcgaacggaatttatcgcggcgtatcgatctgcaatgggagcgttatccttccgtaaaacaggctgaattggaaaatgaaacatttaaattcggtcccgtcttttttagttacgcgccaatcaattttatagaactggcggcaggataa

SEQ ID NO: 67854 - protein, 442 aa, Unknown
  Obtained from environmental sample
  SIGNAL (1)...(24)
  misc_feature (1)..(442): Xaa is any amino acid
MKFNRLHILCLISLFTFVCFNIYAQPVTNAKDDSQAAQQYVQWIQQAVDEQRWDEALAGATRAMDFYNVSSDIPYLLAVVQLQFKSSIKQKTVVESLNKAIDANRWVKYSEYNAQLLKAQMLISMREYQDAIACLDKADAAGSRADSVMLRLLALRGMAEGKEPGYDYVYASAQFRSQTLLAMDRFPRDPRPLRIFFEYAHNRKPQPSELPESDINLLELALKRLPFLQEADPELAWMAAPFMRNIDDARRSAAAYRSGNLSNDENFKPNPASIPVALNLGLIDDKTAIEEVFPAVTENEPAIKKDLIIDTYKLLRSEEGRDSFTRKLLVFSGFIITDDDNDGYIENTVHYRMGFIDYLIDNFSNNILSFKVDFGPDNDPEKVSVFISKNDSSRERNLSRRIDLQWERYPSVKQAELENETFKFGPVFFSYAPINFIELAAG

SEQ ID NO: 67855 - DNA, 879 bp, Unknown
  Obtained from environmental sample
  misc_feature (1)..(879): n is a, c, g, or t
ttgtccggtcgctttgaccgccaggtgattgtcgcgatgccagacataaaggaacgcgaggctattttacaaatccacgccgcaaaaattcctctggataaggaaattgatcttgcgcgcatcgcaagagcgacgccgggaatgagcggcgcggatatagcgaaccttgtaaacgaagcggctttgtttgccgcgcgaaaagacagacccgaagtgattatgcatgactttgaagaagccagagacaaagtgcttatgggcgtcgcgcggacaacccttgtagtttccgacaaagaacggcgtatgaccgccattcacgaggcggggcacgcgatactgcactattttcttaagaacgcagacccattgcataaagttacgattgttccacacggacgggcgctaggagctgcgctttccctccccgaagaagacagttacagccgttccaagggctggatagaggatcgcatcgccatctgctacggcggctggttagcggaaaatcttttttataacgagacaaccacaggaacaaagaacgacattcaacaggctaccgaaatggcgcgtaacatggtttgcgagtggggtatggcgaaagagcttggtcccattgcatacggtcaggaagacgaacctattttcctcggcaaagaaatagcgcgccacaaggattattcggaggataccgcacagcggatagacaaggcagtcaaagaaatacttgatcgcgcaagaaacaacgcgttaaaaataattgaagaacataaagctcagcttgaaaaacttgccgatgctcttcttgcgcgcgagacgcttatcgatgatgaagtgcgggaaattctcggtcttccgtcaaaaggggagtccgaatga

SEQ ID NO: 67856 - protein, 292 aa, Unknown
  Obtained from environmental sample
  DOMAIN (72)...(282): Peptidase family M41
  misc_feature (1)..(292): Xaa is any amino acid
MSGRFDRQVIVAMPDIKEREAILQIHAAKIPLDKEIDLARIARATPGMSGADIANLVNEAALFAARKDRPEVIMHDFEEARDKVLMGVARTTLVVSDKERRMTAIHEAGHAILHYFLKNADPLHKVTIVPHGRALGAALSLPEEDSYSRSKGWIEDRIAICYGGWLAENLFYNETTTGTKNDIQQATEMARNMVCEWGMAKELGPIAYGQEDEPIFLGKEIARHKDYSEDTAQRIDKAVKEILDRARNNALKIIEEHKAQLEKLADALLARETLIDDEVREILGLPSKGESE

SEQ ID NO: 67857 - DNA, 894 bp, Unknown
  Obtained from environmental sample
  misc_feature (1)..(894): n is a, c, g, or t
gtgacagacatttcaaatttttcccaatttatccgccatccactttttctgtccgagacagacgacggtgtttgttgtgaactttgccccaacaactgcataattaaaagcggcagttttggcgcgtgtggggtgaggggaaacaagggcggaaagggaatcattcccttttacgggttcatatccgcgcttgcccttgatccaatcgaaaagaaacccctgtatcattttaaaccgcgcacaaaaatactctcacttggttttgccggttgcaatctccattgccctttttgccagaattggcatatctcccaaaatacggacatacagggaaaatggatgcagcctggcgaaataatttccgccgcgttaagacaggatactccttccatcgcttacacatactcggagcctcttattcatattgagtatattttagactgcatgatacttgcccgcaagcacggaattgccaatgtattggtaacgaacggctgtatcaaatcggaagccgccgccgaagttttaaaacttaccgacgccgccaacgtggacttaaaaactttttcgcaagaaacatacaaaaaaacactgaacggcgatttgcagactgtgcaggaatttatcgcgctctgccacaagacgggcgttcatgttgaagttaccactcttgtcgtgcctgacttaaatgactcaagcgacgaactcagcaaagcggcggattttatcgcatccgtaagcaaagaaatcccttggcacttgactgcctatcaccccgattaccgctggaacgctccgcctacggacagggattttcttttaaacgccgccaaagaagcgggaaaaaaattgacgtttgtgcatacggggaatatcggtattatgcctatataa

SEQ ID NO: 67858 - protein, 297 aa, Unknown
  Obtained from environmental sample
  DOMAIN (85)...(240): Radical SAM superfamily
  misc_feature (1)..(297): Xaa is any amino acid
MTDISNFSQFIRHPLFLSETDDGVCCELCPNNCIIKSGSFGACGVRGNKGGKGIIPFYGFISALALDPIEKKPLYHFKPRTKILSLGFAGCNLHCPFCQNWHISQNTDIQGKWMQPGEIISAALRQDTPSIAYTYSEPLIHIEYILDCMILARKHGIANVLVTNGCIKSEAAAEVLKLTDAANVDLKTFSQETYKKTLNGDLQTVQEFIALCHKTGVHVEVTTLVVPDLNDSSDELSKAADFIASVSKEIPWHLTAYHPDYRWNAPPTDRDFLLNAAKEAGKKLTFVHTGNIGIMPI

SEQ ID NO: 67859 - DNA, 876 bp, Unknown
  Obtained from environmental sample
  misc_feature (1)..(876): n is a, c, g, or t
atggtcttctccctatactctaatataaatgataaattattgaataacaagaataattttactacaattagacaggagcaagatttggataagtgggcatttttctttcagggtgattctttgcttttaccggttgatactcaagattctcaaattaacagcggacttttacttgaattgtcaaaaaaattaaaaaataccgatatttttgaaatacccgaattggacggctctcccgacttaattaccgtagtgtccgtccccacgactgatgttccgcctgaagattggaaaattatccccgtccgcagtattatttccatgttcagcgtatcggagcaaaacgtcaaccgtattatccgcgcctgccatatcgcgcagtggagacgagattcccgtttctgcggaacctgcggcgctaaaaacgacgatgttcccatgcaggcgcagagaatctgtcctgagtgcggacggatggagttcccaagaatctgccccgccgttatcactcttattaccgatgatgaaaacagaatccttcttgcacataacaaaagattcaaagccggagtctacagtcatatttccggttttaacgaagcgggagaaacactggaagaaaccgtaattagggaaatccgtgaagaagtaagcatcgaaataaaagacattgtttatattaaatcccaaccgtggcctttcccccactcactgatggtcggttttaaagcgcgttattcatcaggattaattaaacccgacggagaagaaatagaagacgcaaaatggttcaccaaagacaaccttcctgttttaccagccgaaggctctttatcacgctatctaatcaataattggattaatcaaattttttaa

SEQ ID NO: 67860 - protein, 291 aa, Unknown
  Obtained from environmental sample
  DOMAIN (164)...(285): NUDIX domain
  misc_feature (1)..(291): Xaa is any amino acid
MVFSLYSNINDKLLNNKNNFTTIRQEQDLDKWAFFFQGDSLLLPVDTQDSQINSGLLLELSKKLKNTDIFEIPELDGSPDLITVVSVPTTDVPPEDWKIIPVRSIISMFSVSEQNVNRIIRACHIAQWRRDSRFCGTCGAKNDDVPMQAQRICPECGRMEFPRICPAVITLITDDENRILLAHNKRFKAGVYSHISGFNEAGETLEETVIREIREEVSIEIKDIVYIKSQPWPFPHSLMVGFKARYSSGLIKPDGEEIEDAKWFTKDNLPVLPAEGSLSRYLINNWINQIF

SEQ ID NO: 67861 - DNA, 483 bp, Unknown
  Obtained from environmental sample
  misc_feature (1)..(483): n is a, c, g, or t
gtgaatatagatttgacactggaacttgtagcaaaagtttacaatataaataaggggtgtaatcagaagatattgagtaaatgcaaaacgcttgagaattacagtcggtttattgacaaaatacgtgagtatcaaaaggaatatcaacttaagaatcacgggaaagatgacaggaaaaaattacttgataaagcgtataggtctgcgataaaatattgtataaagaagaatatcctgaaggattttttaataaaacatagttcggaggtattgaatatgctgtatgctgaatatgatccggaagtagaatttagggttgtcagagaagaagctcttgaagaaggcgaagaaataggcatagaaaaaggtatagaaaaagagaaattaatcatcgcgaaaaatttgctttcagaaggttcaacaattgaatttgtacatcgtattacagggctgtcttttgagaaaattaaagagttatattga

SEQ ID NO: 67862 - protein, 160 aa, Unknown
  Obtained from environmental sample
  misc_feature (1)..(160): Xaa is any amino acid
MNIDLTLELVAKVYNINKGCNQKILSKCKTLENYSRFIDKIREYQKEYQLKNHGKDDRKKLLDKAYRSAIKYCIKKNILKDFLIKHSSEVLNMLYAEYDPEVEFRVVREEALEEGEEIGIEKGIEKEKLIIAKNLLSEGSTIEFVHRITGLSFEKIKELY

SEQ ID NO: 67863 - DNA, 519 bp, Unknown
  Obtained from environmental sample
  misc_feature (1)..(519): n is a, c, g, or t
atgagcggttacaaaagcaaaaaaatgccggacgggaaaacgtggatgacggagaatttgaactgcaaagttgcggatagcgagtgctatgataaaaatgaaagcaactgcaatacatacggcaggctttacacttgggaggcggcaaagaaagcctgttccggcggctggcatttgcccagcgatgatgaatgggaggcattggaggcagcggtaggaggttcatcaactgctggcaagcatttgaaggcaaaagaaggctggaatagttgcggtcctacaggttcaggcaaaagctattcgtgcgaggacacgcatggcttttccgcccttccgggtggcatcggcttttcggttggccgtttctacgatgtcggcagcgacggcttctggtggagttccacagagaacgatagcggcatcgcttgcggcaggagtatgagctaccactacgagcgcgtgtacaggatcgactacgctaagtactacttgtttagtgtccgttgcttgcaggactaa

SEQ ID NO: 67864 - protein, 172 aa, Unknown
  Obtained from environmental sample
  misc_feature (1)..(172): Xaa is any amino acid
MSGYKSKKMPDGKTWMTENLNCKVADSECYDKNESNCNTYGRLYTWEAAKKACSGGWHLPSDDEWEALEAAVGGSSTAGKHLKAKEGWNSCGPTGSGKSYSCEDTHGFSALPGGIGFSVGRFYDVGSDGFWWSSTENDSGIACGRSMSYHYERVYRIDYAKYYLFSVRCLQD

SEQ ID NO: 67865 - DNA, 339 bp, Unknown
  Obtained from environmental sample
  misc_feature (1)..(339): n is a, c, g, or t
atgcaatatgaagtaaaaacaatttccgtatttgaaagacaatttaagagacttgcaaaaaaatatccctcgcttaaagcggatttgaaaagtttgatttctgatttggaaaaagaaccttcaataggaactccgctaggaaaaaattgttttaaggttaggttgtctataacatcaaaaaataaaggtaaatctagtggagcaagggtgataacgcattttatcgttaatgagtcaaatgtttatttaatgtctatttatgataagtccgataaatctagtataacggataaagaattggtagaattgcttagagatttgtcaatggaattgcaataa

SEQ ID NO: 67866 - protein, 112 aa, Unknown
  Obtained from environmental sample
  misc_feature (1)..(112): Xaa is any amino acid
MQYEVKTISVFERQFKRLAKKYPSLKADLKSLISDLEKEPSIGTPLGKNCFKVRLSITSKNKGKSSGARVITHFIVNESNVYLMSIYDKSDKSSITDKELVELLRDLSMELQ

SEQ ID NO: 67867 - DNA, 783 bp, Unknown
  Obtained from environmental sample
  misc_feature (1)..(783): n is a, c, g, or t
atgcataagaagaaacttctcatcagtcagcggaattaccttcaaataagaaatgctccgcaaaacatccaaagtagatgcagcttttttctctggaatatctattatagctttcataacaataatatagaaaatatttttgccaccaaatctatttctattttaacctataaaatgtccacactcaaactcaccgccgccctagcctgcacattgctctgcgttgttgcctgcgaacaagaagaaggtaaattcaaagaccctcgcgataaaaaaatctacaagacaattaaaatcaacgggcagatttggttagcagaaaatttgaattatgaggcagacagctcagaatgttacaaaaacagcacagcttattgcgaaaaatatggtagattatatgagtgggaaacagctatgaaagcctgtccaaaaggatggcatttgccgagcggtgatgagtggtatgaactggcgaaagcggttggcggtattgacacagcaagcaagtaccttaaagctactactggttggaatgattacaaagacggaaaatcaggcaacggcacggacgattacggtttttctgccttgccgggcggttttggcagtttggtggatgatgatttcaatatgaaagtcggctacggcggccactggtggagcagctcggaaatcaataaacttgatgcccatgctaggtacatatacaacgactttgaaaaagtatattacaacgaaggcgataagataggcatgtacagtgtccgttgcgtgcaagattag

SEQ ID NO: 67868 - protein, 260 aa, Unknown
  Obtained from environmental sample
  misc_feature (1)..(260): Xaa is any amino acid
MHKKKLLISQRNYLQIRNAPQNIQSRCSFFLWNIYYSFHNNNIENIFATKSISILTYKMSTLKLTAALACTLLCVVACEQEEGKFKDPRDKKIYKTIKINGQIWLAENLNYEADSSECYKNSTAYCEKYGRLYEWETAMKACPKGWHLPSGDEWYELAKAVGGIDTASKYLKATTGWNDYKDGKSGNGTDDYGFSALPGGFGSLVDDDFNMKVGYGGHWWSSSEINKLDAHARYIYNDFEKVYYNEGDKIGMYSVRCVQD

SEQ ID NO: 67869 - DNA, 324 bp, Unknown
  Obtained from environmental sample
  misc_feature (1)..(324): n is a, c, g, or t
ttggatattcaacgaatactgatttccttgccgggaattatcataggttttaccattcatgagtattgccatgccgcggcagcatataagctgggtgatattaccgctaaagaagacgggagattaacttttaatccattcaggcatatagacattctcggccttatttttatcatttttgccggctttggatgggctaaacccgtgcggtttaatccggacaagctgaaaaatccaaaaagagacaaggcgattatcgcggccgccggacctttttcaaatttaaggcgcgaaagctttagcctgagcagtgggcgtaagtga

SEQ ID NO: 67870 - protein, 107 aa, Unknown
  Obtained from environmental sample
  misc_feature (1)..(107): Xaa is any amino acid
MDIQRILISLPGIIIGFTIHEYCHAAAAYKLGDITAKEDGRLTFNPFRHIDILGLIFIIFAGFGWAKPVRFNPDKLKNPKRDKAIIAAAGPFSNLRRESFSLSSGRK

SEQ ID NO: 67871 - DNA, 618 bp, Unknown
  Obtained from environmental sample
  misc_feature (1)..(618): n is a, c, g, or t
ttgtccggcggattcagcgccggggatgagcctgacggcagcggtaaattcatcgccaatgtgctgcgctccccgattattgccgatgctgttaacaatttactggaaaaccgggacgggcttatcctggggatttgcaacggtttccaggccttgatcaaactggggctggttccatacggcgcttaccgcagggcggaagcgtcaatgcccacccttacctttaaccgcgttggccgccatgtttcccgcatggttcgcacgcttgtaatgccggcttcttccccctggcttgcgctggaaaaaccgggcgtcgttcatgtgctgccggtaagccacggcgagggacgtctcgttatcaacaaagcggaaggggaagcgttgttcaaaaacgcgcaggttccattttgttatgccgacgagaatggccggccaaccatgcgggagccggacaaccccaacggatcggattttgccattgaggggctgtgcagtcccgacggcagaatactcggcaagatggcgcattcggaacgccggggtgaatacgtccacattaatatacccggcgataaaaggcagactatttttgaagccggggtccggtattttaattaa

SEQ ID NO: 67872 - protein, 205 aa, Unknown
  Obtained from environmental sample
  misc_feature (1)..(205): Xaa is any amino acid
MSGGFSAGDEPDGSGKFIANVLRSPIIADAVNNLLENRDGLILGICNGFQALIKLGLVPYGAYRRAEASMPTLTFNRVGRHVSRMVRTLVMPASSPWLALEKPGVVHVLPVSHGEGRLVINKAEGEALFKNAQVPFCYADENGRPTMREPDNPNGSDFAIEGLCSPDGRILGKMAHSERRGEYVHINIPGDKRQTIFEAGVRYFN

SEQ ID NO: 67873 - DNA, 1695 bp, Unknown
  Obtained from environmental sample
  misc_feature (1)..(1695): n is a, c, g, or t
atgacagattggccgaggnattcagaatcgcaggagcgcatggccgttgtagtcgcgcaaaaggacgcaaatgaatttatcaattttgccgctgccgagaatcttgacgccgtagtgatcgcatcaatcacagaagacggcgatggcgcttcccttaaaatgaaatggcggggaaaaaccatcgttgacctttcaagaaaattccttgacacgaacggagctccccgttcggcgcaagccttgcttacagcggctttgggaggcgatgatgcgaatgaagcccttccgggaatttccgacggagcggaaaatgtccatcccgttgttttgcttgactgcctggaaagggaattgatgtcgctgcgtacgggcagccgccgcggtttgcaggaacgttttgacggatccataggctcggcctcggttctttttccatggggaggcgcgtatcagggaacgccggaatgcggtatggcggctcttcttccttcgctggacaaacagagcagaactgcgagcatattatgcttcggctatgatccctttttaatggaacggaacccttatgacggggcaaagggcggcatacgcgaggctctggcaaagtacgcctgtcttggcggcgatttccgcaaggcgcgtttgagtttgcaggaatattttcagcggcccctgtcgcccgaatcctggggcttgccggcttccgcccttcttggcgctcttgaggcgcagattgccctggggattccggccataggcggcaaggactccatgtcgggcaattaccgcgacgcggccggcggcattgacataaccgtcccccctacccttgtcgcctttgccgcgggaatcgccccggcagcctccatccgttcaggcgcgcttagcggcgaaaccggcaatgtcattgtccttctcgcccaggcggaatcgttcccatttaaaaccgccaatccggcttgtaacgaatgggacattttcaaagccaacatggacgcgcttgcctcgttaggcgcaattggctgcgtccgttccgcgtatcctgttgtctctggcggagtcgcaacaagcctcgcgctgacggcctttggcaatagcgccgggctggaaatgaaatcccgcgctttcaccattatcgacggatcatcttaccagggctctgtgttagttgaaattgacggcgcggctttcagggataatccccgcgttggcgaaattctgggtggaaccggctgctgggaaattgccgcctttaccattgaggaaccggtctttcgcgtaacaaaagaaaccgacgatgaaatgcaaatcgcggaagtccccctggaggtcttgcgccgcgcttatgagtatccattgacgaaagtgtatccacagatagggactggggaacagggactggggactggggaaggaacaattaggaatgaggaattaggaattaggaataaggaacaacaatcttcactctttattcctcattcctcactcctaattcctaattctttattaactccccactccctagctactcccttagtgttactgccggtattccccggtaccaactgtgaatgggacatggaaagggctttccgtgaggcgggggcgaggacaaggatcgtgattttcagggaaccggaacagggaggatattgcggagtcaaaacaagagcttgcgcgggcaatcgctga

SEQ ID NO: 67874 - protein, 564 aa, Unknown
  Obtained from environmental sample
  misc_feature (1)..(564): Xaa is any amino acid
MTDWPRXSESQERMAVVVAQKDANEFINFAAAENLDAVVIASITEDGDGASLKMKWRGKTIVDLSRKFLDTNGAPRSAQALLTAALGGDDANEALPGISDGAENVHPVVLLDCLERELMSLRTGSRRGLQERFDGSIGSASVLFPWGGAYQGTPECGMAALLPSLDKQSRTASILCFGYDPFLMERNPYDGAKGGIREALAKYACLGGDFRKARLSLQEYFQRPLSPESWGLPASALLGALEAQIALGIPAIGGKDSMSGNYRDAAGGIDITVPPTLVAFAAGIAPAASIRSGALSGETGNVIVLLAQAESFPFKTANPACNEWDIFKANMDALASLGAIGCVRSAYPVVSGGVATSLALTAFGNSAGLEMKSRAFTIIDGSSYQGSVLVEIDGAAFRDNPRVGEILGGTGCWEIAAFTIEEPVFRVTKETDDEMQIAEVPLEVLRRAYEYPLTKVYPQIGTGEQGLGTGEGTIRNEELGIRNKEQQSSLFIPHSSLLIPNSLLTPHSLATPLVLLPVFPGTNCEWDMERAFREAGARTRIVIFREPEQGGYCGVKTRACAGNR

SEQ ID NO: 67875 - DNA, 975 bp, Unknown
  Obtained from environmental sample
  misc_feature (1)..(975): n is a, c, g, or t
ttggcagctcccccctctataatgtatattattaacgggcagcgggccaatttacccagaaaaggatcgcatcaaatgtcggaagatctaaacgccgggccgaaagtaaaccgcgagttcaaaaactccgtcttcacgctcctgttcaacgaagtggaagccatccgcgatattgccggcgcggtcggcgctatgttaggtaaggaaatcaatcccgatacgcctataaaaaagaccactctccaaaacgcgctgttaggcggcaagctcaacgacctgtcgtttgtattggacgacaagctcatcgtcttaatcgagcaccaatcgacaatcaataaaaatatgccgttgcgtatgctgcactatatcagcgaaatatacaatcgcttatacgacaagaaagatttgtacaagagagagaagatatctatccccaaaccggtattcatcgtcctctacaacggtgaggaagatataaaggattttgaagaatacctgttatccgatttattcaaagactttgacatatcaaaagaaccgccatgtttggaattgagagtacaggtacgcaatatcaacaaaggccacagcgcggaaatcgtaaagcaaagcccgctgctccgtgattacgtggcgtttgtcgaagaggtgcgcgaagccaacagagaagagggggcaagccccgaactggcgatggaaaaggctgtggaaaactgtataaaaaaaggaatattaacaatttttttaacccgtcataaagaggaggttataaaaatgctcgtcgcagaatgggattacgaactagacttggaagtcgcaaaagaggaagctcacgaaaaaggcctatcacaaggccgagacgaagaacggcgtaaaaacattaaggacttgtaccggataggcgttggcattgagaccatcgctaaagccttcgacctctcggaaaggcaagtcaaggacattttgggcttgtag

SEQ ID NO: 67876 - protein, 324 aa, Unknown
  Obtained from environmental sample
  misc_feature (1)..(324): Xaa is any amino acid
MAAPPSIMYIINGQRANLPRKGSHQMSEDLNAGPKVNREFKNSVFTLLFNEVEAIRDIAGAVGAMLGKEINPDTPIKKTTLQNALLGGKLNDLSFVLDDKLIVLIEHQSTINKNMPLRMLHYISEIYNRLYDKKDLYKREKISIPKPVFIVLYNGEEDIKDFEEYLLSDLFKDFDISKEPPCLELRVQVRNINKGHSAEIVKQSPLLRDYVAFVEEVREANREEGASPELAMEKAVENCIKKGILTIFLTRHKEEVIKMLVAEWDYELDLEVAKEEAHEKGLSQGRDEERRKNIKDLYRIGVGIETIAKAFDLSERQVKDILGL

SEQ ID NO: 67877 - DNA, 1158 bp, Unknown
  Obtained from environmental sample
  misc_feature (1)..(1158): n is a, c, g, or t
gtgcaagctggcgtaatcgacgataccggaaagttcatagagaacgcgaccatccacccgcacgaaccgtacagggacagggagggcgcgcgggctgtcctgctcgcgcttatacagcgccacaaaccgcgcctgatagcggtggggaacggcacggccggacgcgagagcgacgagttcgtgcgctgggcgctgcgcgacgtccccgccgaagagcggccgctctgcgtagtggtcagcgaagccggagcaagcgtctacagcgcctcggacgtggccataaaggagttccccgacttagacataacggtaaggggcgctatctccatcgcccgacgcctgcaagacccgctgtctgaactcgtgaagatagaccccaagtccatcggcatcgggcagtaccagcacgacgtagaccaggcgcgcctcaaagagtcgctggacgaggtggtggagagctgcgtgaaccgcgtaggcgtggacgtcaatctggcgtcggaggaactgctgaagtacgtgtccggcctgaacaggctgacggcggcgaacatcgtagactataggaaccgaaacggagcgttttcgtgccgcgccgatttgaagaaggtgcccggcctcggcgataaaaaattccaaatggccgccggctttttgcgtatacccgaagccgataacccgctcgacaactcggccgtccaccctgagtcgtacggcatagtaaaaaagatggccgaacgcctcaatgtggacataggcggcctcatagggaatgcggcgctgctcaaaagcatagacaaaaacgaattcgtgacggaagaggccggcctgcccacgataaccgacatactggaggaactggagaaacccggacgcgaccccagagaagagttcaaatacgcgagattcgacgacagcgtgacggagatatcgcacctgcgcgaaggcatgattttagaaggagtggtgacaaacgtggccaacttcggcgccttcgtagacataggcgtccaccacgacggcctggtccacatatcggaactctcaaccacctacgtaatagaccccaaaaaattcgtcaaagccggccaagcggtgcgggtaagggtaatgaaagtcgacgcggaagcaaagagagtggcgctgtccatgaaactctga

SEQ ID NO: 67878 - protein, 385 aa, Unknown
  Obtained from environmental sample
  DOMAIN (311)...(384): S1 RNA binding domain
  misc_feature (1)..(385): Xaa is any amino acid
MQAGVIDDTGKFIENATIHPHEPYRDREGARAVLLALIQRHKPRLIAVGNGTAGRESDEFVRWALRDVPAEERPLCVVVSEAGASVYSASDVAIKEFPDLDITVRGAISIARRLQDPLSELVKIDPKSIGIGQYQHDVDQARLKESLDEVVESCVNRVGVDVNLASEELLKYVSGLNRLTAANIVDYRNRNGAFSCRADLKKVPGLGDKKFQMAAGFLRIPEADNPLDNSAVHPESYGIVKKMAERLNVDIGGLIGNAALLKSIDKNEFVTEEAGLPTITDILEELEKPGRDPREEFKYARFDDSVTEISHLREGMILEGVVTNVANFGAFVDIGVHHDGLVHISELSTTYVIDPKKFVKAGQAVRVRVMKVDAEAKRVALSMKL

SEQ ID NO: 67879 - DNA, 369 bp, Unknown
  Obtained from environmental sample
  misc_feature (1)..(369): n is a, c, g, or t
ttgtcgcgcgccggacgcgctgnngtggaaataggaatcgcgcgacaanggaagcccctttcaaaaacaatttttacgattatttacaaggaaaagggaactggtttcccgtgcataaaacgttgcgtaatcgaaggctggataatgaacaaggactacttccttgttcccgacggagcgcaggttttgcatatagatacaaggcaaaaatttatctttagcgtaaaatatgttccaaaaccgcggcttaaagttctttccgaggattttaaggcgcataactacaatgtgcgcggcgttaaggcgggaggaatcaggctttctacgaaagaagccgcgaatgtagaatgccgggagaaagttaaatga

SEQ ID NO: 67880 - protein, 122 aa, Unknown
  Obtained from environmental sample
  misc_feature (1)..(122): Xaa is any amino acid
MSRAGRAXVEIGIARQXKPLSKTIFTIIYKEKGTGFPCIKRCVIEGWIMNKDYFLVPDGAQVLHIDTRQKFIFSVKYVPKPRLKVLSEDFKAHNYNVRGVKAGGIRLSTKEAANVECREKVK

SEQ ID NO: 67881 - DNA, 1536 bp, Unknown
  Obtained from environmental sample
  misc_feature (1)..(1536): n is a, c, g, or t
ttggtggaaacaggcctgttatcttccatgacgcaggcgcaggaatatatccgaaacagggaccttggcaatgttgagtttggccgcacgatgaacgggcttatcacggtaatagtcaggcgggtctatcccgactccaaattagcgcttgccaatcttgatcttccgcagacttccaattacaaccgcattatcagagaagctgaaaagggcgaatatgtccatcccggggaaaattcaaccgatttttttgaatatgtgcttccgttcttcgcgattaacaacgatacaagccgcgagcttcttgccgcagctttgaaaaacctgacaaaagccggagagttaaagcctaattccatactgcctcccttcttttcaggatatatctatgaacgcatgaaccaatatcaggacgccgatgtatcttataaaagagcgtattcaatcagcaatgaattctaccccgccctgataggaacagcgcgcattatggcgcttaacggaaaaagagcggacgcagccgcccttttatcggatttaataatcagatatccggacagcttgaatataaagcgccagcttgccgttatctattatgacagcaaggattggtcacgcgccatgcctattatagatgaaattttacagaacgatccgcgtaacggtgatctcttgctgatgaaagcccatattctgatagagcagaataatttttcacaggcaaacgcgccgcttgatacttatgctccgattaaccccaacaacaggcagtatctttttctgcgcgccagattacangcggaaaggaaccataaccgcgattccgcgctgaatattctgcgctcgatcatccgcagcatcccaatgacgaagaagcgtaatttacgccgtagttttactcatgattcccagcgcgcctccgatcaggaagaaggcagggcgctccttgaccgcctgcggcaaatgtccggctcttcgatcacggtgctgagtttaagccttcgcgacgccatacggagggaaaactggaaagaggcgcaggggtatttgaacaagatacttcccgtccgccgcaccgatcaggatcttcaggacgcgtacaatacggaacgcggcttgaacaacaacgcaagagcgctcgccttcgcgcgtgaactgtatgaaaaggatacttctaaaaatgaatatgccgccgtttatatttcggcgttaattgacaacggcagaaaagaagaagcgtccagattattggaaagccgcattgccgccgcaagctcaggtgtcgacaaaggccggtatttttttcttcgaagccgcattcaaaccaatgaagaggcggcgctgggcgatcttcgttccagcctttttgaagacccgcgcaatcttgacgcgttaatcgccatgtttgaaatctaccaccgccgccgcgaagaacgccgcgcggttcactatctaaggcaggccctcgctctttctcccgacaacccgcgcttaaaacgctatgagtcggaatacgcggctttgttgaaaaattaa

SEQ ID NO: 67882 - protein, 511 aa, Unknown
  Obtained from environmental sample
  misc_feature (1)..(511): Xaa is any amino acid
MVETGLLSSMTQAQEYIRNRDLGNVEFGRTMNGLITVIVRRVYPDSKLALANLDLPQTSNYNRIIREAEKGEYVHPGENSTDFFEYVLPFFAINNDTSRELLAAALKNLTKAGELKPNSILPPFFSGYIYERMNQYQDADVSYKRAYSISNEFYPALIGTARIMALNGKRADAAALLSDLIIRYPDSLNIKRQLAVIYYDSKDWSRAMPIIDEILQNDPRNGDLLLMKAHILIEQNNFSQANAPLDTYAPINPNNRQYLFLRARLXAERNHNRDSALNILRSIIRSIPMTKKRNLRRSFTHDSQRASDQEEGRALLDRLRQMSGSSITVLSLSLRDAIRRENWKEAQGYLNKILPVRRTDQDLQDAYNTERGLNNNARALAFARELYEKDTSKNEYAAVYISALIDNGRKEEASRLLESRIAAASSGVDKGRYFFLRSRIQTNEEAALGDLRSSLFEDPRNLDALIAMFEIYHRRREERRAVHYLRQALALSPDNPRLKRYESEYAALLKN

SEQ ID NO: 67883 - DNA, 384 bp, Unknown
  Obtained from environmental sample
  misc_feature (1)..(384): n is a, c, g, or t
gtggcggaagaggtcagaaagctggccgagcgcagcgcgacgtccgccaaggagatcgcgcagcacaacatagaggcccgcacatcggtggagcacggcgaagagatggtcacaaccaccgtcgagctgctggagaagatccgcaccagcctagacaagttcgcggtgcagaccagagagtctgtgaaggccactggagagcaggccaagaccggcaccgaggtggcgaggcaggtggacaccagcgtcaacgaggcggcatcaatagcctcggccacgcaccagatgtcctccaccacgcaggaggtggcgcgcacatcctccgaactggccgccctcgcccaaggcctgcagcaccaaatgcggaggttcaaactgaattag

SEQ ID NO: 67884 - protein, 127 aa, Unknown
  Obtained from environmental sample
  misc_feature (1)..(127): Xaa is any amino acid
MAEEVRKLAERSATSAKEIAQHNIEARTSVEHGEEMVTTTVELLEKIRTSLDKFAVQTRESVKATGEQAKTGTEVARQVDTSVNEAASIASATHQMSSTTQEVARTSSELAALAQGLQHQMRRFKLN

SEQ ID NO: 67885 - DNA, 408 bp, Unknown
  Obtained from environmental sample
  misc_feature (1)..(408): n is a, c, g, or t
gtgcgtgcggttccgcgtggccggcggcatgtcgtccgtggagatggccggggtcctgggtcgccacccggacacggcgaagtccatccagagggagttcatagccaggggcgccgcggtcttccgcgacagaacaacggcgggcggcgaaaccagctgatgacggaggaggaggaggggcgcttcctggagggcttcgccaaggccgcaaaggacgcctcgatgctgacggccggcaggataaaggccgcgctgggggagaaggctgggcgggaggtgaacaagagcaccgtgtaccggatgctgcggcgccacaactggaggaaggtggtcccgcggcccaggcacccgaagcagagcaaggaggcagcggaggccttcaaaaaaagggcttcgcagatgcggtag

SEQ ID NO: 67886 - protein, 135 aa, Unknown
  Obtained from environmental sample
  misc_feature (1)..(135): Xaa is any amino acid
MRAVPRGRRHVVRGDGRGPGSPPGHGEVHPEGVHSQGRRGLPRQNNGGRRNQLMTEEEEGRFLEGFAKAAKDASMLTAGRIKAALGEKAGREVNKSTVYRMLRRHNWRKVVPRPRHPKQSKEAAEAFKKRASQMR

SEQ ID NO: 67887 - DNA, 348 bp, Unknown
  Obtained from environmental sample
  misc_feature (1)..(348): n is a, c, g, or t
ttgaatgctttgaaaatcggacgttcccaagtaaacacgataattcccagaaagaggaagatgcggctgaggacgatgttccaggacgaggccaggttcggccgcgtgagccgccccaggacctgctgggccccgcggccgggccgccccgaagtgtcgagccagatggtgcgcgagtttgtttataccaatttgcaatcaaaacgctctatgtgtagaatgtgtatttggaggttttcatggtcgcccaaatacagatgccaaagaaacggctcgccgagctggagagatacagggactccaagttcagcggccaggagttcaagcggttcctctgcctgtggatga

SEQ ID NO: 67888 - protein, 115 aa, Unknown
  Obtained from environmental sample
  misc_feature (1)..(115): Xaa is any amino acid
MNALKIGRSQVNTIIPRKRKMRLRTMFQDEARFGRVSRPRTCWAPRPGRPEVSSQMVREFVYTNLQSKRSMCRMCIWRFSWSPKYRCQRNGSPSWRDTGTPSSAARSSSGSSACG

SEQ ID NO: 67889 - DNA, 1113 bp, Unknown
  Obtained from environmental sample
  misc_feature (1)..(1113): n is a, c, g, or t
ttgtttataccaatttgcaatcaaaacgctctatgtgtagaatgtgtatttggaggttttcatggtcgcccaaatacagatgccaaagaaacggctcgccgagctggagagatacagggactccaagttcagcggccaggagttcaagcggttcctctgcctgtggatgagggcggagcaggggctgccgactacggcgatagcgacggccaccggcttccacgaggccaccgtcaggatcgtccagcgggacttcatagacaggggcatggacgccatcattggcgtcggcagcggcgggaggcgccgccagctcatggcgccggacgaggaggcggccttcctgaggggcttctacagagcggcccgcgacgcctcgctgctcaccgtcggggcggtcaaggcggccctggagaaaaagcttgggcggcaagtccaccagtccaccgtctaccggatgctggagcgcaacggctggaggaaggtggtcccgcgccccagccacccagagcagagcaaggaggcggtcgaggccttcaaaaagggggctacgcagaagcggtagccagggcgtgggcggaggccaggagcaggaaaatgccgctgcgggccatgttccaggacgaggccaggttcggccgcatgtcctcccccagggcctgctgggccccgagacgcgagcgccccagggccccgtcgcagatggtgcgggagttcgtctacgtgttcggcgcggtcagccccgccgacgggcggcacgacagccttgtgctgccgtacgccgacaccgaggccatgacgatgttcctgaaggaggtggccaggcggcaccgccgggaatacatattgatgttcatggaccaggccggctggcacaagtcgaatgggcttggggtgcccaggaacatggggctggcgtacctgccgccgcactcccccgagctgaacccgcaggagcaggtgtgggacgagctgagggggaagtttttcgggaacatggccttcaagagcatcgatgcggtgatggacaggctggtcgagggcctccggtgcatggaggcgtcccctgacgccctgaagagcctgacccaaaggggctggatgaaaaaataa

SEQ ID NO: 67890 - protein, 370 aa, Unknown
  Obtained from environmental sample
  misc_feature (1)..(370): Xaa is any amino acid
MFIPICNQNALCVECVFGGFHGRPNTDAKETARRAGEIQGLQVQRPGVQAVPLPVDEGGAGAADYGDSDGHRLPRGHRQDRPAGLHRQGHGRHHWRRQRREAPPAHGAGRGGGLPEGLLQSGPRRLAAHRRGGQGGPGEKAWAASPPVHRLPDAGAQRLEEGGPAPQPPRAEQGGGRGLQKGGYAEAVARAWAEARSRKMPLRAMFQDEARFGRMSSPRACWAPRRERPRAPSQMVREFVYVFGAVSPADGRHDSLVLPYADTEAMTMFLKEVARRHRREYILMFMDQAGWHKSNGLGVPRNMGLAYLPPHSPELNPQEQVWDELRGKFFGNMAFKSIDAVMDRLVEGLRCMEASPDALKSLTQRGWMKK

SEQ ID NO: 67891 - DNA, 522 bp, Unknown
  Obtained from environmental sample
  misc_feature (1)..(522): n is a, c, g, or t
gtgtatttggaggttttcatggtcgcccaaatacagatgccaaagaaacggctcgccgagctggagagatacagggactccaagttcagcggccaggagttcaagcggttcctctgcctgtggatgagggcggagcaggggctgccgactacggcgatagcgacggccaccggcttccacgaggccaccgtcaggatcgtccagcgggacttcatagacaggggcatggacgccatcattggcgtcggcagcggcgggaggcgccgccagctcatggcgccggacgaggaggcggccttcctgaggggcttctacagagcggcccgcgacgcctcgctgctcaccgtcggggcggtcaaggcggccctggagaaaaagcttgggcggcaagtccaccagtccaccgtctaccggatgctggagcgcaacggctggaggaaggtggtcccgcgccccagccacccagagcagagcaaggaggcggtcgaggccttcaaaaagggggctacgcagaagcggtag

SEQ ID NO: 67892 - protein, 173 aa, Unknown
  Obtained from environmental sample
  misc_feature (1)..(173): Xaa is any amino acid
MYLEVFMVAQIQMPKKRLAELERYRDSKFSGQEFKRFLCLWMRAEQGLPTTAIATATGFHEATVRIVQRDFIDRGMDAIIGVGSGGRRRQLMAPDEEAAFLRGFYRAARDASLLTVGAVKAALEKKLGRQVHQSTVYRMLERNGWRKVVPRPSHPEQSKEAVEAFKKGATQKR

SEQ ID NO: 67893 - DNA, 648 bp, Unknown
  Obtained from environmental sample
  misc_feature (1)..(648): n is a, c, g, or t
ttgggcggcaagtccaccagtccaccgtctaccggatgctggagcgcaacggctggaggaaggtggtcccgcgccccagccacccagagcagagcaaggaggcggtcgaggccttcaaaaagggggctacgcagaagcggtagccagggcgtgggcggaggccaggagcaggaaaatgccgctgcgggccatgttccaggacgaggccaggttcggccgcatgtcctcccccagggcctgctgggccccgagacgcgagcgccccagggccccgtcgcagatggtgcgggagttcgtctacgtgttcggcgcggtcagccccgccgacgggcggcacgacagccttgtgctgccgtacgccgacaccgaggccatgacgatgttcctgaaggaggtggccaggcggcaccgccgggaatacatattgatgttcatggaccaggccggctggcacaagtcgaatgggcttggggtgcccaggaacatggggctggcgtacctgccgccgcactcccccgagctgaacccgcaggagcaggtgtgggacgagctgagggggaagtttttcgggaacatggccttcaagagcatcgatgcggtgatggacaggctggtcgagggcctccggtgcatggaggcgtcccctga

SEQ ID NO: 67894 - protein, 215 aa, Unknown
  Obtained from environmental sample
  misc_feature (1)..(215): Xaa is any amino acid
MGGKSTSPPSTGCWSATAGGRWSRAPATQSRARRRSRPSKRGLRRSGSQGVGGGQEQENAAAGHVPGRGQVRPHVLPQGLLGPETRAPQGPVADGAGVRLRVRRGQPRRRAARQPCAAVRRHRGHDDVPEGGGQAAPPGIHIDVHGPGRLAQVEWAWGAQEHGAGVPAAALPRAEPAGAGVGRAEGEVFREHGLQEHRCGDGQAGRGPPVHGGVP

SEQ ID NO: 67895 - DNA, 1377 bp, Unknown
  Obtained from environmental sample
  misc_feature (1)..(1377): n is a, c, g, or t
atgaatttcgcaaagaagattttgtgtatcggcgccggctacgtcggcggacctactatggctgtaatcgccgccaagtgcccgcagtacaaggtcacggtggtggacgtcaacccagcccgcatagcggcttggaacagcgacgcgctgcccatctacgaacccggcctcttcgacgttgtgaaacaggcgcacgggcgcaacctcttcttctccaccgaaatcgacgccgctatcgacgaggccgagatcatattcgtctccgtcaacacgccgaccaagagttttggcgagggcgccggtaaagccgccgacctgcagtattgggagcgtaccgcccgtaatatcgtgaaggtttcccgtgggggacagatcataatagagaaaagcactttgccggtacggacggcggaggcaatgagcagcatcctcaacgccaacgagaagggcatccacttcgaggtgctctccaatccggagtttctcgcggagggtacggcgattgccgaccttaataatcccgaccgcgtgcttataggttcgcagctcacgcctgaaggaataaaggcgcgtgaacaggtcgtggagatatacgcaaattgggtgccgcgagagcgtatcgtcaccagcaacgtgtggagcgcggagttatcaaagctcgtggcaaacgcttttttagcgcagcgcatttcctccataaacagcatctccgaactttgcgaaaagaccgaggccgacgtgaccgaggtgtcgcggacgatagggatggacagtcgcatcggcagccgcttcttggtatcaagcgtgggcttcggcgggtcttgtttcaagaaggatattctcaatctggtatacatctgccgcagttacggactgaccgaggtggccgattactgggagagcgtggtggagatgaacgagcaccagaagcgccgcttcgtgaaaaatatgctcaaggctatgttcaacaccgtggctggcaagaggatatcgctcttcgggttcgccttcaaagccgacacgggcgacactagagagtcgccggctatagatatagccatgcaactcgtcaaagaacaagctaaggtggtaatatccgaccccaaagccattgacaacgcaaaaatcgacttagcgtcatgtattgacaatgtggaatttgtgaacgatccatacgacgccgccaaaggcgctcacgcaattgccgtaatgacggagtggaaagagtatcgggaacttgattacaaaaaaatatacgccggaatggagcgtccggcgtttatcttcgatgggaggaacgtgctacgccacaaggcgctgttcgagatggggttcaacgtctttccgctgggtcagccggcgttgaagcatttttag

SEQ ID NO: 67896 - protein, 458 aa, Unknown
  Obtained from environmental sample
  SIGNAL (1)...(21)
  DOMAIN (331)...(437): UDP-glucose/GDP-mannose dehydrogenase family, UDP binding domain
  misc_feature (1)..(458): Xaa is any amino acid
MNFAKKILCIGAGYVGGPTMAVIAAKCPQYKVTVVDVNPARIAAWNSDALPIYEPGLFDVVKQAHGRNLFFSTEIDAAIDEAEIIFVSVNTPTKSFGEGAGKAADLQYWERTARNIVKVSRGGQIIIEKSTLPVRTAEAMSSILNANEKGIHFEVLSNPEFLAEGTAIADLNNPDRVLIGSQLTPEGIKAREQVVEIYANWVPRERIVTSNVWSAELSKLVANAFLAQRISSINSISELCEKTEADVTEVSRTIGMDSRIGSRFLVSSVGFGGSCFKKDILNLVYICRSYGLTEVADYWESVVEMNEHQKRRFVKNMLKAMFNTVAGKRISLFGFAFKADTGDTRESPAIDIAMQLVKEQAKVVISDPKAIDNAKIDLASCIDNVEFVNDPYDAAKGAHAIAVMTEWKEYRELDYKKIYAGMERPAFIFDGRNVLRHKALFEMGFNVFPLGQPALKHF

SEQ ID NO: 67897 - DNA, 528 bp, Unknown
  Obtained from environmental sample
  misc_feature (1)..(528): n is a, c, g, or t
ttggtctcattcaaaaaggtagacgtgcgagaggcggcgcagcgcaaccttaaactgcgctacgacaaagacaccggatatctgggttacgaagtcaacggcaatctgctcttcgacgtatcgccctacgacagggtcttggtgataaggaagaccggcgcgttctcggtgataggcgtccccgaaaaactctttgtggacaaagggatgctccattgcgggtttgtggataaagacttggttttcaccgcgatttacagagatgaggagacgaaattcccgtacatcaaacggttcaaaatagagcagttccagttgaacaagggttacgcgatagtgcccgataattgcacgctgctccgattaacgacagaccccaacgcggtggtaacgatagaatacaaaccaaagcctcggcttaaagtattggaagaagacttcaaggtgaagaacttcttggtgaagggggtcaaagcggggggaattagactggcgaataaggagatgaagtcggtgaggatgggataa

SEQ ID NO: 67898 - protein, 175 aa, Unknown
  Obtained from environmental sample
  misc_feature (1)..(175): Xaa is any amino acid
MVSFKKVDVREAAQRNLKLRYDKDTGYLGYEVNGNLLFDVSPYDRVLVIRKTGAFSVIGVPEKLFVDKGMLHCGFVDKDLVFTAIYRDEETKFPYIKRFKIEQFQLNKGYAIVPDNCTLLRLTTDPNAVVTIEYKPKPRLKVLEEDFKVKNFLVKGVKAGGIRLANKEMKSVRMG

SEQ ID NO: 67899 - DNA, 1059 bp, Unknown
  Obtained from environmental sample
  misc_feature (1)..(1059): n is a, c, g, or t
atggaagcagtacaaacagccaatcaacccaattttgaatcggtttggatgatcttgcaggaaaacgctcaaggaatgaaagaattaagagaaatccaaaaagaatatgaacaggagaggaagaaagacaaagcggattttaatgaaaggcttgggaattatatcaatcttttcggcgatttcactgagtatacaatggcccccaaattgcgtgagaaatttatggaattgggacttgattttcccaaagcaaaccgaaattccagtgttaaggataaagttaataatatttatcttgaaactgacgttatgcttgaaaacgacgataaggctatgatggttgaaataaaatccaaacttactgttgaacgtataaacaaacatatagaacggcttgagaagatgcgaaaatacgccgatttgcatggtgataagcgtacttttttagggacggttgctggtgttgtagttgctgatgaagtaagagagtacgccttaaataaaggtctttatttaattgaactgccggaagagaacttaatattactccgccaaacggtcaaccaaaagaatggtaacggaacaacaacccttttgctagctcttgcctttatcgtaaggcttgcccgcagcccgcggcgcgtagtccttgccgctgaaaagaaccagggtgacaagcgtaatcaggtagggcatcatgttgaaaaattccgagggcaggaattgcaggccgctgatgttgataatgttgacggccagggcggaggacacgccgaacaggaagctggagccgagaatgcccaagggaacccagcggccaaaggacacagccgcgagcgcgataaatcctttcccgtttatcgtgctgacagtgtattggatgtcctgggtaaggactatgcagccgccggcaagcccggcgagaatgccggagatgagcacggctatgtagcgtatcctgatcacgttcacgccggccgatgcgagggcctggggatgctctcccgcggcgcgcagtctcaggccccaggggcgtttgtacagcatataccagcctaa

SEQ ID NO: 67900 - protein, 352 aa, Unknown
  Obtained from environmental sample
  misc_feature (1)..(352): Xaa is any amino acid
MEAVQTANQPNFESVWMILQENAQGMKELREIQKEYEQERKKDKADFNERLGNYINLFGDFTEYTMAPKLREKFMELGLDFPKANRNSSVKDKVNNIYLETDVMLENDDKAMMVEIKSKLTVERINKHIERLEKMRKYADLHGDKRTFLGTVAGVVVADEVREYALNKGLYLIELPEENLILLRQTVNQKNGNGTTTLLLALAFIVRLARSPRRVVLAAEKNQGDKRNQVGHHVEKFRGQELQAADVDNVDGQGGGHAEQEAGAENAQGNPAAKGHSRERDKSFPVYRADSVLDVLGKDYAAAGKPGENAGDEHGYVAYPDHVHAGRCEGLGMLSRGAQSQAPGAFVQHIPA

SEQ ID NO: 67901 - DNA, 483 bp, Unknown
  Obtained from environmental sample
  misc_feature (1)..(483): n is a, c, g, or t
ttgccctcgcgcttctggcgcttaggctggtatatgctgtacaaacgcccctggggcctgagactgcgcgccgcgggagagcatccccaggccctcgcatcggccggcgtgaacgtgatcaggatacgctacatagccgtgctcatctccggcattctcgccgggcttgccggcggctgcatagtccttacccaggacatccaatacactgtcagcacgataaacgggaaaggatttatcgcgctcgcggctgtgtcctttggccgctgggttcccttgggcattctcggctccagcttcctgttcggcgtgtcctccgccctggccgtcaacattatcaacatcagcggcctgcaattcctgccctcggaatttttcaacatgatgccctacctgattacgcttgtcaccctggttcttttcagcggcaaggactacgcgccgcgggctgcgggcaagccttacgataaaggcaagagctag

SEQ ID NO: 67902 - protein, 160 aa, Unknown
  Obtained from environmental sample
  misc_feature (1)..(160): Xaa is any amino acid
MPSRFWRLGWYMLYKRPWGLRLRAAGEHPQALASAGVNVIRIRYIAVLISGILAGLAGGCIVLTQDIQYTVSTINGKGFIALAAVSFGRWVPLGILGSSFLFGVSSALAVNIINISGLQFLPSEFFNMMPYLITLVTLVLFSGKDYAPRAAGKPYDKGKS

SEQ ID NO: 67903 - DNA, 954 bp, Unknown
  Obtained from environmental sample
  misc_feature (1)..(954): n is a, c, g, or t
gtggcagatgaaagaaaaaacaaaacgctcacagggcgaggagggaaaaaactaatggggttctttgaagttattttgcagatgttaccctccacttttatgatagtgtcgccgattcttatcgccgctataggcgggatgatctgcgagcgggccggcgttgttaacatcgcccttgaggggcttatgtccatgggcgcgatgaccgccgccgtgtgtcatgtccttctggaatcaaaaatcggcttttccataccaatggccctgctcatggcaatgacggtaggcgggctgttctcgcttatacacgcgttcgcctcaattacccttcgcgccgatcaggttgtttccggcaccggaataaacctccttgccaacggcgtaacggtatttgtctgccagcttttgttccagatggaccgcagccagaactaccgcatgggaatgagatccggcctgttcggcatataccctacgatatggcttgccctcgcgcttctggcgcttaggctggtatatgctgtacaaacgcccctggggcctgagactgcgcgccgcgggagagcatccccaggccctcgcatcggccggcgtgaacgtgatcaggatacgctacatagccgtgctcatctccggcattctcgccgggcttgccggcggctgcatagtccttacccaggacatccaatacactgtcagcacgataaacgggaaaggatttatcgcgctcgcggctgtgtcctttggccgctgggttcccttgggcattctcggctccagcttcctgttcggcgtgtcctccgccctggccgtcaacattatcaacatcagcggcctgcaattcctgccctcggaatttttcaacatgatgccctacctgattacgcttgtcaccctggttcttttcagcggcaaggactacgcgccgcgggctgcgggcaagccttacgataa

SEQ ID NO: 67904 - protein, 317 aa, Unknown
  Obtained from environmental sample
  misc_feature (1)..(317): Xaa is any amino acid
MADERKNKTLTGRGGKKLMGFFEVILQMLPSTFMIVSPILIAAIGGMICERAGVVNIALEGLMSMGAMTAAVCHVLLESKIGFSIPMALLMAMTVGGLFSLIHAFASITLRADQVVSGTGINLLANGVTVFVCQLLFQMDRSQNYRMGMRSGLFGIYPTIWLALALLALRLVYAVQTPLGPETARRGRASPGPRIGRRERDQDTLHSRAHLRHSRRACRRLHSPYPGHPIHCQHDKRERIYRARGCVLWPLGSLGHSRLQLPVRRVLRPGRQHYQHQRPAIPALGIFQHDALPDYACHPGSFQRQGLRAAGCGQALR

SEQ ID NO: 67905 - DNA, 999 bp, Unknown
  Obtained from environmental sample
  misc_feature (1)..(999): n is a, c, g, or t
atgtacaaggcgatattgcaggtaataagcggcctctccgaaaaccgcagtggggattggaactggaatccgcgctatatcggggaatggtttgtaagctcgattccgctgatcctctgcggcctgagtatgggattcgccgcccgtaccggcctttttaacatcggcgctgaagggcagtatatcgccggccttaccgcggcgcagctcgtcgcctgttactttccggcggttcccgtcctgcactgggtattggccgtgttaggcgcaattgccgcgggggccttatggggcggcattgtcggtttcttcaaggctcgattcaaagtttccgaggtagtcgccacgattatgatgaactacatcgccctttacgcccacaggatcatcaccctgaatataccgggaagcaatacctacaggacgccgaattttcctgacaccgccttactctccagcaccatacttgcgggcctgaccaacggttcgcggcttaactacagcctgtggtttaccctcatagcggttgttttttatttccttgtgatcgaaaaaacgacgctgggctattccctgcgcgccaccggactgaacagggacgccgcttcttacgggggcatcggcgtaaactccaatatcaccatagcgatggcgatagccggcgctttcgcgggccttgccggggcttcggtctcgttaggtgttttcaactacggcagggtattggcgggaatggaaaattacggctttgacggaatagcggtcgcgctcgtgggcaacagcaccgcgtggggaaccgccctcgccggccttttgttcggaatgttaaaatccgcccagccgcttatgcagagccggcagatacccaaggagatcacctcgataatcatggggcttgtggttgtgttcatctcgctgagggccggcgtcaagctgattattgagtggcagatgaaagaaaaaacaaaacgctcacagggcgaggagggaaaaaactaa

SEQ ID NO: 67906 - protein, 332 aa, Unknown
  Obtained from environmental sample
  DOMAIN (26)...(305): Branched-chain amino acid transport system / permease component
  misc_feature (1)..(332): Xaa is any amino acid
MYKAILQVISGLSENRSGDWNWNPRYIGEWFVSSIPLILCGLSMGFAARTGLFNIGAEGQYIAGLTAAQLVACYFPAVPVLHWVLAVLGAIAAGALWGGIVGFFKARFKVSEVVATIMMNYIALYAHRIITLNIPGSNTYRTPNFPDTALLSSTILAGLTNGSRLNYSLWFTLIAVVFYFLVIEKTTLGYSLRATGLNRDAASYGGIGVNSNITIAMAIAGAFAGLAGASVSLGVFNYGRVLAGMENYGFDGIAVALVGNSTAWGTALAGLLFGMLKSAQPLMQSRQIPKEITSIIMGLVVVFISLRAGVKLIIEWQMKEKTKRSQGEEGKN

SEQ ID NO: 67907 - DNA, 1437 bp, Unknown
  Obtained from environmental sample
  misc_feature (1)..(1437): n is a, c, g, or t
ttgatcgcgagggagatccgccctgctcggggaaacggcgcgggcaaatcgactttaatgtccatcctcttcggcctgtacgaaccgacttccggcattatcaaaataaggggcgaagaggtaaagatccgaagccccaacgacgccaccgccctgcatatcggcatggtgcaccagcatttcaagctggtgcataattttaccgtcaccgagaatatcgttctgggcatggagccgcatgacaagctggggaatctggatctcggcagcgcggaaaaacgggtcgcgcagttgtccgagacctacggccttgccgttgaccccgccgtgaaaattgaaaacatcaccgtgggaatgcagcagcgcgcggagattctcaagatactgtaccgcaacgcggatattctgatctttgacgagcctaccgcggtgctgaccccgcaggaaattgatgaactgctggccattttacggcgccttaaagcggaaggaaaaaccgtcctctttatcacccataaactgcgcgaaataaaagccgtcgccgaccgctgcactatcctcagacggggcaagtatattgacaccgtggatgtcgcgaaggttaacgaagccgaactcgccgaaaaaatggtgggcagggcggtcacattcaggatcgaaaaaaagccggcaaagcccggcgatattgtgcttaaaatcgaagaccttaccgttataggcgcgaagggaacgcccgcggtaagcggcctgtcgctggacgtgagggcaggcgaagttgtcggcatcgccggcgttgacggcaacggccagtcggaactggtcgaggcgatttccgggctgatgcccgtacactcgggcagggttctgctcaaaagccgcgatgtttccaaagacagcatcagaaagaggaacgaaaacgggctgggcctggttcccgaggacaggcacaagcacggcctggttctggattttcgcgtcgatgaaaatttgatccttaaaagttttcgcaaatcccagtactcaagcccctttggttttttaaagttcctgtttatagccaaacacgccgaaacgctgatcaccgattatgacatccgcgccggaaacgggcccgcgacaatggcaaaatcaatgtccggcggcaaccagcagaaggtgataatcgcccgcgaaattaacctttcccccgaattgcttatcgtatcgcagccgacgcgcggactggatgtcggagccattgagtacatacaccagcgcataatacaggaaagggacaagggccgcgccgttctgttggtgtcatttgaactggacgagatactcggcctctgcgacaggatcgtcgcgatttccaaggggcaggtggtgggcgtgcttcccgcggaggaagccgacgagaggcgtataggcgcgatgatgggcggcgtacacgcttga

SEQ ID NO: 67908 - protein, 478 aa, Unknown
  Obtained from environmental sample
  DOMAIN (257)...(453): ABC transporter
  misc_feature (1)..(478): Xaa is any amino acid
MIAREIRPARGNGAGKSTLMSILFGLYEPTSGIIKIRGEEVKIRSPNDATALHIGMVHQHFKLVHNFTVTENIVLGMEPHDKLGNLDLGSAEKRVAQLSETYGLAVDPAVKIENITVGMQQRAEILKILYRNADILIFDEPTAVLTPQEIDELLAILRRLKAEGKTVLFITHKLREIKAVADRCTILRRGKYIDTVDVAKVNEAELAEKMVGRAVTFRIEKKPAKPGDIVLKIEDLTVIGAKGTPAVSGLSLDVRAGEVVGIAGVDGNGQSELVEAISGLMPVHSGRVLLKSRDVSKDSIRKRNENGLGLVPEDRHKHGLVLDFRVDENLILKSFRKSQYSSPFGFLKFLFIAKHAETLITDYDIRAGNGPATMAKSMSGGNQQKVIIAREINLSPELLIVSQPTRGLDVGAIEYIHQRIIQERDKGRAVLLVSFELDEILGLCDRIVAISKGQVVGVLPAEEADERRIGAMMGGVHA

SEQ ID NO: 67909 - DNA, 780 bp, Unknown
  Obtained from environmental sample
  misc_feature (1)..(780): n is a, c, g, or t
gtgatcagcgtttcggcgtgtttggctataaacaggaactttaaaaaaccaaaggggcttgagtactgggatttgcgaaaacttttaaggatcaaattttcatcgacgcgaaaatccagaaccaggccgtgcttgtgcctgtcctcgggaaccaggcccagcccgttttcgttcctctttctgatgctgtctttggaaacatcgcggcttttgagcagaaccctgcccgagtgtacgggcatcagcccggaaatcgcctcgaccagttccgactggccgttgccgtcaacgccggcgatgccgacaacttcgcctgccctcacgtccagcgacaggccgcttaccgcgggcgttcccttcgcgcctataacggtaaggtcttcgattttaagcacaatatcgccgggctttgccggctttttttcgatcctgaatgtgaccgccctgcccaccattttttcggcgagttcggcttcgttaaccttcgcgacatccacggtgtcaatatacttgccccgtctgaggatagtgcagcggtcggcgacggcttttatttcgcgcagtttatgggtgataaagaggacggtttttccttccgctttaaggcgccgtaaaatggccagcagttcatcaatttcctgcggggtcagcaccgcggtaggctcgtcaaagatcagaatatccgcgttgcggtacagtatcttgagaatctccgcgcgctgctgcattcccacggtgatgttttcaattttcacggcggggtcaacggcaaggccgtag

SEQ ID NO: 67910 - protein, 259 aa, Unknown
  Obtained from environmental sample
  misc_feature (1)..(259): Xaa is any amino acid
MISVSACLAINRNFKKPKGLEYWDLRKLLRIKFSSTRKSRTRPCLCLSSGTRPSPFSFLFLMLSLETSRLLSRTLPECTGISPEIASTSSDWPLPSTPAMPTTSPALTSSDRPLTAGVPFAPITVRSSILSTISPGFAGFFSILNVTALPTIFSASSASLTFATSTVSIYLPRLRIVQRSATAFISRSLWVIKRTVFPSALRRRKMASSSSISCGVSTAVGSSKIRISALRYSILRISARCCIPTVMFSIFTAGSTARP

SEQ ID NO: 67911 - DNA, 486 bp, Unknown
  Obtained from environmental sample
  misc_feature (1)..(486): n is a, c, g, or t
gtgcttgtgcctgtcctcgggaaccaggcccagcccgttttcgttcctctttctgatgctgtctttggaaacatcgcggcttttgagcagaaccctgcccgagtgtacgggcatcagcccggaaatcgcctcgaccagttccgactggccgttgccgtcaacgccggcgatgccgacaacttcgcctgccctcacgtccagcgacaggccgcttaccgcgggcgttcccttcgcgcctataacggtaaggtcttcgattttaagcacaatatcgccgggctttgccggctttttttcgatcctgaatgtgaccgccctgcccaccattttttcggcgagttcggcttcgttaaccttcgcgacatccacggtgtcaatatacttgccccgtctgaggatagtgcagcggtcggcgacggcttttatttcgcgcagtttatgggtgataaagaggacggtttttccttccgctttaaggcgccgtaa

SEQ ID NO: 67912 - protein, 161 aa, Unknown
  Obtained from environmental sample
  misc_feature (1)..(161): Xaa is any amino acid
MLVPVLGNQAQPVFVPLSDAVFGNIAAFEQNPARVYGHQPGNRLDQFRLAVAVNAGDADNFACPHVQRQAAYRGRSLRAYNGKVFDFKHNIAGLCRLFFDPECDRPAHHFFGEFGFVNLRDIHGVNILAPSEDSAAVGDGFYFAQFMGDKEDGFSFRFKAP

SEQ ID NO: 67913 - DNA, 801 bp, Unknown
  Obtained from environmental sample
  misc_feature (1)..(801): n is a, c, g, or t
ttgcatggtattaacagtatcatggattattcaggagttaaagtattggtgatggggcttgggcttcacggcggaggactggaatcggcgcgttttttgcttaaacgaggagctgaagtttcagtcaccgatttaagagatgaaaaaaccttgtcgccgtcaattgaacgactggatactgcctgcggcgaattgggaggaaaacctgtacgctacattctaggcagacacgaaatagaggattttaaaaatgccgacattgtaataaaaaaccccggcgtaaggcctgattctccgtttttacaggcggctaaacagatagaaacagatatatcgctgtttttatccgaatcaaaggcaaggctttttgccgtaaccggttcaaaaggaaaatcatttacatcatcagcgcttaactttattttaaacagctgcggtaaatcttttcttggaggaaatattacagtttccccattgaattttccgcaggaaccgggggaaaacgacaatgttgttcttgagctttcaagttttcaactgggagatttaaaaggacgcaaggccgaagacggaagcgcgctgttaaaacccgcagcctcgatacttacctccattatgccggatcaccttgatcgttatgcgtcaatgaatgaatacgttgacgataaaagaaatatctacaggggacaggattcagagtgcattaccgttgcgggtgatgataaatggggaacaagttttttacgcgaaacaaaagcgcgtcccgcttgttattcacgctgtgaattgtcaaaaacgtaa

SEQ ID NO: 67914 - protein, 266 aa, Unknown
  Obtained from environmental sample
  DOMAIN (123)...(266): Mur ligase middle domain
  misc_feature (1)..(266): Xaa is any amino acid
MHGINSIMDYSGVKVLVMGLGLHGGGLESARFLLKRGAEVSVTDLRDEKTLSPSIERLDTACGELGGKPVRYILGRHEIEDFKNADIVIKNPGVRPDSPFLQAAKQIETDISLFLSESKARLFAVTGSKGKSFTSSALNFILNSCGKSFLGGNITVSPLNFPQEPGENDNVVLELSSFQLGDLKGRKAEDGSALLKPAASILTSIMPDHLDRYASMNEYVDDKRNIYRGQDSECITVAGDDKWGTSFLRETKARPACYSRCELSKT

SEQ ID NO: 67915 - DNA, 786 bp, Unknown
  Obtained from environmental sample
  misc_feature (1)..(786): n is a, c, g, or t
atgaatacgttgacgataaaagaaatatctacaggggacaggattcagagtgcattaccgttgcgggtgatgataaatggggaacaagttttttacgcgaaacaaaagcgcgtcccgcttgttattcacgctgtgaattgtcaaaaacgtaaacggcggctggctttccggcggcaaggttatgcgcgtctttgcgggttttcgggagtttcacatgaagttattgaacttgtgccgcagcgacttctggtttcaggagaacatcaaaaagttaatatgcttgcggcggctcttgcggcttacggctgcggagtaaaagcggaaaaaattctaaacgctttggctgattttaagggtattgagcatcgtcttgaattcttccatgaggcaaacggtatccgcttttacaacgacagcgcggctaccattccggaggcggctgccgcctgtatagaggcgttaagtcctccgcttgtccttgtaacaggcggcacggacaaaaaccttgattttacccttcttgcaaaaaacgccgtaaaagcaaaagctgtaattctgcttgcaggaagcggcagtgaaaagctaaaacttctgttaggtgaagccggcgtttcatataacgggccttttgacgatttggataaagccgttgtctgcgcgcttgaaaacgcgcaaaaaggctgtacagtggctctttctcccggctgcgccagctttgggatgtttcttaatgaatttgaccgaggacgcagatggaaagaagccgttttgcgtctttcttcatag

SEQ ID NO: 67916 - protein, 261 aa, Unknown
  Obtained from environmental sample
  DOMAIN (120)...(197): Mur ligase family, glutamate ligase domain
  misc_feature (1)..(261): Xaa is any amino acid
MNTLTIKEISTGDRIQSALPLRVMINGEQVFYAKQKRVPLVIHAVNCQKRKRRLAFRRQGYARLCGFSGVSHEVIELVPQRLLVSGEHQKVNMLAAALAAYGCGVKAEKILNALADFKGIEHRLEFFHEANGIRFYNDSAATIPEAAAACIEALSPPLVLVTGGTDKNLDFTLLAKNAVKAKAVILLAGSGSEKLKLLLGEAGVSYNGPFDDLDKAVVCALENAQKGCTVALSPGCASFGMFLNEFDRGRRWKEAVLRLSS

SEQ ID NO: 67917 - DNA, 1020 bp, Unknown
  Obtained from environmental sample
  misc_feature (1)..(1020): n is a, c, g, or t
atggaaagaagccgttttgcgtctttcttcatagttgttgtttattatagaagaaatatggatttacaaatgctgcaaaaacgcgccgccattatcaaacaggtgcgtcttttctttgacggcagaaattaccttgaactggacaccccgctgctttcaagggacctaattccggaatcctgccttgaggtatttgaaacagagcgtttttttcttcccggaagcaaaaaagagggctacagcctgtacctgatcccatcacccgaaatctggatgaagaaggtgatttcccaacaccgcgtaagcgtttaccagatttgcaaatgtttccgtaacggggaatcaaccggtcatctgcactcaagcgaatttacgatgcttgagtattatacaatggacgcggattacacggattcccttgcgctgacggaagaactattcgcatatctcgcaaaagaaaacggcgttaccgcgttaaaccggccgtttgagcgcataacggtagaagaggcgttttttcaatatgccggcgtagacctcttcaaagccgtacaagagggcgaaatggaagaatgtgcgcgtaaactcggcctagaccctcctaaaggaatgacagatgcagggctttacgatttaatctttatccacgcggtagaaccatgcctgaaaaaagaaacgcctgtcgcgctcactgattatcccgcttttgttccctgcctcgctaaaaaatcgcctaacggcaaaacagttgaaagatgggaactgtacttcaacggcatagagcttgccaactgtttttcggaagaaacaaacccggcggcggtaaaagaattttttataagcgaagaaagcgaaaaagaaaaaaacgcggtagtcaggcataaggtcgatcacgattactggaaaatttttaaaaactttccgcgctgcagcggcgccgcaatgggactggacaggcttatcatggcgctgacaggccgttcagccattgacgcggtgcttccgtttccctgcggctaa

SEQ ID NO: 67918 - protein, 339 aa, Unknown
  Obtained from environmental sample
  DOMAIN (11)...(338): tRNA synthetases class II (D, K and N)
  misc_feature (1)..(339): Xaa is any amino acid
MERSRFASFFIVVVYYRRNMDLQMLQKRAAIIKQVRLFFDGRNYLELDTPLLSRDLIPESCLEVFETERFFLPGSKKEGYSLYLIPSPEIWMKKVISQHRVSVYQICKCFRNGESTGHLHSSEFTMLEYYTMDADYTDSLALTEELFAYLAKENGVTALNRPFERITVEEAFFQYAGVDLFKAVQEGEMEECARKLGLDPPKGMTDAGLYDLIFIHAVEPCLKKETPVALTDYPAFVPCLAKKSPNGKTVERWELYFNGIELANCFSEETNPAAVKEFFISEESEKEKNAVVRHKVDHDYWKIFKNFPRCSGAAMGLDRLIMALTGRSAIDAVLPFPCG

SEQ ID NO: 67919 - DNA, 858 bp, Unknown
  Obtained from environmental sample
  misc_feature (1)..(858): n is a, c, g, or t
gtgcagacactagagttaatatatatggaagctatgcttgcccagaggaaacgaatacgcagtccggttggagccggaatattctatcctgatgataaaaaggaaataattgactatttcaattcctttgaactttctgatgggaagggcggatatgcaaaggcgataattgttccgcacggcgcatggagctattccggggctttaacggcgcgggctttttattcgacaatgggcagaagcggcagtataaaaagggttgttattctcggcccaatccatgataaaagggaaaaagggctttttttatcaaattctcactgttttcacactcctttaggcaatatttctgtagataaagaaatttcagaagagcttgaatttaacagcagtttttttgagataaatgacatcccccatcttggggaacattccatagaaataatccttccttttgttaaatactgttttcccggcgcttcaatagttcccatacttatggggcagccgtgcgcgaagtacattcacgatcttgcgcagtcgcttaaaaaagtgattacgcctgtaatggacgaaactttagttgtagtttcctgtaatctttcctgtgataacgatcaggatactgccctgtacctggcgcaggagtgccttcgtcttttttcagaaaaaaacactcaggctcttgcgtccgccgttttggatgggaaattgaacgcctgcggaggagcgcttgtggtcagtctatttgaaagcggacttttaaacagaactaactcctgtttagtagataatattgtcagcgcggttgatattgaaaacaacaccgtttattacagcgatgtttcctttgtttaa

SEQ ID NO: 67920 - protein, 285 aa, Unknown
  Obtained from environmental sample
  DOMAIN (21)...(273): Protein of unknown function DUF52
  misc_feature (1)..(285): Xaa is any amino acid
MQTLELIYMEAMLAQRKRIRSPVGAGIFYPDDKKEIIDYFNSFELSDGKGGYAKAIIVPHGAWSYSGALTARAFYSTMGRSGSIKRVVILGPIHDKREKGLFLSNSHCFHTPLGNISVDKEISEELEFNSSFFEINDIPHLGEHSIEIILPFVKYCFPGASIVPILMGQPCAKYIHDLAQSLKKVITPVMDETLVVVSCNLSCDNDQDTALYLAQECLRLFSEKNTQALASAVLDGKLNACGGALVVSLFESGLLNRTNSCLVDNIVSAVDIENNTVYYSDVSFV

SEQ ID NO: 67921 - DNA, 849 bp, Unknown
  Obtained from environmental sample
  misc_feature (1)..(849): n is a, c, g, or t
atgcgcaaactcatactgactacggcggtggtcgcggcggcgatttggttggcggggtgctctaagacaccgacaccgaaatccgtctccgcgacgcctgatacggcggccctatcggtcgatacgccgcccgccgacgcttccgctttttccgaaacggcggtcggcgggcaaagttttgaaatggcgttcgtggcgggggggacgtttacgatggggtgcgccgccgaacaggacagcgattgcgacgacgacgaacgtccggcgcattccgtgacgctgagcgattactacatcgggaagcgcgaggtgacgcaggggttgtggaaagcggtgacgggcggtaacccgtcacattttacaaggagcgataatttgcccgttgaaaacgtcagttgggatgaggtcaacgcgtttatagacagtttgaatagaaagaccggcaggatgtatagattgccgacggaggcggagtgggagtatgcggcgcgcggggggaataaaagcggaggatacaaatattcaggtagtaatacgttggatagcgttgcttggtattggtataatggcggtcataaaactcatgaggcaggtacgaaagcgccgaatgaacttggcatctatgacatgagcggcaacgtgtgggagtggacgggcgataggtatggagattacggttcggatgcgcagactaatcctacagggccgtcaacgggctctatccgcgtgcttcggggcggtagttggagctacggcgaggggaactgccgtgtttctaatcgcggcggcagcgaccccgacaacagcatcgacggcataggcttccgccttgtgttgttgtccccctag

SEQ ID NO: 67922 - protein, 282 aa, Unknown
  Obtained from environmental sample
  SIGNAL (1)...(22)
  DOMAIN (58)...(279): Domain of unknown function (DUF323)
  misc_feature (1)..(282): Xaa is any amino acid
MRKLILTTAVVAAAIWLAGCSKTPTPKSVSATPDTAALSVDTPPADASAFSETAVGGQSFEMAFVAGGTFTMGCAAEQDSDCDDDERPAHSVTLSDYYIGKREVTQGLWKAVTGGNPSHFTRSDNLPVENVSWDEVNAFIDSLNRKTGRMYRLPTEAEWEYAARGGNKSGGYKYSGSNTLDSVAWYWYNGGHKTHEAGTKAPNELGIYDMSGNVWEWTGDRYGDYGSDAQTNPTGPSTGSIRVLRGGSWSYGEGNCRVSNRGGSDPDNSIDGIGFRLVLLSP

SEQ ID NO: 67923 - DNA, 1707 bp, Unknown
  Obtained from environmental sample
  misc_feature (1)..(1707): n is a, c, g, or t
atggcaggtacatatgcaaacaagaagccgttaccggtagacaagtctttgtttgaccgcgtgatcgagggcggttcctactatgtcgataaaacgctatttatcaaagaccttatagataaagatgccgaagtcgtcctttgcacccgtccgcgccggtttggtaagaccctgaaccagacgatgctaaaatgcttttttgaagatacgacgcagatcggcgacaagaacactcggactctgtttcgtgggctgaagatagtggatgccggagaacggtatatggagtatcaggggaggtatccggtgatattcctgacgtttaaggacgcaaaactgaatagttttgacagctcgtgtaatatgctaaaagaatatatcgcaaaagaatttgagcggcacacgtatgttatggaaaagatgtctggagacggcaacatagaaaggtttaaacggttatcctccgtcagcggttctgccagtgattacccaaattcgctcagatttttgtgtgaatgcttggagcgttatcacggtcaaaaggccataatcctaattgacgagtacgatgtcccgttggaaaactcgtgggctcgcggtttttatcaggagatgattgattttatccgtccgcttttgggcagcgcacttaaagataacccgcacctgcaattagccgtgatgaccggatgtctgcggatttccaaagagagcatatttaccgggctgaacaatttgaaagtggtgtcgatcctcagcgattcttatagcgagtatttcggttttacgcaaattgaggtggacgccatgcttaaatattacgatttagagagcaaaacgcagatactcaaagactggtacaacggctatttgtttggaaataccgaggtgtacaacccgctaagcaccgtccgagtagttgaggcatggacgcaaaacatagaacgaacaccggagccgtattggtcaaacacaagcggtaacgatattgtccgcaagttggtagacatcgccaacatcgaaatgaaaatggatttggaaaccctgatggccggcgggaaaatctcaaaaccgattcacgaggatattacgtatgatgaaataggtaaagatatcaatcccgacaacttttggaactttttgtttttcaccggttatttaaaaaacgtaggggaacgcatggccggtgtacggaagattttggatatgtctattccgaacttagaaatacagtacatctacgaaaccaaaatacgcgaatggtttagggaacacatattaaaaaaagacctcgacacgctcttccgcgccgttttggacggaaacgccgaaactttccaagacgagttattgaaactcctttcggagagtataagctacatggacagcgccgagagctcgtaccgcgggtttatgaccggattgctgtctaggatgggcggttatctaatgacttccaaccgggagtgcggggacgggcgcagcgatttggtcttgtaccgcgtagacggaaagaacagccaagcaatcatatttgagtttaaggcagttaaagacgttgacaaattgcggacagcgagcgaaagcgccctgaaacagatagaagacaagaattacgctgccccatgggagagggaaaactataaaaacattatcaaatacggcgtagcattctgcggcaaacggtgcgaggtacgtaaaggatga

SEQ ID NO: 67924 - protein, 568 aa, Unknown
  Obtained from environmental sample
  DOMAIN (14)...(568): Protein of unknown function (DUF1703)
  misc_feature (1)..(568): Xaa is any amino acid
MAGTYANKKPLPVDKSLFDRVIEGGSYYVDKTLFIKDLIDKDAEVVLCTRPRRFGKTLNQTMLKCFFEDTTQIGDKNTRTLFRGLKIVDAGERYMEYQGRYPVIFLTFKDAKLNSFDSSCNMLKEYIAKEFERHTYVMEKMSGDGNIERFKRLSSVSGSASDYPNSLRFLCECLERYHGQKAIILIDEYDVPLENSWARGFYQEMIDFIRPLLGSALKDNPHLQLAVMTGCLRISKESIFTGLNNLKVVSILSDSYSEYFGFTQIEVDAMLKYYDLESKTQILKDWYNGYLFGNTEVYNPLSTVRVVEAWTQNIERTPEPYWSNTSGNDIVRKLVDIANIEMKMDLETLMAGGKISKPIHEDITYDEIGKDINPDNFWNFLFFTGYLKNVGERMAGVRKILDMSIPNLEIQYIYETKIREWFREHILKKDLDTLFRAVLDGNAETFQDELLKLLSESISYMDSAESSYRGFMTGLLSRMGGYLMTSNRECGDGRSDLVLYRVDGKNSQAIIFEFKAVKDVDKLRTASESALKQIEDKNYAAPWERENYKNIIKYGVAFCGKRCEVRKG

SEQ ID NO: 67925 - DNA, 705 bp, Unknown
  Obtained from environmental sample
  misc_feature (1)..(705): n is a, c, g, or t
atgcaggcaaagaaaacatcaaaaaagacggcaaaaaaaacctatccgtctacgaaaaaaaaacttccaaatctcaagcgtatgacgcttgaggagtttatagccgttactgctgaaaataacgctaaaatggccgaaaaaatggctgaaaaccatgcgagaacagaatctgctattgagaggctgtccgaaagtcacgccaaaacggaaaatgcgcttcggaagatgattcgttctgttgacgatctgtcccgtaacgttggtattgtgactaaccgtctcggttctgtggtggagtttatcgttgtccctaagatacgccttgccatgaacgccgccggaggccacacgtttgattgtgttgatccggacataaaaatcagaacgctcatcggcgatgtaaaaaaggacgtaacccaaatggacgtgtttttgtacaacgatacggaagctatggctgttgaaataaaaaccacattgcaagaacacgatgtaaacgaccatttagaccggttacggaaagtgcgcgcacacgaagaaaaaatcggcattgtcggcaaaaaactctttggcgcggtagtagggataattgtggactctagggcgcaagcccttgccctgaaaaacggcttatacgtcgtgaagatacgcgaagaagaggaaaagttagacgtagaaacgccggattcgtgccgcacgtggtaa

SEQ ID NO: 67926 - protein, 234 aa, Unknown
  Obtained from environmental sample
  misc_feature (1)..(234): Xaa is any amino acid
MQAKKTSKKTAKKTYPSTKKKLPNLKRMTLEEFIAVTAENNAKMAEKMAENHARTESAIERLSESHAKTENALRKMIRSVDDLSRNVGIVTNRLGSVVEFIVVPKIRLAMNAAGGHTFDCVDPDIKIRTLIGDVKKDVTQMDVFLYNDTEAMAVEIKTTLQEHDVNDHLDRLRKVRAHEEKIGIVGKKLFGAVVGIIVDSRAQALALKNGLYVVKIREEEEKLDVETPDSCRTW

SEQ ID NO: 67927 - DNA, 462 bp, Unknown
  Obtained from environmental sample
  misc_feature (1)..(462): n is a, c, g, or t
atgacatttggagacgtccccgcgcaaaccgcgcgaaatcaaggtgcgtcaatctgggttgtaatcagaatgatacttgttctcgcgcttgccgcggcggcaatttacggaattttattttttattaaacgttcttcaaaacaaaccgcttcaagcgacccatttttaaaaattttagcaagctctcaccttggttttaaccgttatgtgcatatcgcctctgtcggctccaaggcttggctgctgggagcgagcgaaggcggagtaaatcttatcagcgaaattgaagataaagaaattatagacgcaatgctccttgaggattcaaagaagagcgcggagactcaaaatcgtttccccgactttttgtcgattattcgccgccttgggactccggctcaaacgcgttcttccggtatcgatgaaattcgcaaacgccgcgaaaggcttaaggggatgtaa

SEQ ID NO: 67928 - protein, 153 aa, Unknown
  Obtained from environmental sample
  misc_feature (1)..(153): Xaa is any amino acid
MTFGDVPAQTARNQGASIWVVIRMILVLALAAAAIYGILFFIKRSSKQTASSDPFLKILASSHLGFNRYVHIASVGSKAWLLGASEGGVNLISEIEDKEIIDAMLLEDSKKSAETQNRFPDFLSIIRRLGTPAQTRSSGIDEIRKRRERLKGM

SEQ ID NO: 67929 - DNA, 840 bp, Unknown
  Obtained from environmental sample
  misc_feature (1)..(840): n is a, c, g, or t
atgcgcggaacaaggatagttaatcgtaaattaacggtattggctttgttcgcgtcattttttattctcttaccggtttcagctaacgcgcagcagcagtttcccgacagatcggtacaggggacgacaaatttaattgcgcctccgggacctccggcgattccttttatcgacttaaccatacgaaacccgcagggcggacaggaagtagcgttttcattacagttactgctgttgttaaccgttctttctctcgcgcccagtatcattattctaatgacaagtttcctgcgtgtttccatcgttttggattttataaaacgcgcgctttcattacagcaggttcctcccaatcaggtaattttaggtatatcgctttttcttaccgtgtttatcatgtggcctacattcagcgcgatttatactaactccgtaaagccgctttccgccggtgagctatctgttgaaaacgcgtacaaggaagcggaagcgcctttaagagtttttatgtacagacaaatgagcggtcatccggaaaacataaggctctttatggcaatgcgcggtcttgaccgtcccaatacgttagctgatgttcccacttatgttttaattccggcgtttattcttaatgaacttaccgtagcgtttaaaataggaatactgctttttattccgttcattgtaatagattttgttgtcgcaagtacgcttatgtccatgggtatgatcatgcttcctcccgttatgatctccatgccatttaagttagtcctttttattctcgttgacgggtggggattattgacggatcaacttgtccgttcatttttagtataa

SEQ ID NO: 67930 - protein, 279 aa, Unknown
  Obtained from environmental sample
  SIGNAL (1)...(28)
  DOMAIN (79)...(274): FliP family
  misc_feature (1)..(279): Xaa is any amino acid
MRGTRIVNRKLTVLALFASFFILLPVSANAQQQFPDRSVQGTTNLIAPPGPPAIPFIDLTIRNPQGGQEVAFSLQLLLLLTVLSLAPSIIILMTSFLRVSIVLDFIKRALSLQQVPPNQVILGISLFLTVFIMWPTFSAIYTNSVKPLSAGELSVENAYKEAEAPLRVFMYRQMSGHPENIRLFMAMRGLDRPNTLADVPTYVLIPAFILNELTVAFKIGILLFIPFIVIDFVVASTLMSMGMIMLPPVMISMPFKLVLFILVDGWGLLTDQLVRSFLV

SEQ ID NO: 67931 - DNA, 873 bp, Unknown
  Obtained from environmental sample
  misc_feature (1)..(873): n is a, c, g, or t
gtgatagaaaacgcggttttacagaatattctctccttcggacctgtctttctgctgatagcggtaagagcttttgccatgattcaaaccgccccgattttatcgtccgaagctgttcctcaaaccgctaaaatcgcgcttgccggtcttgccgctttcgccgtccttcccacggcggagatttatatggcggctaattcacctaacggcattgttactctgcccggaggcactttaagcgacttgcgttatgaaactttttcccttcgctttttactgcttcttatcggagagggaataatcggtataattatgggtttttatttaacggtaatttttgccgctttcgctacggcgggacagttcttctccctgcaaatggggttcggagcttcagaaacttttgaccccgtagcgcaggttgaaaacccgcttatgggacagtattttaacctggtatccatgctcatttttgtaatgataggcggctttcatcaacttttcctcggcggcttttggcgttccgtgcaatcgctcaatattatgtccttgattgacggaagagaacatgtcgtaaaaatgttttcgttcggtctttcgcgcctgtttctggacgcgattgttatttcgcttcccattctgggcactttgtttttaacatcgttaactacggggcttatatcaaaagccgcccctcaggtaaatattctttccgaaggttttccgatttccatcaccgccgccttcctgcttattttcgcctcgcttccgtttatgatcgaggcgtttaaccgtgtaattgattccggctttcaaaatatcgaaaccctttacaaacaaatcgggcggcagattacgggagggacgtactaa

SEQ ID NO: 67932 - protein, 290 aa, Unknown
  Obtained from environmental sample
  SIGNAL (1)...(26)
  DOMAIN (8)...(275): Bacterial export proteins, family 1
  misc_feature (1)..(290): Xaa is any amino acid
MIENAVLQNILSFGPVFLLIAVRAFAMIQTAPILSSEAVPQTAKIALAGLAAFAVLPTAEIYMAANSPNGIVTLPGGTLSDLRYETFSLRFLLLLIGEGIIGIIMGFYLTVIFAAFATAGQFFSLQMGFGASETFDPVAQVENPLMGQYFNLVSMLIFVMIGGFHQLFLGGFWRSVQSLNIMSLIDGREHVVKMFSFGLSRLFLDAIVISLPILGTLFLTSLTTGLISKAAPQVNILSEGFPISITAAFLLIFASLPFMIEAFNRVIDSGFQNIETLYKQIGRQITGGTY

SEQ ID NO: 67933 - DNA, 1185 bp, Unknown
  Obtained from environmental sample
  misc_feature (1)..(1185): n is a, c, g, or t
atgatcggagaattattaatgaatgacgaatatgaaaacacaaaattaattttctctccgcttataatcgacttgcaatggttctccgacagcaacgatgaagacgctcccggtaaaacagaacagccgaccgaacataaattaaaaaggttaagagaagaagggcagcttgtaaaaagtcaggaattggtgggcgctatcggtttattgcttcccgccttgttgctgctttttatggctccttcaatgctgaaaacctgcgttgaaatggtgcgcttcttcttcctgcgcgcgacggaacttgatccgacaaaagacggtttaattgcgggaaactttttaatcttttttgcgcggcttgtcgtaccgattcttatagtcgccgttgtgtcggcggtcttttccaacatggtacaaataggcggctggctgtttacaacaaaaactattacgcccgacttctcaaaagttataccaaggtttgggcagtattttaaacgtattttttctattgacgggctggttaaacttggtatgtcgcttgtaaaaatagcgattatcggcattgtcgcctatttattcataaaagctgatattaataaactccttaatttgcaaaaagctgatgtttatacgggtcttacgctggtaggatcaatcgcgataagaatgataatcgttgtcgccgttctaatgcttgttctctcaatagcggattattttttccagcggttccgtttccgcgaaaggcacaagatgacgcgttacgagataaaagaagaaatgaaaatgtacgaagcggatccgcagatacagtcaaggattcgcgcccgtttccgcgaaatgttaaggcagaatatcactaccgcggttccaaaagcggacgttgtaattacaaacccgacccaccttgcggttgctttgcagtacgatgaaagttatatgagagacggacctatcgttgtggcgatgggcgcagatgaaatggcggcgaaaatcagggagatcgcaaaggagcacgaggttccgcttgtggaaaataagccgcttgcgtgggctttgtaccgtgagaccgacataggagacgtagttccggcggcgtacattaacacggtagctgtaattttcagtaaggtttggcgtcttaacgaagaacggcgcaaaaaaatgaggatgagcgcatga

SEQ ID NO: 67934 - protein, 394 aa, Unknown
  Obtained from environmental sample
  DOMAIN (35)...(380): FlhB HrpN YscU SpaS Family
  misc_feature (1)..(394): Xaa is any amino acid
MIGELLMNDEYENTKLIFSPLIIDLQWFSDSNDEDAPGKTEQPTEHKLKRLREEGQLVKSQELVGAIGLLLPALLLLFMAPSMLKTCVEMVRFFFLRATELDPTKDGLIAGNFLIFFARLVVPILIVAVVSAVFSNMVQIGGWLFTTKTITPDFSKVIPRFGQYFKRIFSIDGLVKLGMSLVKIAIIGIVAYLFIKADINKLLNLQKADVYTGLTLVGSIAIRMIIVVAVLMLVLSIADYFFQRFRFRERHKMTRYEIKEEMKMYEADPQIQSRIRARFREMLRQNITTAVPKADVVITNPTHLAVALQYDESYMRDGPIVVAMGADEMAAKIREIAKEHEVPLVENKPLAWALYRETDIGDVVPAAYINTVAVIFSKVWRLNEERRKKMRMSA

SEQ ID NO: 67935 - DNA, 858 bp, Unknown
  Obtained from environmental sample
  misc_feature (1)..(858): n is a, c, g, or t
atggctgatatatccgcagcagatgtaaaaaaactccgggaaaaaaccggagctggaatgatggaatgtaaaaacgcgcttgtctcttcagaaggcgattttgccaaagctgaaaaacttttaaaggaaaaaggtcttgccgctcttgaaaaaagagccggacgggctaccaataacggaaaagtttttattaaaatgaaagacgacaattccgccgctgtgttagttgaacttaacgcggaaacagactttgttgccagaaaccccgactttatcgctctcggcgaaaaaattgcggctgacgctcttcaaaaaggagtaaccgctcccaatgacgaacttagcggtcttgtacaagagcttgcgacaaaaatccgcgagaacatgggtcttaaaagattgtgtcaggtaaaagcgtcttccaatgaatttcttacgcagtatattcacggagacggcaacatcggcgtagttgtaaaatgcgaatccgacaaacctgaaatcttcaaaaccgaagatgtaaaatcttttattttctcaatcgccctgcacattgcggcttttaatcctctcgcgattgacaaaacaaaagttgatcaggcgtggcttaaagaacaggaagaaattttcaaagttcaaatgggacaggatgaaaaacttaaaggaaagcccgaaaacgttcttgaaggtatccttaagggcaaggtttcaaagtatttaagcgaaatctgccttatggatcagggttatgtaaaagacgagaaaattaccgtagcgaaagccgttgaagaatgcggaaagaaagccggggcaaaacttacggtaaccgagtatgtttactacagagtcggcgaataa

SEQ ID NO: 67936 - protein, 285 aa, Unknown
  Obtained from environmental sample
  DOMAIN (4)...(44): UBA/TS-N domain
  misc_feature (1)..(285): Xaa is any amino acid
MADISAADVKKLREKTGAGMMECKNALVSSEGDFAKAEKLLKEKGLAALEKRAGRATNNGKVFIKMKDDNSAAVLVELNAETDFVARNPDFIALGEKIAADALQKGVTAPNDELSGLVQELATKIRENMGLKRLCQVKASSNEFLTQYIHGDGNIGVVVKCESDKPEIFKTEDVKSFIFSIALHIAAFNPLAIDKTKVDQAWLKEQEEIFKVQMGQDEKLKGKPENVLEGILKGKVSKYLSEICLMDQGYVKDEKITVAKAVEECGKKAGAKLTVTEYVYYRVGE

SEQ ID NO: 67937 - DNA, 564 bp, Unknown
  Obtained from environmental sample
  misc_feature (1)..(564): n is a, c, g, or t
atgcttgatgatataatttcgactaacgaagatcgaatgaagaagacagtggcaagccttaaagacgggtttgccgctttcaggacaggaagagcgaccgccgctctgtttgacagggttcgcgtagacgcttacggggaaaaatcgccgcttaatcaggtggcgaatatttccattcccgaagcccgtcttgtcgttattcagccttgggataaaggtcttataacagagattgaaaaagcgattcgttcttccgaattgtcgttaaacccgtcgaatgacggcaaagtaatccgcatttcaattccgcctcttacggaagaaaggcgcaaagaacttgtaaagctcgctaaagggcaggctgaacagtccagagtcgccattcgcaacattcgcagggatggaaacgaagaactgaaaaaacttttaaaagacaaaaaagaaaagattacggaagacgacgaaagcaagggagaggaagaactgcaaaaacttaccgacaactacatagggcagataaacaaactccttgaagaaaaagaaaaagaaataatggacgtgtaa

SEQ ID NO: 67938 - protein, 187 aa, Unknown
  Obtained from environmental sample
  DOMAIN (19)...(185): Ribosome recycling factor
  misc_feature (1)..(187): Xaa is any amino acid
MLDDIISTNEDRMKKTVASLKDGFAAFRTGRATAALFDRVRVDAYGEKSPLNQVANISIPEARLVVIQPWDKGLITEIEKAIRSSELSLNPSNDGKVIRISIPPLTEERRKELVKLAKGQAEQSRVAIRNIRRDGNEELKKLLKDKKEKITEDDESKGEEELQKLTDNYIGQINKLLEEKEKEIMDV

SEQ ID NO: 67939 - DNA, 699 bp, Unknown
  Obtained from environmental sample
  misc_feature (1)..(699): n is a, c, g, or t
atggaaaaaaatatccctgctcatgtaggtattatcatggacggaaacggacgctgggctaagacaagaggtcttgtccgtacgcagggacatcttgaaggattaaaaacggcgaaacgtattgtaaaggcggcaagcgatttaggcataaaatatttaacgctttacgccttttctacagaaaattggaaacgggcggcggaagaagtcggttttataatgggtcttataaaacagtatttgcgagctgagtttgattttagcaagcaaaataaaatccgcgtccgccacgccggggattttaacggactgccgcctgacattcaaaaagaattgtccgattccatagcggatacggcaagttttgacggaatgcaggttattctggcgattaactacggcggcagggacgagattatcagggcgtttagaaaattcgccgcggaaagcgagaatgcggacagtataagcgaagacggtatacaaaattaccttgataatcccgatgtacccgaccccgatttaataatccgaagcgccggcgaatacagaacgagtaattttttactgtgggaaggggcgtattcggaattgtacatatcgcagaaattatggcccgattgggataaagaggatttggaaacggcgattgccgaataccaaaatagagacaggcgttttggcggagtaaaagcatga

SEQ ID NO: 67940 - protein, 232 aa, Unknown
  Obtained from environmental sample
  DOMAIN (12)...(229): Putative undecaprenyl diphosphate synthase
  misc_feature (1)..(232): Xaa is any amino acid
MEKNIPAHVGIIMDGNGRWAKTRGLVRTQGHLEGLKTAKRIVKAASDLGIKYLTLYAFSTENWKRAAEEVGFIMGLIKQYLRAEFDFSKQNKIRVRHAGDFNGLPPDIQKELSDSIADTASFDGMQVILAINYGGRDEIIRAFRKFAAESENADSISEDGIQNYLDNPDVPDPDLIIRSAGEYRTSNFLLWEGAYSELYISQKLWPDWDKEDLETAIAEYQNRDRRFGGVKA

SEQ ID NO: 67941 - DNA, 873 bp, Unknown
  Obtained from environmental sample
  misc_feature (1)..(873): n is a, c, g, or t
atgaaaaaaattattgaaaggttactggtatttataatagggattcccgctgtttatgctcttgtaattctgctcccctaccgcagtaaccttgccttgaatatagtcacaattttattttccgcaatgggcgctgttgaattttctttcttacttgaaaaaaagaaaattgtaatttcaaaaatagaaagttttattttaggcgctgtaattccattggcttttactcttgttttcagttttgaagaattacctgaatggatttttccggttttaataatggcaagcgctggatggatattactaacaaaagttttttctaagtcctcagaaatagaacaaataaccgggcaaataaccggtaaaatttccttgcttatttatcccggactttttatctgctggttagtagttatgagcggatggggggatcccgaagcgacgcttttatttttattcgtcacattcagcagtgattcaaccgcatggctttgcggtaatttattcggcgcgaacaacaggggaataattcccgtaagtcccaacaagagcgtcgcgggctttataggcggagcgctcggttctgtaattgtagctgtgggagcctcatttctttttcccaatatatttacttatttaaaccttgaaattccttccagtaaactggcaatcatggcggctattctgggtttctgtaccggtatcgccgcgtcattaggcgatcttgccgaatccgcgataaaaagaagctgtgattcaaaagattcggggaatttgatgctcggacgaggcggcgttcttgattcgattgactccattgccgtagccgctcctgtattttatcttctgttcaacatatttttcagagtttga

SEQ ID NO: 67942 - protein, 290 aa, Unknown
  Obtained from environmental sample
  SIGNAL (1)...(20)
  DOMAIN (5)...(287): Cytidylyltransferase family
  misc_feature (1)..(290): Xaa is any amino acid
MKKIIERLLVFIIGIPAVYALVILLPYRSNLALNIVTILFSAMGAVEFSFLLEKKKIVISKIESFILGAVIPLAFTLVFSFEELPEWIFPVLIMASAGWILLTKVFSKSSEIEQITGQITGKISLLIYPGLFICWLVVMSGWGDPEATLLFLFVTFSSDSTAWLCGNLFGANNRGIIPVSPNKSVAGFIGGALGSVIVAVGASFLFPNIFTYLNLEIPSSKLAIMAAILGFCTGIAASLGDLAESAIKRSCDSKDSGNLMLGRGGVLDSIDSIAVAAPVFYLLFNIFFRV

SEQ ID NO: 67943 - DNA, 1392 bp, Unknown
  Obtained from environmental sample
  misc_feature (1)..(1392): n is a, c, g, or t
atgaaaaaacaaaaatcccttgtttacaaatgtacatcctgcgggcatgaagaacccaagtggcttggccgctgccccgagtgcggcgaatggaacacattgactgaaaccgccgtaagtaatccgaacatcaaacgaagcgatacgcgaagcggtctgccgcagacttttcccctctctacggttgaccctcaggaaggcagccggataaaaagcggtataggcgaactggatcgcgtacttggcggcggtattatgaaatgttccgcggtgcttgtcgggggggagccgggcataggcaaatcaaccttgcttctgcagcttgccgccgctgttgaaacaaaagggcgcgttttgtacgtctccggcgaagagtccgcgggacagttgcggttaagggcggacaggcttggtttaaacaaagacaaacacaaaatggagcgtatcgaactcctgtgtaccggaagccttgaagagattgagacagtcctcaactccgtaaagccggttctggtgcttgtagattccgcgcagacgcttttttccgctgacggcggttccgcgccgggcggcgtgaaccagatgaagttctgctccttcgagttaatttcctgggtcaaggaacatgacgcggcgctttttttaacggcgcatgtcaccaaagaggggcttatcgccgggcccaaaactcttgaacacatggtggatacggttctttattttgagcaaaacgacaaatcctccgcgttgggagggactacggactgccgttttttaagagcggtaaaaaaccgctttggctctgtcgatgaaatcgggatttttactatgggggagaacgggctttctcctgtcgaggataccggacggctctttttggtgaggcgggaaggagaactgcctcccggagtgacgacggcggcggttcttgagggcacaaggaccattttggttgaaattcaggcgctcaccattcccgcaaagggctctatgagccgagttttctccgataaaatcgattccggcagggtttcgcgggtgtccgccgcgctggaaaagcatctggggctgaggctttcggatcaggacttgtacgtgaacgcggcaggcggaatccgcatttccgaagtgggagttgaacttgccctcgcctttgccctgtattcggcgcggaccggccttgccctccccgcgaacctggcgatagcgggcgaactgtccctgacaggcgaaattcgtcccgtgcgccgccttgccgcgcgcgttaaaacaagcgccaacctcggatttggctcttttctgggtcctgccggagaaaaccagcctgtgccggggctgatacccgccgccgatattaaaaccgcggttaaattaatttacaaaaaggcttga

SEQ ID NO: 67944 - protein, 463 aa, Unknown
  Obtained from environmental sample
  misc_feature (1)..(463): Xaa is any amino acid
MKKQKSLVYKCTSCGHEEPKWLGRCPECGEWNTLTETAVSNPNIKRSDTRSGLPQTFPLSTVDPQEGSRIKSGIGELDRVLGGGIMKCSAVLVGGEPGIGKSTLLLQLAAAVETKGRVLYVSGEESAGQLRLRADRLGLNKDKHKMERIELLCTGSLEEIETVLNSVKPVLVLVDSAQTLFSADGGSAPGGVNQMKFCSFELISWVKEHDAALFLTAHVTKEGLIAGPKTLEHMVDTVLYFEQNDKSSALGGTTDCRFLRAVKNRFGSVDEIGIFTMGENGLSPVEDTGRLFLVRREGELPPGVTTAAVLEGTRTILVEIQALTIPAKGSMSRVFSDKIDSGRVSRVSAALEKHLGLRLSDQDLYVNAAGGIRISEVGVELALAFALYSARTGLALPANLAIAGELSLTGEIRPVRRLAARVKTSANLGFGSFLGPAGENQPVPGLIPAADIKTAVKLIYKKA

SEQ ID NO: 67945 - DNA, 327 bp, Unknown
  Obtained from environmental sample
  misc_feature (1)..(327): n is a, c, g, or t
gtgcccggtacggcattgcttgttccgggtgaaggatttttctcgatggcaaagaaactgtatgtcggtaacctttcttacgaaactaccgaagatggtctgaaaaacatgttttcagaatttggtactgtcgcttcagccaagatcattttcgatcgtgactccggcaaatctaaaggatttggatttatcgaaatgagcagcgaagaagaggcaaacaaggcaatcgccggcacaaacggccgcgaatttgaaggacgtcaactgcgtgtaaacgaggcgatggataaacctcgccgtgatcgcggcggcggcgggcggcggtaa

SEQ ID NO: 67946 - protein, 108 aa, Unknown
  Obtained from environmental sample
  DOMAIN (20)...(91): RNA recognition motif. (a.k.a. RRM, RBD, or RNP domain)
  misc_feature (1)..(108): Xaa is any amino acid
MPGTALLVPGEGFFSMAKKLYVGNLSYETTEDGLKNMFSEFGTVASAKIIFDRDSGKSKGFGFIEMSSEEEANKAIAGTNGREFEGRQLRVNEAMDKPRRDRGGGGRR

SEQ ID NO: 67947 - DNA, 888 bp, Unknown
  Obtained from environmental sample
  misc_feature (1)..(888): n is a, c, g, or t
atggcggatacattaacaacggtttttagcgatcacataaaaagagtaatgaaacaggcaaaacccacaacacttataacagaagacaatgtgtatcaggaaggcgatccgagtattatggcggttcttgatgaaatggtaggctctttgcttctgccgggaagcagtcttgccggtatgaatcatcttgaagaacttttagaaaaagcagagtcgggtaaagcgtgccttcttcttgtagaacattacagcaacatggatctttcaattgtttcgctgatggcgcgaagggaaggcggtcgcggcaaagctataagcgacgcgcttattgccatcgcgggaatgaaattaaatgaagataatcctattgtcgccgcctttgccggagcctacgataagattgtaatttatccaagccgctctttgcaggaattagacccggaaaaagacaaggacgaaatagcaaggggcaatgccattaaccgcgccgcaatgaaatcgcttatcaggcataaatacaaaggaaagctcgtccttgtattcccgtccggaacgcgttaccgcccgtgggatccgaataccaaaaaaggcgtacgggagatcgattcttatatccgctcttttgactatatgtgttttgtcgcccttaacggcgagcttttgcatgtgcaaaaaaccgatatgctgaatgatgttgtaagcaaagatgtttttcgagttacagtgagtcccgttgtaaaatgcaatgaattccgcgataaagtattggctaagattaccaatgaggaagaagataaaaaacaaacggttgtaaacgaaataatgaatgaacttgaaaagctgcacattatcgcagaagcggaaagattaaaagttttaaataaataa

SEQ ID NO: 67948 - protein, 295 aa, Unknown
  Obtained from environmental sample
  misc_feature (1)..(295): Xaa is any amino acid
MADTLTTVFSDHIKRVMKQAKPTTLITEDNVYQEGDPSIMAVLDEMVGSLLLPGSSLAGMNHLEELLEKAESGKACLLLVEHYSNMDLSIVSLMARREGGRGKAISDALIAIAGMKLNEDNPIVAAFAGAYDKIVIYPSRSLQELDPEKDKDEIARGNAINRAAMKSLIRHKYKGKLVLVFPSGTRYRPWDPNTKKGVREIDSYIRSFDYMCFVALNGELLHVQKTDMLNDVVSKDVFRVTVSPVVKCNEFRDKVLAKITNEEEDKKQTVVNEIMNELEKLHIIAEAERLKVLNK

SEQ ID NO: 67949 - DNA, 423 bp, Unknown
  Obtained from environmental sample
  misc_feature (1)..(423): n is a, c, g, or t
atgaaaatttcaggcgatttggaaagagccgctctgaaagtctttcttcgcgattttgactcagacggcatgaaacgccggcttgcggctttagactctttcgctaaaacagtggaagcccaatttcctgacggcaaagtaattgttaaaacccagcctcaatattataatatgaaattaaagattgacgaaaagcctgaagtattacaaaggcttaaacaggctgttgaaaatacaggcgtcgaatggcatcaaaaacctgtacggggcggaacagacgggtcaaggctgacggaactgggtatacccactccgaatatttttacaggcgggcgtaattttcacagccgccttgaatggatcagtgtgagcgaaatgtgcgccgcttgtaaggtgatcatcgaattaataaaactgccgtaa

SEQ ID NO: 67950 - protein, 140 aa, Unknown
  Obtained from environmental sample
  misc_feature (1)..(140): Xaa is any amino acid
MKISGDLERAALKVFLRDFDSDGMKRRLAALDSFAKTVEAQFPDGKVIVKTQPQYYNMKLKIDEKPEVLQRLKQAVENTGVEWHQKPVRGGTDGSRLTELGIPTPNIFTGGRNFHSRLEWISVSEMCAACKVIIELIKLP

SEQ ID NO: 67951 - DNA, 321 bp, Unknown
  Obtained from environmental sample
  misc_feature (1)..(321): n is a, c, g, or t
ttgattaccacgatttttctatcttatacaaaaatgcagcctcttgacatcaacaccctgcccctaaacgaaaaagtcctcatagaagcaagtgcgggcacgggcaaaacatataccataggcttgatagttcttcgcttgcttttggaaaaacttttgcccatagaaaaaatagtcttgataactttcacagaagccgctaccgcggaactcaaaaaaaatccggcgccgtggcttagagaatatgcctcaaaaaaaggcgaagaattaaacctaacgcaaaaagcaattctgctggatgccactgcacgtctgccgtga

SEQ ID NO: 67952 - protein, 106 aa, Unknown
  Obtained from environmental sample
  misc_feature (1)..(106): Xaa is any amino acid
MITTIFLSYTKMQPLDINTLPLNEKVLIEASAGTGKTYTIGLIVLRLLLEKLLPIEKIVLITFTEAATAELKKNPAPWLREYASKKGEELNLTQKAILLDATARLP

SEQ ID NO: 67953 - DNA, 360 bp, Unknown
  Obtained from environmental sample
  misc_feature (1)..(360): n is a, c, g, or t
ttgcccgattgttggatatatttttatattttccaatatgaatatttgattttccaccaggttggtggaaaattagaaagcaagtcaaatttgcaccaagttggtgcaaaaatgcaatctctcgtcttaattccttggcgacatcataatcagactattggcattttaatttgcaaaacaaaagacaaggtggttgcggaatatgcgttggcagatattcataaaccgcttggagtttcttcttatgattttgaaaaaatcttgccaaagaagtttaaatcggctttgccgagtatagaggaaattgaaagggagttacttttatgtttttccagaacaataacaaacgcccatctgtaa

SEQ ID NO: 67954 - protein, 119 aa, Unknown
  Obtained from environmental sample
  misc_feature (1)..(119): Xaa is any amino acid
MPDCWIYFYIFQYEYLIFHQVGGKLESKSNLHQVGAKMQSLVLIPWRHHNQTIGILICKTKDKVVAEYALADIHKPLGVSSYDFEKILPKKFKSALPSIEEIERELLLCFSRTITNAHL

SEQ ID NO: 67955 - DNA, 714 bp, Unknown
  Obtained from environmental sample
  misc_feature (1)..(714): n is a, c, g, or t
ttgggtgttcatggtagggataaagtagaaaaatgtaaattatttattgctatggaattcccgaggaaattttataaagacagcgaattgccgtttttgtggcattatatgatggttattggagagcaaaatttgccacagcaggttttgcagccggaatctctgtttgagaccaaaggtgaaaaattggtattggaaataggttgcggcaagggggcttttttgtgccagtatgctttgagttttccaaaaaattgcattctgggcgtggaatgggatgcttattgctcaaattctaccgcaaaaaaagtagcaaagatggggctcaaaaatgccgctgttatgcggggcgatttgttctattttttaagggatttaatgcccactggatcaatagacgaagttcacatatactttccagacccttggccaaagaggcggcatcacaaaaaacgcttggctttgcgagaaggctttttggagcaaatttatagggtattaaaatcaggcaaaagttttttctactgggcaaccgaccatgaggaatacaatacgcttgcgcttaaggcatttcgcaattttccaaacgcaaaaattttacaagaaaacaacgcagagccaacgcacggcatagaaacaggctttgaaaaaaagtataagagggaaggcagaaaaatatataggagcgttgtggagttttcaaaaaaggtttaa

SEQ ID NO: 67956 - protein, 237 aa, Unknown
  Obtained from environmental sample
  DOMAIN (45)...(236): Putative methyltransferase
  misc_feature (1)..(237): Xaa is any amino acid
MGVHGRDKVEKCKLFIAMEFPRKFYKDSELPFLWHYMMVIGEQNLPQQVLQPESLFETKGEKLVLEIGCGKGAFLCQYALSFPKNCILGVEWDAYCSNSTAKKVAKMGLKNAAVMRGDLFYFLRDLMPTGSIDEVHIYFPDPWPKRRHHKKRLALREGFLEQIYRVLKSGKSFFYWATDHEEYNTLALKAFRNFPNAKILQENNAEPTHGIETGFEKKYKREGRKIYRSVVEFSKKV

SEQ ID NO: 67957 - DNA, 303 bp, Unknown; identical to SEQ ID NO: 50597
  Obtained from environmental sample
  misc_feature (1)..(303): n is a, c, g, or t

SEQ ID NO: 67958 - protein, 100 aa, Unknown; identical to SEQ ID NO: 50598
  Obtained from environmental sample
  misc_feature (1)..(100): Xaa is any amino acid

SEQ ID NO: 67959 - DNA, 708 bp, Unknown
  Obtained from environmental sample
  misc_feature (1)..(708): n is a, c, g, or t
atgtttgcaataattctagtagagcctgaacatccgcataacatcggctttgttgcacgtagcatgaggagcaatgggctaagtgagttgcgcattgttcgcaaatcgcagccattgcccagaaagtgctataacacggctcactccagtgcggagattttggataaggcaaaacttttcccaaccttaaaagaagccatagcggattgctcttatacaatagcttttagtcgccgccaattcgacaccattgtcccgcatatcgcactgccagaattgcccgctgtttgcaaagataaaaatggcatagtcgctttgatttttgggcgcgagtcccgcgggcttgcctttgaagagtttgagctgtgcgccgttcaatgcgaaattcccgttgcggggcttatgagtttgaacttgtctcatgcggttagcgttgcgagctatgagctttgccgagccggtttgcttggcgagggtttggcgtttagaaacaagctgccaataacgcacagaaaagccgctacaacggagcaatttgaaaacattgaaaacttcattttggaaaaccttacggatagatataaaaattatccgtggataaacgcttccatacgcacctggctccaaaagctgaacccaagccaagcggaattatccgctttgtttggcatgttgagagcgttggctaagaaaaacgcgaggaattga

SEQ ID NO: 67960 - protein, 235 aa, Unknown
  Obtained from environmental sample
  DOMAIN (1)...(148): SpoU rRNA Methylase family
  misc_feature (1)..(235): Xaa is any amino acid
MFAIILVEPEHPHNIGFVARSMRSNGLSELRIVRKSQPLPRKCYNTAHSSAEILDKAKLFPTLKEAIADCSYTIAFSRRQFDTIVPHIALPELPAVCKDKNGIVALIFGRESRGLAFEEFELCAVQCEIPVAGLMSLNLSHAVSVASYELCRAGLLGEGLAFRNKLPITHRKAATTEQFENIENFILENLTDRYKNYPWINASIRTWLQKLNPSQAELSALFGMLRALAKKNARN

SEQ ID NO: 67961 - DNA, 1152 bp, Unknown
  Obtained from environmental sample
  misc_feature (1)..(1152): n is a, c, g, or t
atgaacggcttttgtttggcaaaaaaaattgcgttcttgtttctattcttttttgtgggaatttccgtagctcaaaatgtggatatcaaagtcctgaagcacggcacgggcgagcctgtccataaaaggcaactcgtgcgggtgcattacacgggctggctgatggatagcacaaaattcgacagttcccgcgataggggagagccgcttgagtttgtgcttggggcagaccaagttataaaaggctgggatattggaatagaggggatgaaacccggcgaaattcgcaggttaaaaattccatccgttctcgcttatggcaacaatgccgtaggcccaatccctgcaaattcggatttgctttttgaggttgagcttatcagtgcgcaaaagagcttagaaccggatacccttctaagtcctgccgctataaaatggaaaaccctgcgacccggcgtagaaatttttgatgagaaagaaggaacaggaaaagaactccgcaccggaatggaactaacattccattataccggctggcttttaaatgggcataagtttgggagttccaaagattttggaaaacctgccaaagccgtactcggaacgggaaaattggtcagaggtttggaaataggtttggaatcgctcaagcagggcggtgttagatggtttaggctttcgccgagcatggcttacggccctgcggctatgtccaatatacccgcaaactctgggcttctattccgcattcaggcggatttggttgaagttgacaatgagtttgcagcttctatggattttttccccaatgtaaattccataaaatgggtggatgcccaagagggtttaaaatattttatagaaaaagcgggtagcggcaaggcggttaaggctggtgaggttgtaaaggtgcattacacaggctggctctccgatgggacaaaatttgatagctcaaaagagagaggcgaaccgctctctttggaactgggagctgggcgagtgataaggggctgggatttgggattagtaggtatgaagcgcggagaaaaacgtttgctgttgattccgcctagccttggttatggttcaagaggcggtgggccaatcccgccagatgcaacgctaatctttgccgttgaaatgatgtaa

SEQ ID NO: 67962 - protein, 383 aa, Unknown
  Obtained from environmental sample
  SIGNAL (1)...(24)
  DOMAIN (161)...(253): FKBP-type peptidyl-prolyl cis-trans isomerase
  misc_feature (1)..(383): Xaa is any amino acid
MNGFCLAKKIAFLFLFFFVGISVAQNVDIKVLKHGTGEPVHKRQLVRVHYTGWLMDSTKFDSSRDRGEPLEFVLGADQVIKGWDIGIEGMKPGEIRRLKIPSVLAYGNNAVGPIPANSDLLFEVELISAQKSLEPDTLLSPAAIKWKTLRPGVEIFDEKEGTGKELRTGMELTFHYTGWLLNGHKFGSSKDFGKPAKAVLGTGKLVRGLEIGLESLKQGGVRWFRLSPSMAYGPAAMSNIPANSGLLFRIQADLVEVDNEFAASMDFFPNVNSIKWVDAQEGLKYFIEKAGSGKAVKAGEVVKVHYTGWLSDGTKFDSSKERGEPLSLELGAGRVIRGWDLGLVGMKRGEKRLLLIPPSLGYGSRGGGPIPPDATLIFAVEMM

SEQ ID NO: 67963 - DNA, 1662 bp, Unknown
  Obtained from environmental sample
  misc_feature (1)..(1662): n is a, c, g, or t
atgaccaagccaaatttgcttcctgagtggaaagctcttgaagcccaagcacgcatcgcgcaaaaaacaagtatgtgcgagttattcaaagcggaccccagccgagggacaaattatagtgccgaagcctgtggaatatatttggattattccaaaaaccgcgtaaattcagacacccttgacctgctgggtaatcttttaagaagctgcggttttgaagagatgagggcaaagttcttctccggcgagaagataaaccacacggaaaagagagccgttctgcacaccgcgctacgctaccagggtagggagcctatatcggtagatggcgaagatgttatgccaaaggtaaaagccgtgctcgcccacataaaagaattcaccgcccaagttcgcggcggcaagtggaaggggcacagcggcaaacctattaagacagtagtcaacataggcataggcggctccgatttgggacctgttatggcttgcgaagcccttaggcattacgcggatgaaaattccccagaggtttattttgtctccaatgtggacggcacccatatagccgaaaccctaaaaaaagtggatttggaagagaccctttggatagtggcttcaaaaactttcactacccaagagactatgaccaatgccaacaccgccaaaaccgcagtgctagctaaattcaacggcgacatcgcctccatagccaagcactttgtggcactctccaccaatgcggcagaggttttcaagtttcggcatagacaccgcaaatatgttgaattttgggactgggttggaggccgctacagcttgtggtctgcgataggtttgcccatagctttgagaataggttttgaaaactacacccttttgcacgcaggtgcttatgatatggacacgcacttccgcgaagcccctattgagaagaaccttcccgttattttagggcttttgggtgtttggtacaacaattttctgtgtgccagctcatatacaattctgccttacgaccaatatatgcaccgctttgccgcatactttcagcaggcggatatggaatccaacggcaaaacaatagaccgcgaagggcatagggtggactatcaaaccggccctattttgtggggtgaaccgggcacaaatgggcagcacgccttttaccagttgattcaccaaggcacaaaattaatcccttgcgatttcatagctccggttaattcgctcaataaaataagcgaccatcaccgcaagctactctccaacttctttgcccagaccgaggctctgctaaacggcaaaaccttggaagaagcccaagctgagcttattaaagcgggcaaaaccgatgcggaagtggaatttttggctcctcacaaggtatttgagggcaataaaccttccaactccattttggtaaaaaagatagacccaagaacccttggttccctgattgccatgtatgagcacaaaatttttgtgcaaggcgttatatggaatgtgaacagctacgaccagtggggggttgaacttggtaaacaactcgctggcaaaattttgccggaacttgaggaaggcgagaaagatccggatattgagctaaaccacgattcaagcaccaacgctctgataagatggtatttgaagaatagggagtaa

SEQ ID NO: 67964 - protein, 553 aa, Unknown
  Obtained from environmental sample
  DOMAIN (49)...(545): Phosphoglucose isomerase
  misc_feature (1)..(553): Xaa is any amino acid
MTKPNLLPEWKALEAQARIAQKTSMCELFKADPSRGTNYSAEACGIYLDYSKNRVNSDTLDLLGNLLRSCGFEEMRAKFFSGEKINHTEKRAVLHTALRYQGREPISVDGEDVMPKVKAVLAHIKEFTAQVRGGKWKGHSGKPIKTVVNIGIGGSDLGPVMACEALRHYADENSPEVYFVSNVDGTHIAETLKKVDLEETLWIVASKTFTTQETMTNANTAKTAVLAKFNGDIASIAKHFVALSTNAAEVFKFRHRHRKYVEFWDWVGGRYSLWSAIGLPIALRIGFENYTLLHAGAYDMDTHFREAPIEKNLPVILGLLGVWYNNFLCASSYTILPYDQYMHRFAAYFQQADMESNGKTIDREGHRVDYQTGPILWGEPGTNGQHAFYQLIHQGTKLIPCDFIAPVNSLNKISDHHRKLLSNFFAQTEALLNGKTLEEAQAELIKAGKTDAEVEFLAPHKVFEGNKPSNSILVKKIDPRTLGSLIAMYEHKIFVQGVIWNVNSYDQWGVELGKQLAGKILPELEEGEKDPDIELNHDSSTNALIRWYLKNRE

SEQ ID NO: 67965 - DNA, 1503 bp, Unknown
  Obtained from environmental sample
  misc_feature (1)..(1503): n is a, c, g, or t
atggccgagaaaaatccccgcatgatcatttctcagccatgcccggcgattgtaacttttatcgaaatttacctccctaaattactgccctatcttgctccggcggacagtcctattctgcataccataaaaatgatcaaagagtattatccccaatataaaaatcataaaatagcggtaatttccccatgcattgccaaacggcgggaatatgacgaaaccggtatgggaaattacaatgttacaatgcttgcgttaaaaaaacttctggaagatcagggtaaagatctttcttctttttcgtcggtagcatataccggattaagcgcggaacgggcggccgggtttcccattcccggaggattgttggataccgcagaacgttttaatccggggattaggcggcagaccctcaagattgagggagtatattccatctatccttatttggaagaactccctaaagtattggactccaatgtcaaactgccattgttggttgactgcctgaattgcgaaaaaggctgtaatggcggacccggaacggggaacgcagaaaaaccgctggccatgcttgaagaccctgtacgaaaacgtatagctaaattagaagaagatcaacattacccaaaaggaaataacgcatacaaaaaataccataatgccttgaacaagtactggaagaaaggtttgtacaaccgaagttaccgtgatatttctggaaacaatactataaagcaaccaagcgaggttgaactgactagaatctttcacagtatgaagaaattcaaagatgaggatatatacaactgtacttgctgcggttacggaagctgtaaatcaatggcngaggctattcacaatcagcttaatcaacctgannaatgcgcccattatattcttgccctgctcacggaagaaaaaagcgtagaagagcttaaccgtcagcttcaggaacaaattaaaaacgcctctgaccttattgacggaataaaccatttaataactaaactgaatgccgctatcagtacgcaggcggaaacaatcgctgaatccacagtggcgaccgaaaaaatgatcacctcgctcaaagatacttcggaaatgtcccgaaaaaaacaagagtccataaaagggttaatagaagacgccaccaaaggccaggagtccatgcggagtacaattaaatcggttgaagacatttcccagtcaatggacggcatagcgcaggctattaaaataatcagtgcaatagcggctaacactaacctgttgtctatgaacgcggcgattgaatccgcacacgcgggagaggcgggcagaggttttgcggtagttgccggtgagatacgccgtctttcggacagcacccgggaaaattcgcggaacatttcccagactttgaaaaacatcattgccggaataaccgttaccgaaaaacaatccagtgacaccggcgagcggattaccgcaatgtcaaaagaaatcagcagttttcgctga

SEQ ID NO: 67966 - protein, 500 aa, Unknown
  Obtained from environmental sample
  DOMAIN (329)...(500): Methyl-accepting chemotaxis protein (MCP) signaling domain
  misc_feature (1)..(500): Xaa is any amino acid
MAEKNPRMIISQPCPAIVTFIEIYLPKLLPYLAPADSPILHTIKMIKEYYPQYKNHKIAVISPCIAKRREYDETGMGNYNVTMLALKKLLEDQGKDLSSFSSVAYTGLSAERAAGFPIPGGLLDTAERFNPGIRRQTLKIEGVYSIYPYLEELPKVLDSNVKLPLLVDCLNCEKGCNGGPGTGNAEKPLAMLEDPVRKRIAKLEEDQHYPKGNNAYKKYHNALNKYWKKGLYNRSYRDISGNNTIKQPSEVELTRIFHSMKKFKDEDIYNCTCCGYGSCKSMAEAIHNQLNQPXXCAHYILALLTEEKSVEELNRQLQEQIKNASDLIDGINHLITKLNAAISTQAETIAESTVATEKMITSLKDTSEMSRKKQESIKGLIEDATKGQESMRSTIKSVEDISQSMDGIAQAIKIISAIAANTNLLSMNAAIESAHAGEAGRGFAVVAGEIRRLSDSTRENSRNISQTLKNIIAGITVTEKQSSDTGERITAMSKEISSFR

SEQ ID NO: 67967 - DNA, 417 bp, Unknown
  Obtained from environmental sample
  misc_feature (1)..(417): n is a, c, g, or t
ttgacaatgacggaaaaactgcgcacggcaatgcatgatttgactatgctgtcaaagaaaaaagtgcttgtaattgatgatgacgaacccgtccttatcatggtaaaagacgcgctgcaaaacaattgtaatgttactacaattaattccggcaaagcggctttggacttgttcctgcaggggtatattcctcatttggttttactggatttgaatatgcctgaaatgggcggctgggacgcctttgtcagaatacgcaacataacccaattacaccgcatccctatagcgatattcacgtcatcagacgaccagaaagacaaggaaaaagcgctggaattgggagcggttgaatacatacacaaaccgatcagcatagatgaactgcttgaaaaaatagcgaaattgactggctaa

SEQ ID NO: 67968 - protein, 138 aa, Unknown
  Obtained from environmental sample
  DOMAIN (20)...(134): Response regulator receiver domain
  misc_feature (1)..(138): Xaa is any amino acid
MTMTEKLRTAMHDLTMLSKKKVLVIDDDEPVLIMVKDALQNNCNVTTINSGKAALDLFLQGYIPHLVLLDLNMPEMGGWDAFVRIRNITQLHRIPIAIFTSSDDQKDKEKALELGAVEYIHKPISIDELLEKIAKLTG

SEQ ID NO: 67969 - DNA, 1206 bp, Unknown
  Obtained from environmental sample
  misc_feature (1)..(1206): n is a, c, g, or t
atgaataaactggttaaacgcaaacgatatctggcacagcttgacatgtggcggacggaaaaaatgataaaagtcattaccggcatacgcagatgcggcaagtctacattgtttgaactgtatatcgaacaactgaaagccggcggtgtgcctgatgatcagattatctttatcaatttggatgatgaagatttttccgggcttttggatcataagaaactgcacgagtatataaaggttcgcatcctgaaagacaaatggatgtatatttttattgatgaaattcaaaactgtaaaaattacgaaaaggcggtttcgagtctttatcttaaaaaaaaccttgatatataccttaccggctcaaacgcctatattctctctggcgaacttgcgaccaaactcactgcccgttacattgagattgatatgcttccgctttcttttgaagaatacagtgaagcggtgaaaatacccgacaaacgggaacgttttaaccaatatatgaacagaggcgcattcccttatgcaacccgttttatagacaattcattggcgcacagccagtatttagaaggggtttataacactgttctggttaaagatgttatgacaaataaaagtttgaaagatataaccttgattaaatctataacaagttttttagctgacaatgtgggaagtccggtttccgcaaagaaaatcgccaatacgctaagctccggcggccgccctacaggttccgccacggtcgatacttatttggaagcgctttgtgacgcgtaccttttctataaagtcaaccggtatgatattaaagggaagatgcaccttaaatcagaaagcaagtattatatttgcgacacgggcttacgaaatatgatactgggaacaacaaataaagatgtaggacaccagatagaaaatatcgtctttttagagctattaaggcgcgggtatacaattaatatcggaaaatcaggacggggtacggaggttgattttgtcgctgtccgtaacaataaacctgagtattatcaggtttccgcgtcggtgttagacgaaaacacattgaaacgggaacttacgccgtttaagcaaattaatgacaactacccgaaatgccttatcacaatggacgattttacaggcgataatgaaggcatacagcaagtcaatttgattgactggctgtataagtcaaattaa

SEQ ID NO: 67970 - protein, 401 aa, Unknown
  Obtained from environmental sample
  DOMAIN (3)...(179): Archaeal ATPase
  misc_feature (1)..(401): Xaa is any amino acid
MNKLVKRKRYLAQLDMWRTEKMIKVITGIRRCGKSTLFELYIEQLKAGGVPDDQIIFINLDDEDFSGLLDHKKLHEYIKVRILKDKWMYIFIDEIQNCKNYEKAVSSLYLKKNLDIYLTGSNAYILSGELATKLTARYIEIDMLPLSFEEYSEAVKIPDKRERFNQYMNRGAFPYATRFIDNSLAHSQYLEGVYNTVLVKDVMTNKSLKDITLIKSITSFLADNVGSPVSAKKIANTLSSGGRPTGSATVDTYLEALCDAYLFYKVNRYDIKGKMHLKSESKYYICDTGLRNMILGTTNKDVGHQIENIVFLELLRRGYTINIGKSGRGTEVDFVAVRNNKPEYYQVSASVLDENTLKRELTPFKQINDNYPKCLITMDDFTGDNEGIQQVNLIDWLYKSN

SEQ ID NO: 67971 - DNA, 1803 bp, Unknown
  Obtained from environmental sample
  misc_feature (1)..(1803): n is a, c, g, or t
gtgaaaaacgaggtaattgaaggcaaagtcaaacgcatttcagggcctattattcacgcgggaggtttgggtgcggcgggcctttttgatcttgtagaaatcggggaaaaacgcattataggcgaaattgtacggctggaagggagcgaggcagtcattcaggtttatgaagacaacacaggcttaaaaataggaagcccggcgcgctcaacaggaaggcccctctccgtactgctgggtcccgggcttatgggaacaatttacgacggcattcaaaggccgttgaacgttctctatgaacaggacggcgcgtttatgaaacccggcgacaggggcaaccccttagacccggataaaaaatggcgctttattcccgaccggcaattagccgcgaaaatcgccgccggtgaaacagtacccgccgccgccggaatgatacttggttcagtaaaagaaacggaaagcattacctgtaaaataatggttccgcctaatacatcaggcggcaatattaccgaattaaaaggcgaaggcgactacacggtttcgcagataatagcgaaaacaagcatgggagaggaaatccccatcgcgcaatggtggcctgtgcggacaagccgccccgtttccacgcgcctgccgccggacaaaccgcttatcacgggcgagcgcgtcatagacattttctttccgctttccaagggcggaaccgcggcgattcccggcggcttcggcacgggcaagaccatgacccagcacgcggtggcgaaatggtgcgacgcggacgtaattatctacataggctgcggagagcgcggcaatgaaatgacggacgtgcttacggaatttccggagcttcaggacccgcgctcggggcgcagtttaatggaaagaaccctgcttatagccaacacgtcgaatatgcccgttgcggcgcgtgaggtgtcaatttacacgggggtaacgcttgcggagtactaccgcgacatgggttaccatgtggcgattatggcggactccactagccgctgggcggaagcgttacgcgaactttccggccgcatggaagaaatgcccgccgaggagggattccccgcctatcttcccacgcggctcgcggaattttacgaacgcgcaggcagggtgcgcacactctgcggaatggaaggctcggtttcgataataggggcggtctcccctccgggcggcgacttctcggagcctgttacacaacatacaaaacgttttatccgctgtttctgggcattggacaaagacttggccaacgcccggcattatccggcgataagctggatagacagctactctgaatacgccgaggaagttcagcattggtgggaaggcgtaaatccgctgtggtctggcgtccgcaaaaaatgtatggatcttcttaaacaggaacaaaagttagctgaaattgtaaggctcataggacaggataccctgcccgacgaacaaaaacttatcttatatacggcgcaaataatcaaggacgggtttttacagcaaaattcgtttgacaatgttgacatgtactgcgttcccgaaaaacaggtaaggcttctggaaataataatggaattttacgatcgcgcccgcacatgcatccagcttggcgcgcctatgacaaaaatatcggcgacgggtttaaaggagggaatgtcccgccttaaaagcaccgtaaaaaacgactctctgggcgattttaacgagtttgacggaaaaatgcgctatacattggaagaactggagaggacttaccggacaaggggcgcggcgtga

SEQ ID NO: 67972 - protein, 600 aa, Unknown
  Obtained from environmental sample
  DOMAIN (10)...(72): ATP synthase alpha/beta family, beta-barrel domain
  misc_feature (1)..(600): Xaa is any amino acid
MKNEVIEGKVKRISGPIIHAGGLGAAGLFDLVEIGEKRIIGEIVRLEGSEAVIQVYEDNTGLKIGSPARSTGRPLSVLLGPGLMGTIYDGIQRPLNVLYEQDGAFMKPGDRGNPLDPDKKWRFIPDRQLAAKIAAGETVPAAAGMILGSVKETESITCKIMVPPNTSGGNITELKGEGDYTVSQIIAKTSMGEEIPIAQWWPVRTSRPVSTRLPPDKPLITGERVIDIFFPLSKGGTAAIPGGFGTGKTMTQHAVAKWCDADVIIYIGCGERGNEMTDVLTEFPELQDPRSGRSLMERTLLIANTSNMPVAAREVSIYTGVTLAEYYRDMGYHVAIMADSTSRWAEALRELSGRMEEMPAEEGFPAYLPTRLAEFYERAGRVRTLCGMEGSVSIIGAVSPPGGDFSEPVTQHTKRFIRCFWALDKDLANARHYPAISWIDSYSEYAEEVQHWWEGVNPLWSGVRKKCMDLLKQEQKLAEIVRLIGQDTLPDEQKLILYTAQIIKDGFLQQNSFDNVDMYCVPEKQVRLLEIIMEFYDRARTCIQLGAPMTKISATGLKEGMSRLKSTVKNDSLGDFNEFDGKMRYTLEELERTYRTRGAA

SEQ ID NO: 67973 - DNA, 333 bp, Unknown
  Obtained from environmental sample
  misc_feature (1)..(333): n is a, c, g, or t
atgccgaaaattacttttttgggagcgggcagtacggtttttgcccgaaatgttctaggcgattgcatgtcaaccgatgccctgcgtgacagtgagattgccctgtacgatattgacgctgtaaggcttaaagaaagcgaacggctggtaaacgcgattaacaaaggcaagggagggcgcgccagaatctcaagttacgcgggcattgaaaatcttgaaaaagcccttaaaggcgccgactttgccgtaaacgcgattcaggtgggcggatatgatcccgccacaattgctgatttgaaatcccgaaaaaatacggactgcgccagaccatag

SEQ ID NO: 67974 - protein, 110 aa, Unknown
  Obtained from environmental sample
  SIGNAL (1)...(20)
  misc_feature (1)..(110): Xaa is any amino acid
MPKITFLGAGSTVFARNVLGDCMSTDALRDSEIALYDIDAVRLKESERLVNAINKGKGGRARISSYAGIENLEKALKGADFAVNAIQVGGYDPATIADLKSRKNTDCARP

SEQ ID NO: 67975 - DNA, 507 bp, Unknown
  Obtained from environmental sample
  misc_feature (1)..(507): n is a, c, g, or t
gtgccattggcggagattatgccggatgccagcgtaacgtttaatgtgaataaactccgtctggaaatttcagtaccgcaaatcgccatcaaaagtaatgcccgtggttatgtcccccctgaacgttgggatgaagggatcaacgcgctattactgggatattcgtttagcggggctaacagtattcatagcagcgcagacagtgattctggcgacagctattttctgaatttaaacagtggcgttaatttaggcccatggagattgcgcaacaattcaacatggagtcgtagtagtggccaaaccgcagaatggaagaatctcagcagctatttgcaacgggcggttattcctctgaaaggcgaactgaccgtaggtgatgattatactgcaggcgattttttcgatagtgtcagctttcgtggtgtgcagctggcgtcagatgacaacatgctgccagacagcctgaaagggtttgcgccgatattgtttgcctgcaggaagtga

SEQ ID NO: 67976 - protein, 168 aa, Unknown
  Obtained from environmental sample
  misc_feature (1)..(168): Xaa is any amino acid
MPLAEIMPDASVTFNVNKLRLEISVPQIAIKSNARGYVPPERWDEGINALLLGYSFSGANSIHSSADSDSGDSYFLNLNSGVNLGPWRLRNNSTWSRSSGQTAEWKNLSSYLQRAVIPLKGELTVGDDYTAGDFFDSVSFRGVQLASDDNMLPDSLKGFAPILFACRK

SEQ ID NO: 67977 - DNA, 615 bp, Unknown
  Obtained from environmental sample
  misc_feature (1)..(615): n is a, c, g, or t
gtgatgggcgcgcacgaagttcatccgctgcatgtggaaaactggcccgatacctcgcactacgagtttctcgccgacactatgtggagcgattttgcctacggtcgcaatgccgtatacccggaagggcatcacggcaacgccgtactgtcgcgttatcccattgaacattatgagaatcgcgatgtttcggtcgatggtgcggaaaagcgcggcgtgctctactgccgcattgtgccgccgatgaccggaaaagcgattcatgtgatgtgcgtacatctgggcctgcgtgaggcgcaccgtcaggcgcagcttgcgatgctcgccgaatgggtgaatgagctaccggacggcgaaccggtattggtggcgggtgatttcaatgactggcggcaaaaagctaatcatccgttaaaagtgcaggccggactggatgagatttttacccgcgcccacggacgcccggcgcgcacgtttccggtgcaatttcctctactacgactggacaggatctacgtcaaaaatgccagcgccagcgcgccaaccgcgttgccgctgcggacatggcgacacctttctgatcatgcccctttaagtgcggagattcatttatga

SEQ ID NO: 67978 - protein, 204 aa, Unknown
  Obtained from environmental sample
  DOMAIN (1)...(202): Endonuclease/Exonuclease/phosphatase family
  misc_feature (1)..(204): Xaa is any amino acid
MMGAHEVHPLHVENWPDTSHYEFLADTMWSDFAYGRNAVYPEGHHGNAVLSRYPIEHYENRDVSVDGAEKRGVLYCRIVPPMTGKAIHVMCVHLGLREAHRQAQLAMLAEWVNELPDGEPVLVAGDFNDWRQKANHPLKVQAGLDEIFTRAHGRPARTFPVQFPLLRLDRIYVKNASASAPTALPLRTWRHLSDHAPLSAEIHL

SEQ ID NO: 67979 - DNA, 486 bp, Unknown
  Obtained from environmental sample
  misc_feature (1)..(486): n is a, c, g, or t
atgaaatgtagctggcgcgaaggcaataagatccagttgctggaaaacggcgagcaatattatcccgcggtgtttaaggcgattggcgaggcacaagaacgcatcattcttgaaacgtttatctggtttgaggatgacgtcggcaaacaactgcatgcggcactactggcagcagcgcaacgcggggttaaagcggaagtcttgctggatggctacggttcgccggatctcagcgatgagtttgtcaatgaactgacggcagctggcgtagtgttccgctactacgatccccgccctcgcctttttggtatgcgcaccaatgtgtttcgccggatgcatcgcaaaattgtggtgatcgacgcgcgtatagcctttattggcgggctgaattactccgccgagcatatgtccagctacggtccagaggctaaacaggattacgcggtacgccttgaagggccgattgtcgaagatattctacagtaa

SEQ ID NO: 67980 - protein, 161 aa, Unknown
  Obtained from environmental sample
  DOMAIN (108)...(135): Phospholipase D Active site motif
  misc_feature (1)..(161): Xaa is any amino acid
MKCSWREGNKIQLLENGEQYYPAVFKAIGEAQERIILETFIWFEDDVGKQLHAALLAAAQRGVKAEVLLDGYGSPDLSDEFVNELTAAGVVFRYYDPRPRLFGMRTNVFRRMHRKIVVIDARIAFIGGLNYSAEHMSSYGPEAKQDYAVRLEGPIVEDILQ

SEQ ID NO: 67981 - DNA, 348 bp, Unknown
  Obtained from environmental sample
  misc_feature (1)..(348): n is a, c, g, or t
ttgaagggccgattgtcgaagatattctacagtaaaggtcagggttgctatgccagcgcgggcggctgctatctgcaaggtaacgatgacctgaaagcagaaaccagcatcaacaaagagattggtctggagttcaaacgcgacgggtggctggcgggcgtcacctggttccgtaacgattatcgcaataagattgaagcgggctatgtggctgtagggcaaaacgcagtcggcaccgatctctatcagtgggataacgtgccgaaagcggtggttgaaggtctggaaggatcgttaaacgtaccggttaagcgaaacggggatgtgggaccaataacatccccttaa

SEQ ID NO: 67982 - protein, 115 aa, Unknown
  Obtained from environmental sample
  misc_feature (1)..(115): Xaa is any amino acid
MKGRLSKIFYSKGQGCYASAGGCYLQGNDDLKAETSINKEIGLEFKRDGWLAGVTWFRNDYRNKIEAGYVAVGQNAVGTDLYQWDNVPKAVVEGLEGSLNVPVKRNGDVGPITSP

SEQ ID NO: 67983 - DNA, 1398 bp, Unknown
  Obtained from environmental sample
  misc_feature (1)..(1398): n is a, c, g, or t
atgataaacctcattttgtgcggcggtgcgggaactaggctttggcctataagccgtacgcttttgcccaagcagtttgttaaaatttttggtgaccattccttgtttcagcgcattgcgattgtgaatagcggtttttgttccaagcagtgcatagttagcaacgcagagcaatattttttggcacgtgagcaattgcaggcgataagtcttgacaaaaccagttttatgctggagccaataggcagaaacacagcaccagctatagcccttgcttgccttgatttgtctccaaacgatatagttcttgtttctccaagcgaccacctaattagagatgcagaaaactattcaaaagcggtgaaaagagcaggggaacttgcagagcttggcaacatagttacatttggcttaaaaccaacaggaccagaaacaggctatggctatatagaagcaaatggcgagagcgttaagagatttgttgaaaaacccgatttggaaactgcaaaaaaatacatcgcagatggaaatttttattggaatagcggcatattctgctttaaagcaggggtgtttttgtcggaactaaatgaatatgcgccagctatgttcaatgcttgcaaagaagctcgcaaaaaagccgctactgaagattctcttgttcgcattcaccacgaagatatgatgaatatcccctcagattccatagactatgcagttatggaaaaatccaagaaagtgagcgttgttccttgttcaataggctggtcggacttgggtagctttgaaagcctttacaaagaacttccgcacgatatagagggcaacaccgaatatcagcaccacacatccataaattccaaaaactgcctgataatgggtaatcctgcatcaaatagggaaattgccaccatagatttggaaaatatgataatagtggatactatagatgctcttttggttgcgcctctttccagcagccaaaaggtgaaaaaactggtggatagtttaaaagaaaaacattcggatttgctccataccccgcaaactgtgattcgcccttggggaacctacgaagtgatagacgaaggagaacgtttcaaggttaagtgcatttgcgtaaaccccggtgagcgcttgtctttgcaaaaacacatgcaccgttcggaacactgggttgttgttagcggaatggcaaccgccaccattggggaagaaacagcttatgttcgcccaaacgagtctatttatatttctgcgggtacgcttcatcgcttgcaaaatgagggcaagctacctttgataatgttgagatacaggttggtgaatatactggcgaagatgatattattcgcatggacgacgactacgaaaggcataaatagcatttttcaataa

SEQ ID NO: 67984 - protein, 465 aa, Unknown
  Obtained from environmental sample
  DOMAIN (370)...(440): Cupin domain
  misc_feature (1)..(465): Xaa is any amino acid
MINLILCGGAGTRLWPISRTLLPKQFVKIFGDHSLFQRIAIVNSGFCSKQCIVSNAEQYFLAREQLQAISLDKTSFMLEPIGRNTAPAIALACLDLSPNDIVLVSPSDHLIRDAENYSKAVKRAGELAELGNIVTFGLKPTGPETGYGYIEANGESVKRFVEKPDLETAKKYIADGNFYWNSGIFCFKAGVFLSELNEYAPAMFNACKEARKKAATEDSLVRIHHEDMMNIPSDSIDYAVMEKSKKVSVVPCSIGWSDLGSFESLYKELPHDIEGNTEYQHHTSINSKNCLIMGNPASNREIATIDLENMIIVDTIDALLVAPLSSSQKVKKLVDSLKEKHSDLLHTPQTVIRPWGTYEVIDEGERFKVKCICVNPGERLSLQKHMHRSEHWVVVSGMATATIGEETAYVRPNESIYISAGTLHRLQNEGKLPLIMLRYRLVNILAKMILFAWTTTTKGINSIFQ

SEQ ID NO: 67985 - DNA, 2601 bp, Unknown
  Obtained from environmental sample
  misc_feature (1)..(2601): n is a, c, g, or t
atgaaggtaagcacatttatccttgatactcagggaccggctatttcgattaatgcgccaatcaataaggtttatcttggctcaggccagatagatgcttttgaaaatgctatgttaaaaaactcaactgaatcgctgggaactgatgacaagagaatatttttcagattacttaacaacaatgttaaagacgtatcagcagggctttccggcagtttctcagatacatactcggaaattggaacaaaatactggtacagttttaacggcggcgcatggagagaagaagacaccaatgtcagcaccgcagataataagaatactgtaggctggaaaataaatttaacaactcaatctgacggaacggttaaaatacctaatggtgaaacactgaaggatggcttaaacagccttagcatacgcgtaaaagattcgcgttccaatggttatgataaagacagtaacgatgttcctatcgaaggcggctacggctatgaaaccaatgttaactttatacttgatacaggcactcctgttttaagcgcggtaaccggagatttatcagacggaaacgtgccgactgtgcttggaccgatgacatcgtcggaatatgtcagagtaaacggagtaattaccggaacttatatggttaaacggctgagcgtatcattaggaagcggcgcgacgattgctttgacgaatgacggaaatataacatatcagaaaggagacacgaatattaaagacattcacttggagcctgttaatgctacaagtaaaacctttaattactatttcgatgttaacacttcaggccttgcgtacggttcgcggactattaccattaacgccttgggatcatcggataactctaacgtaaagacagtgtcttttatctatgacgacaaagggccgaatgtatccgtaagcgtgccgagcagcaagcttattatgaccaatgaagtcaagaatgatcttaattcagccttacttagcggttcgttagatcccatcacgcaaataccgttatacaacagtttaaaaaccatgctcataacggattcatcaaccaatttaagcggtacgtttaacgacgagtattccgcggtagccgataaatctactaataacacattctggtggcaaattgacggcggcgaatggaaagaaggaacacttgccgtttctaaagaaaaatccgtaagctgggacgttcctatatccggtcttttagacggcgtacatctgctcagcctccgtgtgaaagacgaatggggcaacggttccgacggtactgatttaggaaatggcggctatgaaaacaacatagcctttatgatcgaccgaagcgtccccgaaataaaggttactgacgcgccgccaataccaataaacggcggatatacttttaaaggaacaataaccaatacttacggggtaaaacggttaagcgtaaaacttggcaacaatgaactcgcatctattgaagaaggccagacaaaaccgggtattaccctgatacaaacacccggtaacggaagatcctttgattttacatttaatattgatccaagcataatggatgacggacccgcgtctcttgtgtttaacgccattggttcttccggacaggtggcaatgttaccaagcagctttacatttgataaaacagcgccgaagattaccattggagcgccaataagcgaaagtttctatgtaacagacgacaatcaatggaaagaacttaaaaatgcgtttaaggatgatgattttaccggagtatcctctggcgtaaatgatatttatgccaatatattcaaaacaagaataaaggacaactcagcttcatttacgattacctttaacgatgaccactcgcctgttttcttgggaggtaaagatttcttctggttcaaattggatgacgataccgaatggaaaccggcaatagtagatgaaaatgatcttaacagacagtctgtaagcattaaattgtctccaactgccggcgcaaagtggacggacggcgtacaccgcttgagtattcgcgcagtggactctctgggcaatggttacaatatatcaaccggaaatgacgctcccgaaacatcaagcggactcggttaccagagcaatcttgtctttatgattgacagcggcgcgcctgtactggactttaagattgataatccgaaatcgggaattatcaatacctctacgccgctggaaataagcggaaccattaatggaacatatgaagttcaggacatgagcgtaaaaatcggttcaacctcgataacaattgcttctgacgctgtaaaaagaaccggcaatgggaagaaggaatacagctttgcagaggttattattgatcagtccgaaatttacaccgctacaggcggaaatgaaggttcctacacgatcagcgtaaccgttaaaggttcttccgatcagtcggaaatgaaggtaaatacctttgttcttgacaccaagggaccggcgatttcgattaatgcgcctattaaggagaagatatacttaactccgggacagagaaccgatattaatgccgctattgaagataatgatatctcaatatga

SEQ ID NO: 67986 - protein, 866 aa, Unknown
  Obtained from environmental sample
  misc_feature (1)..(866): Xaa is any amino acid
MKVSTFILDTQGPAISINAPINKVYLGSGQIDAFENAMLKNSTESLGTDDKRIFFRLLNNNVKDVSAGLSGSFSDTYSEIGTKYWYSFNGGAWREEDTNVSTADNKNTVGWKINLTTQSDGTVKIPNGETLKDGLNSLSIRVKDSRSNGYDKDSNDVPIEGGYGYETNVNFILDTGTPVLSAVTGDLSDGNVPTVLGPMTSSEYVRVNGVITGTYMVKRLSVSLGSGATIALTNDGNITYQKGDTNIKDIHLEPVNATSKTFNYYFDVNTSGLAYGSRTITINALGSSDNSNVKTVSFIYDDKGPNVSVSVPSSKLIMTNEVKNDLNSALLSGSLDPITQIPLYNSLKTMLITDSSTNLSGTFNDEYSAVADKSTNNTFWWQIDGGEWKEGTLAVSKEKSVSWDVPISGLLDGVHLLSLRVKDEWGNGSDGTDLGNGGYENNIAFMIDRSVPEIKVTDAPPIPINGGYTFKGTITNTYGVKRLSVKLGNNELASIEEGQTKPGITLIQTPGNGRSFDFTFNIDPSIMDDGPASLVFNAIGSSGQVAMLPSSFTFDKTAPKITIGAPISESFYVTDDNQWKELKNAFKDDDFTGVSSGVNDIYANIFKTRIKDNSASFTITFNDDHSPVFLGGKDFFWFKLDDDTEWKPAIVDENDLNRQSVSIKLSPTAGAKWTDGVHRLSIRAVDSLGNGYNISTGNDAPETSSGLGYQSNLVFMIDSGAPVLDFKIDNPKSGIINTSTPLEISGTINGTYEVQDMSVKIGSTSITIASDAVKRTGNGKKEYSFAEVIIDQSEIYTATGGNEGSYTISVTVKGSSDQSEMKVNTFVLDTKGPAISINAPIKEKIYLTPGQRTDINAAIEDNDISI

SEQ ID NO: 67987 - DNA, 1506 bp, Unknown
  Obtained from environmental sample
  misc_feature (1)..(1506): n is a, c, g, or t
ttggaacgttccagttataacgataaacctgttaccattaattacggcagtaaaacggctaccaccaacaatttaaacatcgacgcaaaatccctatccgacaccgacgccattaccgttgaaccgtcttcaattacggcggtgacttataccggcaatgaattaaaaccggcgattacttacgtaaggcacactgttccaacaggcactataagaacattagatttgaacattgattacaagctggaatacagtaacaacagaaacgcaggaacagcgacaataaccataacaggcaaagaagactatacaggaactagaaccgtaaacttcactattaacaaagccgccggagcgacggtcaactcgccgacactggtcagtacgtcaggtgggagttcgggttataatgaaggctccgccaccataaaccccataactatcaatgggcagagcgttgaatacggaataagcacgacaaacgacgcctcaacggtaagcgtatggcaggacggactgactttcagcaatctgacaataggacttattgactatcaatttatattcgctcgctcgaaaggagacgacaaccatctaacaggtacggcaagcgcaggtttgcccgtaacgatccctttagtcatggtaaggtctaatactcgattggcaatgttacttaacagccttcctgacaacaatccagccaacccttataaaataaaattaagccagagtgaactcactttttccccaactggaggaaacatatctacatttataggtgataacgaatacttcagtcttgatatttcagacagtagcattgggcaaagagcttttcaagattgcactacccttaccagcgtaactataggaagcagcgttaccagcattgagaattatgcttttaatggttgcaccagtctttccagcgtaatcataggaaacgatgttaccagtattgggagtagcgcttttaacggttgtaccagtcttaccagcataaccataggaagcggagttaccagcattggggaaagtgcttttgatggttgcaccagtcttacaagtataaatattcctgacagcgttaacagcagcattgggaataccacttttcgaaattgcaccagtcttaccagcgtaatcataggaaacggtgttaccagtattgagcaacaggctttttacagctgcaccaaccttaccagtgtaaccataggaaacggagttaccagcattaatggtatggcttttatgaattgcaccagccttacaagcataactataccgaacaatgttaccagtattggattaggtgcttttggcgcttgcaccaaccttatcagcgtaagatttgaaagagttggtactactattggcaatattgcatttattgacactgctaacaggacatctttgcaaacagcgtatacagccggaggcataggaacatatacaagaccggatacgacaagcacaacgtggacaaaaatatcggattaa

SEQ ID NO: 67988 - protein, 501 aa, Unknown
  Obtained from environmental sample
  misc_feature (1)..(501): Xaa is any amino acid
MERSSYNDKPVTINYGSKTATTNNLNIDAKSLSDTDAITVEPSSITAVTYTGNELKPAITYVRHTVPTGTIRTLDLNIDYKLEYSNNRNAGTATITITGKEDYTGTRTVNFTINKAAGATVNSPTLVSTSGGSSGYNEGSATINPITINGQSVEYGISTTNDASTVSVWQDGLTFSNLTIGLIDYQFIFARSKGDDNHLTGTASAGLPVTIPLVMVRSNTRLAMLLNSLPDNNPANPYKIKLSQSELTFSPTGGNISTFIGDNEYFSLDISDSSIGQRAFQDCTTLTSVTIGSSVTSIENYAFNGCTSLSSVIIGNDVTSIGSSAFNGCTSLTSITIGSGVTSIGESAFDGCTSLTSINIPDSVNSSIGNTTFRNCTSLTSVIIGNGVTSIEQQAFYSCTNLTSVTIGNGVTSINGMAFMNCTSLTSITIPNNVTSIGLGAFGACTNLISVRFERVGTTIGNIAFIDTANRTSLQTAYTAGGIGTYTRPDTTSTTWTKISD

SEQ ID NO: 67989 - DNA, 2202 bp, Unknown
  Obtained from environmental sample
  misc_feature (1)..(2202): n is a, c, g, or t
ttgatcgcgagagctcaagacaggcaagaccccagcatcacgctcatattccctctcactgaacgcaaaggcgagagcctgctcgtttggacaacaacgccctggacgctgccctcaaaccttgccattgccgttggcgaggatatagactatgttttgatagacggctgctgggtagccgaggcaagagctggcacatatttcaaagagccaaaaatcacagccaaatgcaagggaaaagatttggcaggtctgcactacgaaccgctgttcaggcttgcggacggctttgcaactgcggaggaatccgccaaacgctacaccatttacaccgcgcctttcgtgagcgttgaagacggggcaggggcggttcatatcgcgccctcgtttggagaggaagactttgtgcttgggcaggaaatagggcttggtctgtttgatccattggacgcggagggcaaattcaccagcaaagttccgcagtggcaaggggtgggggctaaggaagccgacaaagccataatcgcgcatctcaaagaacaaggcagggtgttcaggcacgagacgctcgtgcatagctatccgcattgctggcggacaggcgttccgttgctatacagggcactcagcacttggtttatgaaactggacgcacccgtaacgaacgcggagggcacaaccaaatcagtcaaggaatggatgctcgcctgcaaccagcaaatagagtgggtgcccgaccacatcaaaaacggtcggttcggcaaatggctggaaaacgcacgcgactggaacctatcgcgcaaccgcttctggggaacgccaatacctgtgtggatagccgaagacggcgaaatgctctgcataggctcaatagaggaattaaaaaaagcaagcgggacagaattgcacgacttgcacaaacacttcgtggataaaatagcaataacaaaaaacggcaaaacattcaaacgcacaagcgaagtgtttgattgctggtttgagagcggagcaatgccttatgcccaaaaccactaccccttctccaacgcagaacacttcaacaaaaccttccccgccgacttcatcgccgaaggcttagaccaaacaagaggctggttctacacattgaccgtgctcgccgccgccctgttccaaaaacccgcattcaaaaacgtgatagtgaatggcataatcctcgccgaagacggctccaaaatgagcaagagcaaaaagaactaccccgaccccaccgaactcatagaccgcacaggagcggacgcagtccgcctgttcctcataaactccgccgccctcaaagccgaggaactgcggttcagcgaggagggcgtaaagcaaatagtgaaaagcgtgatgctcccattatggaacgcgctcggcttcttcatctccaaccacaacgcagactcctcaaaagggcagctcaaatggcaacccgcagacgaatggaaaagcgacaacgaactagacctttggataatcgcggtgctgcaagacctgagcaaaaaagtggaaaccgaaatggcagcataccgcctatacgccgtagtccccgtaatcctctcgttcatagacgacctcacaaactggtacgttcgccgaagccgccgccgtttctggaaaagcgacaacgacagcgacaaaaacaacgcctacgcaacactatacaaagcactcgtggatttcagcaaaatcctagccccattcctgccattcctcgcagaggagatttatcaaatactcgtgagggaagccaacccaaacgccccagtctctgtgcatctcacatcataccccgaacacaacgcagaatacgcaaacgaaaaactagtccgccgaatgtccttggttagaagcgccatagaaaaaggcagagcgatacgcagcgcaaacgagataaaaaaccgccagcccctaaaaacattgacattagttccccacaacgaggaagcaaagcaagtagcagagacaatgcaggatttaatccttgaagagctaaacgtagagcaactccatttcgctggcgatgacaccgagctagctaaaatctccgccaagcccaacttcgcaggcataaaagcaaaaggagcggactacgccaaaaatatgaaaaccctatccaccgccataaccgccttgaccgcccgagcaaatcaagcaaatccaaagcggcacaccgcttga

SEQ ID NO: 67990 - protein, 733 aa, Unknown
  Obtained from environmental sample
  DOMAIN (496)...(650): Anticodon-binding domain
  misc_feature (1)..(733): Xaa is any amino acid
MIARAQDRQDPSITLIFPLTERKGESLLVWTTTPWTLPSNLAIAVGEDIDYVLIDGCWVAEARAGTYFKEPKITAKCKGKDLAGLHYEPLFRLADGFATAEESAKRYTIYTAPFVSVEDGAGAVHIAPSFGEEDFVLGQEIGLGLFDPLDAEGKFTSKVPQWQGVGAKEADKAIIAHLKEQGRVFRHETLVHSYPHCWRTGVPLLYRALSTWFMKLDAPVTNAEGTTKSVKEWMLACNQQIEWVPDHIKNGRFGKWLENARDWNLSRNRFWGTPIPVWIAEDGEMLCIGSIEELKKASGTELHDLHKHFVDKIAITKNGKTFKRTSEVFDCWFESGAMPYAQNHYPFSNAEHFNKTFPADFIAEGLDQTRGWFYTLTVLAAALFQKPAFKNVIVNGIILAEDGSKMSKSKKNYPDPTELIDRTGADAVRLFLINSAALKAEELRFSEEGVKQIVKSVMLPLWNALGFFISNHNADSSKGQLKWQPADEWKSDNELDLWIIAVLQDLSKKVETEMAAYRLYAVVPVILSFIDDLTNWYVRRSRRRFWKSDNDSDKNNAYATLYKALVDFSKILAPFLPFLAEEIYQILVREANPNAPVSVHLTSYPEHNAEYANEKLVRRMSLVRSAIEKGRAIRSANEIKNRQPLKTLTLVPHNEEAKQVAETMQDLILEELNVEQLHFAGDDTELAKISAKPNFAGIKAKGADYAKNMKTLSTAITALTARANQANPKRHTA

SEQ ID NO: 67991 - DNA, 360 bp, Unknown
  Obtained from environmental sample
  misc_feature (1)..(360): n is a, c, g, or t
atgctagtccgcgaggtagccgaaggtctcgccgttgaagcagacgaaaactacaccatagccttggatttgaaaataacgccagagctgcgtcaaagctgcatagcgagagagctggtgaatcgcatacagaaccgccgcaaggaaatggatttgcagattacggacaagataaagatagcgttgaaagggcttgatggtgatttacaaactgccgtagaaaaacataaagcctatattttggaagaaacgcaagggttggaagttttgtgtggcggagatgttggtggcgtgtttgtttctgtcaatgttgaaggatatgaaatagaaatttccatttcaccaaatttggcacaataa

SEQ ID NO: 67992 - protein, 119 aa, Unknown
  Obtained from environmental sample
  misc_feature (1)..(119): Xaa is any amino acid
MLVREVAEGLAVEADENYTIALDLKITPELRQSCIARELVNRIQNRRKEMDLQITDKIKIALKGLDGDLQTAVEKHKAYILEETQGLEVLCGGDVGGVFVSVNVEGYEIEISISPNLAQ

SEQ ID NO: 67993 - DNA, 330 bp, Unknown
  Obtained from environmental sample
  misc_feature (1)..(330): n is a, c, g, or t
gtgaaattgaggaggaaaacaatggctaaaaaattttcggaacttgaagcaaaaatgagcccggagcgaagggggcgaataaacaatgaagtaaaaaaggccttggccgaaatgccaatccatgaactgcgaaacgcccgcggcctttcccaaagggtacttgccgaagccctgcatatacagcaaccagccgttgcaaagatggaaaaacgtacagacatgtatatttccacattgcgcagccacattgaagctatgggcggagagcttgaaatcatcgcgcggtttcccggatggaatgtaagaatctccaacttttcgcagatttaa

SEQ ID NO: 67994 - protein, 109 aa, Unknown
  Obtained from environmental sample
  DOMAIN (40)...(93): Helix-turn-helix
  misc_feature (1)..(109): Xaa is any amino acid
MKLRRKTMAKKFSELEAKMSPERRGRINNEVKKALAEMPIHELRNARGLSQRVLAEALHIQQPAVAKMEKRTDMYISTLRSHIEAMGGELEIIARFPGWNVRISNFSQI

SEQ ID NO: 67995 - DNA, 357 bp, Unknown
  Obtained from environmental sample
  misc_feature (1)..(357): n is a, c, g, or t
atgtgggaagtcgaatacaccgatgaatttggagaatggtgggagacattgagcgaagcggaacaagacgctgttacattctcagtagggttattacggagtgaaggcccgtctttgagatttccttacagtactggtgttatacagtcaaaacataagtccatgcgggaattacggagtcaatgcaagggacagccattacggacattttatgcttttgatccaagacgtaccgcaattcttttaatcggcggagataagacagggaatgatagattttatgatattatagttccgttggcggatcaaatttatgataattatctgagtgaaattgaggaggaaaacaatggctaa

SEQ ID NO: 67996 - protein, 118 aa, Unknown
  Obtained from environmental sample
  misc_feature (1)..(118): Xaa is any amino acid
MWEVEYTDEFGEWWETLSEAEQDAVTFSVGLLRSEGPSLRFPYSTGVIQSKHKSMRELRSQCKGQPLRTFYAFDPRRTAILLIGGDKTGNDRFYDIIVPLADQIYDNYLSEIEEENNG

SEQ ID NO: 67997 - DNA, 1089 bp, Unknown
  Obtained from environmental sample
  misc_feature (1)..(1089): n is a, c, g, or t
atgggttatgaacactggggcgcgcgcgaaataaaagtccgtctgccggacggagctgttagcggaaatcttgaagtaagaacgcctcacggaaaatcgcgcagtttcttttttgatgtcagcggaaaacccggatttaaaaacataaaagataaacgcggttacacggtaacatactcggttgatatcagagtaacggacgcctcaagaccgaatatgctctatctgtggataccaaaaccgataaactccccttctcaaagaaacgttacccttgtctcgcgttctattgaaccatttatggaaaattacaagggcgtcagtctttataaattggacaatcttttagccggaacaaatcaatctatcaatctttcataccgcgtagaagtatattccatagaatcgggaataaagccgctttccataaaacaggaagctacggaactttccgcggtacacactaaaagctcaagtttaattccaagcgatactccgcaaataaagactgcggcaaatttaattgtaaacagagaacaaaacccgtatatcaaggcaaaagctatatacgactggataataaacaatatgcaaatttcagactcggcggcttcaaaaagtattattgaagcgctggaacaaaaacgaggcgacccgtactccgccgccctgctgtacaccgcgttaacccgcgccgccggcgttccgtgtattcctgttgcgggcgttttagtaaatcaaaacgggtatacattacgccattactgggctgaattctggatagacggtttcggctggctgccggttgatcctgttatgggcgcgggagcgattaggcttacagacagcacaaaccggcagtttactgatgaaacagaaaaagatttggcggctttttattttggcaatttggataatcagcgtatagcgttttccagaggagagcttatcctttcgcaaattgaaaaccgaggcagacttgtttcacatccgcagtcatattcactgcaaaatgtttgggaagaatccgcgggagggcttgaatcgtattccagcctttggggggatattattatcagtggtatatag

SEQ ID NO: 67998 - protein, 362 aa, Unknown
  Obtained from environmental sample
  DOMAIN (214)...(272): Transglutaminase-like superfamily
  misc_feature (1)..(362): Xaa is any amino acid
MGYEHWGAREIKVRLPDGAVSGNLEVRTPHGKSRSFFFDVSGKPGFKNIKDKRGYTVTYSVDIRVTDASRPNMLYLWIPKPINSPSQRNVTLVSRSIEPFMENYKGVSLYKLDNLLAGTNQSINLSYRVEVYSIESGIKPLSIKQEATELSAVHTKSSSLIPSDTPQIKTAANLIVNREQNPYIKAKAIYDWIINNMQISDSAASKSIIEALEQKRGDPYSAALLYTALTRAAGVPCIPVAGVLVNQNGYTLRHYWAEFWIDGFGWLPVDPVMGAGAIRLTDSTNRQFTDETEKDLAAFYFGNLDNQRIAFSRGELILSQIENRGRLVSHPQSYSLQNVWEESAGGLESYSSLWGDIIISGI

SEQ ID NO: 67999 - DNA, 711 bp, Unknown
  Obtained from environmental sample
  misc_feature (1)..(711): n is a, c, g, or t
ttgggaaaactgaacgtatacggctccgtgttccaattcgacgggcaggcgacagtcttcggcgcgaaggacggcccctgctaccgatgcctctacccgtccccgccgcctccgggacttgtcccctcttgcgcggaaggcggagtcatgggcgtactgcccggcattatcggaaccattcaagcggcggaaacgattaagctcatcgtcggcggcgcgaaaccgcttgtcggccgtcttcttttatttgacgcgtggcgcatggcgttccgcgaattaaaacttgataaaaatccggactgtcccgtttgcgggaaaaatccttccattcatgaacttatagactacgaacaattttgcggtttgaaaaaaaataccgacagcaagcctatagataccataaccgccatcgaattaaaaaaacgccttgataacggagataaaattcaatttatagatataagagagccccatgaacgcgccattgtaaaattcccggacgcgaaagtaattcccctcggccagcttgaaaggcgcatggaagaaatagacccggccatagacgcggtgtttctgtgcaaaatcggacagcgcagcattttgggaatacgcacattacaggacgcaggctacaaaggaaaacttttgaaccttcaggacggactaaacgcgtgggcccgcgatgtagacaagagtatgccggtttattga

SEQ ID NO: 68000 - protein, 236 aa, Unknown
  Obtained from environmental sample
  DOMAIN (23)...(108): MoeZ/MoeB domain
  misc_feature (1)..(236): Xaa is any amino acid
MGKLNVYGSVFQFDGQATVFGAKDGPCYRCLYPSPPPPGLVPSCAEGGVMGVLPGIIGTIQAAETIKLIVGGAKPLVGRLLLFDAWRMAFRELKLDKNPDCPVCGKNPSIHELIDYEQFCGLKKNTDSKPIDTITAIELKKRLDNGDKIQFIDIREPHERAIVKFPDAKVIPLGQLERRMEEIDPAIDAVFLCKIGQRSILGIRTLQDAGYKGKLLNLQDGLNAWARDVDKSMPVY

SEQ ID NO: 68001 - DNA, 714 bp, Unknown
  Obtained from environmental sample
  misc_feature (1)..(714): n is a, c, g, or t
ttgataaaagttctcattccctacgcgctcagggcatttacggagcgcaacgccgaggtggaagtaaatggcgctacggcgggtgatgcggttaacgctcttgcaaacgcctatcccgccctcaaaacccacctgttcactgaagacggtcagcttcgtgacttcatcaacttgtttgtaggcggtgtaaatatcaacagtctgcagggactgaacacgcccgttgcggataatagcgaagtgatgattgttcccgccatcgcaggtggcagtgatggcgataaaatcggcgattttatcggtgcggagcttaccaatgaagaaatcgcgcgttatagccgccatttgcttttacctgaaattggcgttgaagggcaaaagaaattaaaagcggctaaagtcctcattgttggtacgggcgggcttggagcgccgcttgccctgtaccttgctgcggcgggcgttggaacaatcggtcttgtggattttgacgtggtggacgaatcgaatcttcaacggcagattattcacagcacccgcgacgttggcagacccaaaaccgcgtccgcaaaggacagaatcaaggggataaatccgctaataaacgtggtaacgcacaatgcgatgcttacaagccagaacgcgctggaactttttgccgattatgacattatcgcggacggaaccgacaattttcaacgcgctaccttgtaa

SEQ ID NO: 68002 - protein, 237 aa, Unknown
  Obtained from environmental sample
  DOMAIN (4)...(90): ThiS family
  misc_feature (1)..(237): Xaa is any amino acid
MIKVLIPYALRAFTERNAEVEVNGATAGDAVNALANAYPALKTHLFTEDGQLRDFINLFVGGVNINSLQGLNTPVADNSEVMIVPAIAGGSDGDKIGDFIGAELTNEEIARYSRHLLLPEIGVEGQKKLKAAKVLIVGTGGLGAPLALYLAAAGVGTIGLVDFDVVDESNLQRQIIHSTRDVGRPKTASAKDRIKGINPLINVVTHNAMLTSQNALELFADYDIIADGTDNFQRATL

SEQ ID NO: 68003 - DNA, 2799 bp, Unknown
  Obtained from environmental sample
  misc_feature (1)..(2799): n is a, c, g, or t
ttgttgcgtcccggtcttgaaaaattaaaaatactaaattccttttgtgcgcaaattatcatcgttcttgccgcgattattataacaggaattctcactttccttttctttagtaatattgaacacgaacatttaacagaagaagttgaaagggcccttatctttacggaaaatgaaatccttatgactttcaaggaaccggaagattttcttatcagttattccgaaacaatacgaagcatgattataggaggctacgcttatgacacgcttccggcatatatctcgtctatcaacggttttttgacgaagcacctgaataaggaaggattaatcgggcttcacggcttttttaattctttaggcgataaatatataccctgcggcaacatgactgtgccgaaaaattttaacccaaaggaaaccgaatggtatatattggccgacacggctaaaggcaaaaccgccgtttccaatccttacacaagtccttttcattccattaatataatgacgttttcacgcgttatctttgatgataaaggcagccccttaggcgtagtctgccttgatctggatttaagaaggtttgccggcattgtttttaattttaaaactacggaaaacagttacgggtttttactaaacgaaaaactggatgtgatagttcaccccgcgttcttttcggtaaatgatcaagttatcaatattgataacggattgtccgtcattattccggatttggagagcggcttaaatttttccccgtacaaaacaaaaaattacatgtatgtggattccgtcgtttattttaaggatataagtcacgggtggcatcttggcctcgtaattccggaaagagaatattatgaaaatatttccaaaatagccgccgcccttataacaggatctattttattggcggcgctgctgtgctttattttgtaccatatttacaacgcaaaaattgattctgataaaaaaaccaggcaaaaaaccaatttcctcgctacaatgagccacgaactccggacgccgttaaacgctatcctgggcatggcggaaatccaaatgcaaaataccgcgcatccggcggcaacaagcgagtcgtttatcaaaattaacaattcgggcactctgctgttaaacatcattaacgacatactggatctttccaaaattgaaaccggcgattttgagcttttgccgaaaaaatatgaagtcgcgagtttgattaacgatgtcgcccaattaaactatatccgttacgagggcgcgtccgtcgattttattgtcaaggtagacgaaaaaacaccggcatctcttgtaggcgacgagcttcgcattaaacaggtattgaataacctgctttccaacgcctttaagtataccgaaaaaggctctgttacgctctctacagaggccgaatgcgtgacccgcggcggaactgtccttgtaacccttatttttaagattattgacacgggacagggcatgacgcagaaacaggtggacaacctttttaacgaatatacgcattttaacatggaagccaacaggacaaccgagggcgcgggccttggaatgactattacgcggaatttagtagagcttatgaacgggcagatcagcataaaaagcgcgattggcgaagggacgacagtaaccgtgcgcataccgcaaaaaacgcccggcataggcgtgcgcgacttaatcggcaaggaaatgaccgaaagccttaaacagttcaagctgggcaatgtcgtacagttaaaaaaatcgcaggttaaacatgaatacatgccttacggcagcgtccttattaccgacgacgttgaaacaaatttatacgtggcgaaaggtcttatggccccgtacggccttaacatcgaccttgccacaagcgggtttgaagccatcgaaaaagtaaaaaacgggaacgtttacgacataatatttatggaccacatgatgcctaaactggacggcatagaaacgacaaaaattatccgcgaaacgggatacacgcaccccattgtagcgttgacagctaacgcccttgccgggcaggcggaagtgtttttgaaaaacggttttgacgattttatttccaaacctattgatatacgccagttaaacgccgcgcttataaaacatatacgcagcaaacagtctccggaaacgctggacgccgcgcaaaaagaaaaagaagaatttgacaaaaaacaggcggccgccggcggcggcaaggggcagcaggtagacccgcagcttgcgaacatcttcgcgagggacgcggaaaaggctattaatgtgctggacggcgttttacagaaaaattttaaaacagaaagcgacatacagctttacattatcaacgttcatgcgatgaagagcgcgcttgccaacataggagaacaggaactgtcatcttccgcgttaaagctggaacaagcgggcagggaaaaagacttaaaaactatgaaggcggaaacaaataatttccttgaagcgcttaaagcggttatcgaaaaaattaaacccaaggacgaggacgacgcgggcattgaagattcagaagaagcccttgtgtttttacgcgaaaaacttacggaaattaaaaacgcgtgcgacgcttacgataaaaaaaccgttaaaaacacccttaacgaacttaaagaaaaaacctggtcgcgtaataccaaagaactgatgaacaccatcgccgatcatttattgcacagcgagtttgacgaagtctcagctctcgcggacagttacattaaatccatagaatag

SEQ ID NO: 68004 - protein, 932 aa, Unknown
  Obtained from environmental sample
  DOMAIN (157)...(237): Cache domain
  misc_feature (1)..(932): Xaa is any amino acid
MLRPGLEKLKILNSFCAQIIIVLAAIIITGILTFLFFSNIEHEHLTEEVERALIFTENEILMTFKEPEDFLISYSETIRSMIIGGYAYDTLPAYISSINGFLTKHLNKEGLIGLHGFFNSLGDKYIPCGNMTVPKNFNPKETEWYILADTAKGKTAVSNPYTSPFHSINIMTFSRVIFDDKGSPLGVVCLDLDLRRFAGIVFNFKTTENSYGFLLNEKLDVIVHPAFFSVNDQVINIDNGLSVIIPDLESGLNFSPYKTKNYMYVDSVVYFKDISHGWHLGLVIPEREYYENISKIAAALITGSILLAALLCFILYHIYNAKIDSDKKTRQKTNFLATMSHELRTPLNAILGMAEIQMQNTAHPAATSESFIKINNSGTLLLNIINDILDLSKIETGDFELLPKKYEVASLINDVAQLNYIRYEGASVDFIVKVDEKTPASLVGDELRIKQVLNNLLSNAFKYTEKGSVTLSTEAECVTRGGTVLVTLIFKIIDTGQGMTQKQVDNLFNEYTHFNMEANRTTEGAGLGMTITRNLVELMNGQISIKSAIGEGTTVTVRIPQKTPGIGVRDLIGKEMTESLKQFKLGNVVQLKKSQVKHEYMPYGSVLITDDVETNLYVAKGLMAPYGLNIDLATSGFEAIEKVKNGNVYDIIFMDHMMPKLDGIETTKIIRETGYTHPIVALTANALAGQAEVFLKNGFDDFISKPIDIRQLNAALIKHIRSKQSPETLDAAQKEKEEFDKKQAAAGGGKGQQVDPQLANIFARDAEKAINVLDGVLQKNFKTESDIQLYIINVHAMKSALANIGEQELSSSALKLEQAGREKDLKTMKAETNNFLEALKAVIEKIKPKDEDDAGIEDSEEALVFLREKLTEIKNACDAYDKKTVKNTLNELKEKTWSRNTKELMNTIADHLLHSEFDEVSALADSYIKSIE

SEQ ID NO: 68005 - DNA, 1962 bp, Unknown
  Obtained from environmental sample
  misc_feature (1)..(1962): n is a, c, g, or t
atgatcagatcggccgaggttagccacgattattcagcacaaaatatcaccgttttggagggccttgagcctgtccgcatgcgtccgggcatgtatattgggacgacgagcattgacggactgcaccacctggtttttgaggttgtcgataacgccattgacgaggccatgcagggtttttgtaccgatattctcgtggttctggaggggaatgatgtggtacgggtggaggacaacggccggggcatacccgtggacatacaccccaccgagcgcgtaagcgccctggaactggtaatgacgcggctccacgcgggcggcaaattcgataaaaaatcctacaaggtttccggcggccttcacggggtcggcgtttccgtggtgaacgccctttccgaatggtgcgaggcctttgtccacgccggcgacaaaatcttcactcaacgctacaaaaaaggcatacccgaaaaagcggtccacgagaccaacgcctccgccctcccctacaacccaagattgcaaaagggtacggtagtccgctggaaagcagacgcttcggtttttgaaaccaccacccacaattttgacgccctttccaaccgcctgcgggaactggccttcctcaacaagggccttaagatcacaatccgcgacgagaggctttccaatcctaaagttcacgagttcaaatttgagggcggggtaaaaagctttgtcgaatacctgaacgaaaacaaaaccgtcctgtacagggaaccgctttaccttgagggcaaacgcgacgatggtcagggcggagaagtcgaggttgagtgcgccatacaatacaacgacggctttaacgaaataatgttttcgtttgttaatgatattaacacgcgcgagggcggcacccacctgataggcttcaaaaccgcccttacccgaaccctgaacgatttcctgaaaaaatccaaacaggcaaaaaaactggaagagagcctttccggcgacgacgtgcgcgaagggcttaccgcggtgctttcggtgaaagtccccaatccgcagtttgagggccagaccaagggcaagctgggtaactcagaagtaaagggcattgtcgaatcctttataagcgaacagcttgagcttttcttcgacaagaaccccgacgttataaacaacatactggaaaaatcggtactcgcggcaaaggccagaattgccgcgcgccaggcgagggacgcgacccgccgcaaaaacgcgatggactccgccggcctgcccggaaagctcgccgactgctcggaaaaagacccggcaatgtgcgaactgtttatcgtagagggcgactcggccggcggttccgccaagcagggccgcgaccgccgtactcaggctatactctcccttttcggcaagatgctcaatgtggagaagacccgcattgagaaagtcatcaccaacgaaaaactgcagcccgttatcgccagcataggcgccggctgcggcaacgattttgacatttccaaaatacgctaccataaggttatcatcatggcggacgccgacgtagacggctcccacatccgcacattgcttttaacattcttctaccgttatatgacgccgcttattgagcagggtcacgtatatcttgccatgccgcctctttacaaaatcagctacgacaaaaaaaacttttacgcctacgacgacgctgaaaaagaccgcatcctttccgaatccggcaaagacccggaaaaagtgtccgtacagcgctacaaaggcttaggagaaatgaaccccgaccagttatgcgacacgacaatggaccccggcaagcgcaacataattcaagtgcatcttgacgacacggtagaagcggagcgcattttcacaacactaatgggagaagtagtccaaccccgccgcgaatttatcgaggaaaacgcgcttcttgtcagcaatttggacgtgtaa

SEQ ID NO: 68006 - protein, 653 aa, Unknown
  Obtained from environmental sample
  DOMAIN (436)...(547): Toprim domain
  misc_feature (1)..(653): Xaa is any amino acid
MIRSAEVSHDYSAQNITVLEGLEPVRMRPGMYIGTTSIDGLHHLVFEVVDNAIDEAMQGFCTDILVVLEGNDVVRVEDNGRGIPVDIHPTERVSALELVMTRLHAGGKFDKKSYKVSGGLHGVGVSVVNALSEWCEAFVHAGDKIFTQRYKKGIPEKAVHETNASALPYNPRLQKGTVVRWKADASVFETTTHNFDALSNRLRELAFLNKGLKITIRDERLSNPKVHEFKFEGGVKSFVEYLNENKTVLYREPLYLEGKRDDGQGGEVEVECAIQYNDGFNEIMFSFVNDINTREGGTHLIGFKTALTRTLNDFLKKSKQAKKLEESLSGDDVREGLTAVLSVKVPNPQFEGQTKGKLGNSEVKGIVESFISEQLELFFDKNPDVINNILEKSVLAAKARIAARQARDATRRKNAMDSAGLPGKLADCSEKDPAMCELFIVEGDSAGGSAKQGRDRRTQAILSLFGKMLNVEKTRIEKVITNEKLQPVIASIGAGCGNDFDISKIRYHKVIIMADADVDGSHIRTLLLTFFYRYMTPLIEQGHVYLAMPPLYKISYDKKNFYAYDDAEKDRILSESGKDPEKVSVQRYKGLGEMNPDQLCDTTMDPGKRNIIQVHLDDTVEAERIFTTLMGEVVQPRREFIEENALLVSNLDV

SEQ ID NO: 68007 - DNA, 486 bp, Unknown
  Obtained from environmental sample
  misc_feature (1)..(486): n is a, c, g, or t
gtgggagccgtctacgtcggcgtccgccatgatgataaccttatggtagcgtattttggaaatgtcaaaatcgttgccgcagccggcgcctatgctggcgataacgggctgcagtttttcgttggtgatgactttctcaatgcgggtcttctccacattgagcatcttgccgaaaagggagagtatagcctgagtacggcggtcgcggccctgcttggcggaaccgccggccgagtcgccctctacgataaacagttcgcacattgccgggtctttttccgagcagtcggcgagctttccgggcaggccggcggagtccatcgcgtttttgcggcgggtcgcgtccctcgcctggcgcgcggcaattctggcctttgccgcgagtaccgatttttccagtatgttgtttataacgtcggggttcttgtcgaagaaaagctcaagctgttcgcttataaaggattcgacaatgccctttacttctga

SEQ ID NO: 68008 - protein, 161 aa, Unknown
  Obtained from environmental sample
  misc_feature (1)..(161): Xaa is any amino acid
MGAVYVGVRHDDNLMVAYFGNVKIVAAAGAYAGDNGLQFFVGDDFLNAGLLHIEHLAEKGEYSLSTAVAALLGGTAGRVALYDKQFAHCRVFFRAVGELSGQAGGVHRVFAAGRVPRLARGNSGLCREYRFFQYVVYNVGVLVEEKLKLFAYKGFDNALYF

SEQ ID NO: 68009 - DNA, 864 bp, Unknown
  Obtained from environmental sample
  misc_feature (1)..(864): n is a, c, g, or t
gtgggtgccgccctcgcgcgtgttaatatcattaacaaacgaaaacattatttcgttaaagccgtcgttgtattgtatggcgcactcaacctcgacttctccgccctgaccatcgtcgcgtttgccctcaaggtaaagcggttccctgtacaggacggttttgttttcgttcaggtattcgacaaagctttttaccccgccctcaaatttgaactcgtgaactttaggattggaaagcctctcgtcgcggattgtgatcttaaggcccttgttgaggaaggccagttcccgcaggcggttggaaagggcgtcaaaattgtgggtggtggtttcaaaaaccgaagcgtctgctttccagcggactaccgtacccttttgcaatcttgggttgtaggggagggcggaggcgttggtctcgtggaccgctttttcgggtatgccttttttgtagcgttgagtgaagattttgtcgccggcgtggacaaaggcctcgcaccattcggaaagggcgttcaccacggaaacgccgaccccgtgaaggccgccggaaaccttgtaggattttttatcgaatttgccgcccgcgtggagccgcgtcattaccagttccagggcgcttacgcgctcggtggggtgtatgtccacgggtatgccccggccgttgtcctccacccgtaccacatcattcccctccagaaccacgagaatatcggtacaaaaaccctgcatggcctcgtcaatggcgttatcgacaacctcaaaaaccaggtggtgcagtccgtcaatgctcgtcgtcccaatatacatgcccggacgcatgcggacaggctcaaggccctccaaaacggtgatattttgtgctga

SEQ ID NO: 68010 - protein, 287 aa, Unknown
  Obtained from environmental sample
  misc_feature (1)..(287): Xaa is any amino acid
MGAALARVNIINKRKHYFVKAVVVLYGALNLDFSALTIVAFALKVKRFPVQDGFVFVQVFDKAFYPALKFELVNFRIGKPLVADCDLKALVEEGQFPQAVGKGVKIVGGGFKNRSVCFPADYRTLLQSWVVGEGGGVGLVDRFFGYAFFVALSEDFVAGVDKGLAPFGKGVHHGNADPVKAAGNLVGFFIEFAARVEPRHYQFQGAYALGGVYVHGYAPAVVLHPYHIIPLQNHENIGTKTLHGLVNGVIDNLKNQVVQSVNARRPNIHARTHADRLKALQNGDILC

SEQ ID NO: 68011 - DNA, 1830 bp, Unknown
  Obtained from environmental sample
  misc_feature (1)..(1830): n is a, c, g, or t
atggaagacctgaaacaaaagaagaaaataatcgccgtagccgcccctgctgtagcttcgttttttcccgataaatttctcaacttaaacggatacttaaaatcactgggcgttgaagatttttttgacgtaagcttgggagcggaactaaccgtcatttcatatcttgactacatcaaagaaaaaaaaccccgaacggtaatcgcgcagccttgccccgcgattgtaacttatatcgaaattcatcaccctgaattattgccgtttctcgctccggcggacagccctatcctgcatacaattaaaatgataagaaaattttatcctaaatataaaaaccacaagatagcggtaatttctccctgtattgccaaacggcgtgaatatgacgaaacaggtctgggtgattacaacgttacaatgattgaattaaaaaaccttctggaaagtcaaagaatagacctctcctcatttccaaaagaagaatataccggagtaagcgcggaacgggcggcaggttttccgattcccggagggcttttggataccgccgaacgttttgttcccggtatcagacggcgcaccgaaaaaatcgaaggagtccataatatctatccttacttgactgaaatatcggaaatattgaacaccgatgccgaactgccgttattgattgactgcctgaattgcgaaaaaggctgtatcggcggacccggtacggggaacgccgaaaaaccgcttgctgtacttaaagaacctgtacaaaagcgcatggctgaactggaaaaaaaacatcatcctcaaattggaattaacgcatacaaaaaataccacgatgaattgagaaagtattggaagaaaaaactatataaccggagctaccgcaatctttccgagaacaatacaatcaaacatccgagcgaaactgaaataactgaaattttccatactatgaaaaaattcaaaaaagaagatatatacaactgtacctgctgcggttacggaagctgtaaagcgatggcaacggcaatttacaacaatctgaacaaacatgataattgcgcccattatattcttgccttgctcaaggagaatcaggaacacattgccagcgcttcagaccttattgaaaggataaacaaattaatacaagaattgaacgctactatcagttcacaggcgagggcggttgataactcatcagcggaaaccgaagaaataatttcctcaattaaaaacacttcggaaatgtcccaaaaacagcaggaatcagtaaaagagttgatggaagttgcgggacttggacaggagtccatgaaaaaaaccattcaatcaataagtgaaatctctcaatctgttgaaggtataagttcgacaatccgcataatttcttcaatagcggcaaataccaatttgctgtcaatgaatgcggcgattgaagccgcccacgccggagaagccggaagaggctttgcggtagtcgccggagaaatacgccgtctttcagaaaccaccagagataattcagtaagtatttcccgtacacttaaaagtattatcggcgggatatccgacacgacaaaacaatccggcgagacagatacacgaatagcccaaatgtccaaagagataagcggttttgccgaaactatgtctgcttttatgaacacgtttaatgaattatcggcaaaaagcggaaacattaccacctcccttgtaagcctaaaagagcaaagttcggcggttaaaacaagttatgcgcaaatgattgaaatgacaaataaacttgctaaagcgttgaaagacttatccaacttgtcaaaaagataa

SEQ ID NO: 68012 - protein, 609 aa, Unknown
  Obtained from environmental sample
  DOMAIN (1)...(241): Iron only hydrogenase large subunit, C-terminal domain
  misc_feature (1)..(609): Xaa is any amino acid
MEDLKQKKKIIAVAAPAVASFFPDKFLNLNGYLKSLGVEDFFDVSLGAELTVISYLDYIKEKKPRTVIAQPCPAIVTYIEIHHPELLPFLAPADSPILHTIKMIRKFYPKYKNHKIAVISPCIAKRREYDETGLGDYNVTMIELKNLLESQRIDLSSFPKEEYTGVSAERAAGFPIPGGLLDTAERFVPGIRRRTEKIEGVHNIYPYLTEISEILNTDAELPLLIDCLNCEKGCIGGPGTGNAEKPLAVLKEPVQKRMAELEKKHHPQIGINAYKKYHDELRKYWKKKLYNRSYRNLSENNTIKHPSETEITEIFHTMKKFKKEDIYNCTCCGYGSCKAMATAIYNNLNKHDNCAHYILALLKENQEHIASASDLIERINKLIQELNATISSQARAVDNSSAETEEIISSIKNTSEMSQKQQESVKELMEVAGLGQESMKKTIQSISEISQSVEGISSTIRIISSIAANTNLLSMNAAIEAAHAGEAGRGFAVVAGEIRRLSETTRDNSVSISRTLKSIIGGISDTTKQSGETDTRIAQMSKEISGFAETMSAFMNTFNELSAKSGNITTSLVSLKEQSSAVKTSYAQMIEMTNKLAKALKDLSNLSKR

SEQ ID NO: 68013 - DNA, 741 bp, Unknown
  Obtained from environmental sample
  misc_feature (1)..(741): n is a, c, g, or t
ttgcgcgacttaaaggcagcggttacgcaaaagaacgaatcagaaaaatctctaaagcttctgcgtaatattataaacagcattgacgcgcaggtttatgttaccgttccccattcgggcgagattctctttgtaaacgattacatgaaaaaagaatttaatgttggggatgaatgtataggaaatacttgttataaaatttttctgagagatgcgtataatatatgcgatttttgcccctgttataaacttgataaagacccgaacagcactgtcgtatgggaaatgcgcaacccggttactaaccgcatataccagaataccacccggtatatagaatggttcgacggaagaaccgtccaaatccaacattcggtcgatatatcagaagtgattgccgcgaaagaacaggcggaacagagcagccgttacaaaagccaattcctgtcccgtatgagccacgaagtgcgcactcccatgaacgcgattctgggcatcacggaaattcagcttcaggatgaaaaaattccgccgggcaagcgcgaagccctggaaaagatttttaattccggttatctgctgttgggtatcatcaacgacatattggacttgtccaagatagaagccggcaagctggaaatttctcccataggctatgacatactaaacctcataaatgacacagtccctcttaccgtcatgcagtacgaacaaaagcctattnaattaaaatctgagtga

SEQ ID NO: 68014 - protein, 246 aa, Unknown
  Obtained from environmental sample
  DOMAIN (144)...(210): His Kinase A (phosphoacceptor) domain
  misc_feature (1)..(246): Xaa is any amino acid
MRDLKAAVTQKNESEKSLKLLRNIINSIDAQVYVTVPHSGEILFVNDYMKKEFNVGDECIGNTCYKIFLRDAYNICDFCPCYKLDKDPNSTVVWEMRNPVTNRIYQNTTRYIEWFDGRTVQIQHSVDISEVIAAKEQAEQSSRYKSQFLSRMSHEVRTPMNAILGITEIQLQDEKIPPGKREALEKIFNSGYLLLGIINDILDLSKIEAGKLEISPIGYDILNLINDTVPLTVMQYEQKPIXLKSE

SEQ ID NO: 68015 - DNA, 1530 bp, Unknown
  Obtained from environmental sample
  misc_feature (1)..(1530): n is a, c, g, or t
atgagaatattccctttacccttttttggcgatgaattacgcataaagcagattctgaacaatttgctttctaacgcgtataagtatactgataatggcaaggtttcactgtccgttaacgcagaatattcttcgcagcaatgggcgcagttaacgcttatattccgcgttgccgatacagggcatggaatgacaaaagagcaggtggacaaactgtttgatgagtacacccgctttaacatggaatccagccggaaaaccgagggcgttggccttggtatgagcattaccaaacaacttgtgcgtatgatgaacggggatattaaggtggagagcgagttaggtaaaggttcggtttttaccgtaagcctgccccaggggattctcggtactgaagtattagggaaagaattggctgaaaacgccaataagttcaatttcggcaaagccgctcaaataaataacgctccgcaatttgtccgcgaatttatgccttacggcagggttttggttgtggacgacgttgaaacgaatctgtatgtcgcaagggggcttatggctccttacggcttatcgattgaaaccgccgcaagcgggtttgaggcgattgataaaatcaagaacggcgcggtttttgatataatttttatggatcattttatgccgaaaatggacggtatagaaacagaaaaaatactgcgcaatatgggttatacgcgcccaatcatagcgctgacggccaacgccctaaccgggcaggcggaaatatttttggaaaaagggttcgacggatttatttccaagcctgtagacataaggcagcttaacgctgcgctgaacaagtttatacgcgacaagtacccgtctaaagtggttgattcggcgcgggagcaggtctcaaagctcaatacgccgaagactcaaattacatttgcatcggatatacacccggcatcaagtcctgaattatcggcaatatttacaagagacgccgaaaaagctcttaacgagctgaaaatgctgttatctgacacattcagcgataaagatgacttaatgcaatatgttatcagcgtacactcaatgaaaagcgcgcttgcgaacatcggcgaatacgaactttccgactccgcgttaaaattggaactggcgggccgcgataaaaatattccggtaataatgactgaaacccctaaatttctggaacagcttgaagatgtaataaaaagaaacaaaccaaaagaagacgcggataatagaaacggcgctgaaaacggctccacaaagaataaatcagacaaagataaggtgaatttaaaggaaaaattgcgcgcaatccggacggcatgcgaaaataaaaacgcggcaagcgccaataatattttgtctgaactgaggcggaaggaatggcccagatacacaagagatttacttgacactatcgcggaagatttatcgaataataactttgatgaagtcatcaaacttattgaagattatgaactaattaaaaacttaaaaaataaataa

SEQ ID NO: 68016 - protein, 509 aa, Unknown
  Obtained from environmental sample
  DOMAIN (322)...(407): Hpt domain
  misc_feature (1)..(509): Xaa is any amino acid
MRIFPLPFFGDELRIKQILNNLLSNAYKYTDNGKVSLSVNAEYSSQQWAQLTLIFRVADTGHGMTKEQVDKLFDEYTRFNMESSRKTEGVGLGMSITKQLVRMMNGDIKVESELGKGSVFTVSLPQGILGTEVLGKELAENANKFNFGKAAQINNAPQFVREFMPYGRVLVVDDVETNLYVARGLMAPYGLSIETAASGFEAIDKIKNGAVFDIIFMDHFMPKMDGIETEKILRNMGYTRPIIALTANALTGQAEIFLEKGFDGFISKPVDIRQLNAALNKFIRDKYPSKVVDSAREQVSKLNTPKTQITFASDIHPASSPELSAIFTRDAEKALNELKMLLSDTFSDKDDLMQYVISVHSMKSALANIGEYELSDSALKLELAGRDKNIPVIMTETPKFLEQLEDVIKRNKPKEDADNRNGAENGSTKNKSDKDKVNLKEKLRAIRTACENKNAASANNILSELRRKEWPRYTRDLLDTIAEDLSNNNFDEVIKLIEDYELIKNLKNK

SEQ ID NO: 68017 - DNA, 432 bp, Unknown
  Obtained from environmental sample
  misc_feature (1)..(432): n is a, c, g, or t
gtgaaaagtgttattgttcgaaatttagagcgtaaaatcacgcagctttctaactattcactcttcactcttcactcttcttaccctctgcaaacctcaatacccggaagcttcctgccttcaagcagttcaagcgaagcgccgccgcctgttgagacatggctcatctttgaggcgaggccgaacttgtttactgccgcgaccgagtcgcctccgcctacaacggtaatggcgcccttgccggtcatttccgccacaagtttcgcgacttcttcggttcctttcgcaaaagcttcaaattcaaagacgcctacagggccgttccatacaatggtcttcgctccggcgagcacttctttgtatttggcaatagtcttaggccctacgtcaagcccgagcagattgtcgggaaggtcgaggctgtcaacctga

SEQ ID NO: 68018 - protein, 143 aa, Unknown
  Obtained from environmental sample
  misc_feature (1)..(143): Xaa is any amino acid
MKSVIVRNLERKITQLSNYSLFTLHSSYPLQTSIPGSFLPSSSSSEAPPPVETWLIFEARPNLFTAATESPPPTTVMAPLPVISATSFATSSVPFAKASNSKTPTGPFHTMVFAPASTSLYLAIVLGPTSSPSRLSGRSRLST

SEQ ID NO: 68019 - DNA, 1263 bp, Unknown
  Obtained from environmental sample
  misc_feature (1)..(1263): n is a, c, g, or t
atgatcaaaacagtaaaaaccgtagacttaaaaggcaagcgtataattatgcgcgttgactttaacgttccgatgaaagacggggtagtgcaggacgacacgcgaattgtggcggctcttcctaccattcaatatattctggagcagggagcaaaatccctcacgctcatgtcgcacctgggagatccttccaaagacgcgaagaaggcgcaggaaaaagccgagaaagacggcaagacatttgacaaggacgcgtacatcaaaggcaaacaccgaatggcccctgtcgccgcctatctcgcgaataaactgggtaagccagtgattttcgcgggagaagacagctgttacggcaagaaagcgtttatagaaagccagcctgacggctccgttatcatgctggaaaacacccgcttccacaaagaggaaaccgccaaagagccggaagagttggacaagctggcgaaagagcttgccacttacggcgaaatttttgtaaacgacgccttcggaacagcccaccgcgaccacgcttcaaccgcgtccatcgcgaaatttgttccggtatccgtagccggtttcctgatggaaaaagaagttaactaccttgagcctattgtaacaagcccgcaaaagcctttagtcgctattatcggcggcgcgaaggtttcatcaaaaatcgcggttctggaaagcctgcttaaaaactccagcgcgcttattataggcggcggcatggcatacaccttctttaaggcgcaggggcacaagatcggaaaatcgcttgttgaggacgaccagctggataccgcgaagaaaatcatggacgccgcaaaaagcgcgaacgtgcagattgttctgcctattgatcaggttgccgcgactagctttgacgcgaactcctctcccattcaggttgacagcctcgaccttcccgacaatctgctcgggcttgacgtagggcctaagactattgccaaatacaaagaagtgctcgccggagcgaagaccattgtatggaacggccctgtaggcgtctttgaatttgaagcttttgcgaaaggaaccgaagaagtcgcgaaacttgtggcggaaatgaccggcaagggcgccattaccgttgtaggcggaggcgactcggtcgcggcagtaaacaagttcggcctcgcctcaaagatgagccatgtctcaacaggcggcggcgcttcgcttgaactgcttgaaggcaggaagcttccgggtattgaggtttgcagagggtaa

SEQ ID NO: 68020 - protein, 420 aa, Unknown
  Obtained from environmental sample
  DOMAIN (1)...(418): Phosphoglycerate kinase
  misc_feature (1)..(420): Xaa is any amino acid
MIKTVKTVDLKGKRIIMRVDFNVPMKDGVVQDDTRIVAALPTIQYILEQGAKSLTLMSHLGDPSKDAKKAQEKAEKDGKTFDKDAYIKGKHRMAPVAAYLANKLGKPVIFAGEDSCYGKKAFIESQPDGSVIMLENTRFHKEETAKEPEELDKLAKELATYGEIFVNDAFGTAHRDHASTASIAKFVPVSVAGFLMEKEVNYLEPIVTSPQKPLVAIIGGAKVSSKIAVLESLLKNSSALIIGGGMAYTFFKAQGHKIGKSLVEDDQLDTAKKIMDAAKSANVQIVLPIDQVAATSFDANSSPIQVDSLDLPDNLLGLDVGPKTIAKYKEVLAGAKTIVWNGPVGVFEFEAFAKGTEEVAKLVAEMTGKGAITVVGGGDSVAAVNKFGLASKMSHVSTGGGASLELLEGRKLPGIEVCRG

SEQ ID NO: 68021 - DNA, 477 bp, Unknown
  Obtained from environmental sample
  misc_feature (1)..(477): n is a, c, g, or t
ttgatggccgagccagaaacagtagacggtgtttcacaaaaggactggagaggcggtcgtgcggcggctatcaatattattccgtcaaccacgggcgcggcaaaggccgttggtgaggtgcttcctgttaagggtaaactgaccggtatgagcttccgcgttcccacacccaccggttcggtagtagacctgactttccgcgcggagaaagatacctctattaaagaaattgacgcggccatgaaaaaggcttcagaaacctacctgaaaggaattctggcttactgcgatgaggaaatcgtctcaactgatatcattcacaataccaacacttcaatttatgacagcaaagccaccctgcagaacaactttgaacatgaaaaacgcttctttaaggtggtttcctggtacgacaacgagtggggttattcaaataaagttgtagacctgctcaaatatatcgacagcaagaaatag

SEQ ID NO: 68022 - protein, 158 aa, Unknown
  Obtained from environmental sample
  DOMAIN (1)...(137): Glyceraldehyde 3-phosphate dehydrogenase, C-terminal domain
  misc_feature (1)..(158): Xaa is any amino acid
MMAEPETVDGVSQKDWRGGRAAAINIIPSTTGAAKAVGEVLPVKGKLTGMSFRVPTPTGSVVDLTFRAEKDTSIKEIDAAMKKASETYLKGILAYCDEEIVSTDIIHNTNTSIYDSKATLQNNFEHEKRFFKVVSWYDNEWGYSNKVVDLLKYIDSKK

SEQ ID NO: 68023 - DNA, 1980 bp, Unknown
  Obtained from environmental sample
  misc_feature (1)..(1980): n is a, c, g, or t
atgaaatatggttattttgattctaaaaacagggaatatgttatagataagcccgatacgcccgccccgtgggcgaattatctcggctctccggcgtacggcgcgattatttccaacaatgcgggcggttacagctttgtaaaaagcggcgctgcgggcaggattatccgctaccgctttaacgaacaggaccgtcccggccggtacatctacctgcgcgacgatgaatccggcgactactggtcggcctcctggcagcctgtgggcaagccgctgaatgagtacaaatccgtgtgccgtcacgggacgggctacaccaaacttgaggcggattacaaggacattcattcgagcgcgctttactatgtgccgcaagacgctgattacgaagtgtggaaagtcaaggtgacaaataccggaaacaaggcgcggaaaatttcctgttttggttttgttgaatttacctgcgaaagtttttacgagcaggatcaggtgaatcttcaatatacccagtttattacccgcacttattttaaggaaaaatttattctgcagacaataaacgaaaactgtctgaatgccgtaaaccaaagccgcgttgaaacgcgctttttcgccatgaccggcgcgaaggtcgcaagttactgcggagacaaggcaagttttttgggcaaataccgcgaatacggaaatccgatttccgtggaaagcggcaaactggacggcactcttaactataacctgaacccctgcggcgccctgcatacagccttcgatcttgagcccgggaaaagcgccgagtttattttccttcttgggcaaaaacgcgaacctcaggtaaaaaaacttgtatcgcgttacgaggatatgagcctgcccgaaaaagaaattgacaaattaaaaaactactggcacagccgccttgccaatcttacggtaaacacgcccgatgataacttcaacaacatgatcaatacatggaacgcgtatcagtgttttattacctttgtctggtcgcgcgccgcgtctcttatttactgcggacagcgcaacggttacggctaccgcgacacggtacaggatattcagggcatcatacaccttgatcccgctatggcgcttgaaaaaatcaagttcatgatttccgctcaagtcagccacggcggagcgcttccgcttgtgaagtacgatcacaaccccggacacgaggacaagcccgaagacgactcctaccgcagaaacacgggacacccctcataccgcgccgacgacgcgctgtggctgttccccactgtctggaaatatatctcggaaaccggcaacaccgccctgttagacgaaataatcccgtatgcggacaagggcaaagatactttattcaatcaccttaaaaaagcaataagtttttcgcttaacaatttgggaatacacggtcttcccgcagggcttcacgctgactggaacgactgcctccgcctcggcgcaaaaggcgtttccgtatttgtcgcgctccagttgtactacgcgttcgagatcatgatccgttttgcgaagttcaaaaaaaattccgcggcggagaaagaaatgacaagtcaaaaaaaccgttttggaaaaattatcgaaaaatactgctggaaggacgaccgctttgtgcgcggtatcaccgagaaagacgttaccgtcggaaagaaaggagatccggaagcgaacatctggcttaacccgcagagttgggcggtaataagcggttacgcggatgaaaaacgcggcaagcagatacttgatttagtctataaaaaattgaacacaaaatacggcgcgcgccttatgtcccctccgtaccgcaagcacgcttttgacggagcgctggctctgttattcaatccgggtacaaaagaaaagcggcggcatcttcctgcaaacgcagggctggattatccttgccgaagcgctgcttggacacggcaaccgcgccgttga

SEQ ID NO: 68024 - protein, 659 aa, Unknown
  Obtained from environmental sample
  DOMAIN (198)...(280): Glycosyltransferase 36 associated family
  misc_feature (1)..(659): Xaa is any amino acid
MKYGYFDSKNREYVIDKPDTPAPWANYLGSPAYGAIISNNAGGYSFVKSGAAGRIIRYRFNEQDRPGRYIYLRDDESGDYWSASWQPVGKPLNEYKSVCRHGTGYTKLEADYKDIHSSALYYVPQDADYEVWKVKVTNTGNKARKISCFGFVEFTCESFYEQDQVNLQYTQFITRTYFKEKFILQTINENCLNAVNQSRVETRFFAMTGAKVASYCGDKASFLGKYREYGNPISVESGKLDGTLNYNLNPCGALHTAFDLEPGKSAEFIFLLGQKREPQVKKLVSRYEDMSLPEKEIDKLKNYWHSRLANLTVNTPDDNFNNMINTWNAYQCFITFVWSRAASLIYCGQRNGYGYRDTVQDIQGIIHLDPAMALEKIKFMISAQVSHGGALPLVKYDHNPGHEDKPEDDSYRRNTGHPSYRADDALWLFPTVWKYISETGNTALLDEIIPYADKGKDTLFNHLKKAISFSLNNLGIHGLPAGLHADWNDCLRLGAKGVSVFVALQLYYAFEIMIRFAKFKKNSAAEKEMTSQKNRFGKIIEKYCWKDDRFVRGITEKDVTVGKKGDPEANIWLNPQSWAVISGYADEKRGKQILDLVYKKLNTKYGARLMSPPYRKHAFDGALALLFNPGTKEKRRHLPANAGLDYPCRSAAWTRQPRR

SEQ ID NO: 68025 - DNA, 540 bp, Unknown
  Obtained from environmental sample
  misc_feature (1)..(540): n is a, c, g, or t
ttgacggagcgctggctctgttattcaatccgggtacaaaagaaaagcggcggcatcttcctgcaaacgcagggctggattatccttgccgaagcgctgcttggacacggcaaccgcgccgttgagtactatctggaaagctgccctgccgcgcagaacgaaattgccgacaaacgcctcatggagccttacgcctactcgcaatttacagaaagttcggacagcccctttgaggggcgcagtcatgtccactggcttacaggcacggcaagcactgtaatggtcggcagtgtggaaggcattttgggattaaggccggacattgaaggtctgcgcctgtcgcccgcaattccctcatcgtggaaatcatttacaatggaaaaaaatttccgaggcaaaaaactttccataaaagtgaataaccccaacgggcgcgaaagcggctgcagtaaactgaccgtcaacgggaaacccgtcgagggcaattacattccggcttctatcctgaaaccttcgaacgagattattctggatatataa

SEQ ID NO: 68026 - protein, 179 aa, Unknown
  Obtained from environmental sample
  misc_feature (1)..(179): Xaa is any amino acid
MTERWLCYSIRVQKKSGGIFLQTQGWIILAEALLGHGNRAVEYYLESCPAAQNEIADKRLMEPYAYSQFTESSDSPFEGRSHVHWLTGTASTVMVGSVEGILGLRPDIEGLRLSPAIPSSWKSFTMEKNFRGKKLSIKVNNPNGRESGCSKLTVNGKPVEGNYIPASILKPSNEIILDI

SEQ ID NO: 68027 - DNA, 1314 bp, Unknown
  Obtained from environmental sample
  misc_feature (1)..(1314): n is a, c, g, or t
gtggagatgtcgataacgaccgcatatgaaattaataaactcatgtcacggtacggcgtaaaattcggtatctacaaaaacggaaaattcattgaacaactctttccctacgacgctataccgcggattatttcgcacaacgaatttgcgctgttggacaaggggcttgtccagcgggtagacgcgcttaactgctttttgaaggacatctactcaggcgcgaaaattatcaccgacaaggttgtgccggaagaatttgtctatatctccaaaggatatctgccggagtgcgcgggtataaccccgcccgagggcgtgtacagccacatctcgggaatcgatcttgttcaggcgaaggacggagcgtggtacatactggaagataacctgcgcataccgtccggcgcgtcctatccgctgattgccagagagcttagccgtattgccgatccggacgcctattcaaacaacgatgtcaccgacaaccgcaactattcggatatgctgcatgagactatggactttgttaaccgcggcggactgaatgtgattctcacgccgggcaggtacaacgccgcgtacttcgagcactcatatcttgccgaacgaacaggcgcgatacttgtcaaggcttcggaactggttgttgacggcgcggttctgtacatgaaagattaccttggagttaaagcgagggtcggcgcagtataccgccgcatctcagacgaataccttgacccaatgacgtttcttgcggagtccctcatcggtgtgccgcatattatggacgcctaccgcacggggaatgtcgcgataatcaacgcgccgggcaacggcgtggcggacgataagggcatttattattttgtgccaaaaatggtaaaatactacctgggtgaagagccgattctgcggaacgcgccgacgtacctgccatactacgaggacgatctcaagttcacgcttgagaacatcaggcgtcttgtcataaaggacgtgtcagaggcgggcggctacggcgtggtgttcggcagggaactgtcggaagagaaattgtccgaactcaaggccactatcataaaagagccgaggcggttcatatcgcaggaggtcatcgactttatcgaccttgatattatggaagaagacggcactatcccccgaaaggccgacctgagggcgttcgttctgacgggcaaaactacacgtgtgtgggcaagcgggctgacacgcttttcgcgcattgaggggtcgtttattgtgaattcttcgcaaggaggagggtttaaagacacatgggtactatctcggtag

SEQ ID NO: 68028 - protein, 437 aa, Unknown
  Obtained from environmental sample
  DOMAIN (293)...(436): Domain of unknown function (DUF407)
  misc_feature (1)..(437): Xaa is any amino acid
MEMSITTAYEINKLMSRYGVKFGIYKNGKFIEQLFPYDAIPRIISHNEFALLDKGLVQRVDALNCFLKDIYSGAKIITDKVVPEEFVYISKGYLPECAGITPPEGVYSHISGIDLVQAKDGAWYILEDNLRIPSGASYPLIARELSRIADPDAYSNNDVTDNRNYSDMLHETMDFVNRGGLNVILTPGRYNAAYFEHSYLAERTGAILVKASELVVDGAVLYMKDYLGVKARVGAVYRRISDEYLDPMTFLAESLIGVPHIMDAYRTGNVAIINAPGNGVADDKGIYYFVPKMVKYYLGEEPILRNAPTYLPYYEDDLKFTLENIRRLVIKDVSEAGGYGVVFGRELSEEKLSELKATIIKEPRRFISQEVIDFIDLDIMEEDGTIPRKADLRAFVLTGKTTRVWASGLTRFSRIEGSFIVNSSQGGGFKDTWVLSR

SEQ ID NO: 68029 - DNA, 1014 bp, Unknown
  Obtained from environmental sample
  misc_feature (1)..(1014): n is a, c, g, or t
ttggcgtttaaggaacatctaaaaatccaaatggaggtttttagatgttccatagtaccgaaaaacggaggctttaatgataaacatgtgtctgtggcggcgctgcctgtcgcggagaatttcactatacagaagaaccgcattgagaataacgccggcaaggcaagcaagcgcgtctgtattgttactggaactcacggcgacgaactggaggggcagtatgtctgctcgcgtttggcgaaaattctgaacgacggaaaacaaaagctgtcgggcattgttgacatttatccggcggtaaacccgctggggatcgactctgttaccaggggtttccctatgttcgatttggacatgaaccgcatatttcccggttcgtcatcggggtctcttgcggaagtcgcggcgtacgatgtcatacgcgacattgaaggcgccgatatgtgcatagacatacactccagcaacatctttttgcgcgagatacctcaggtgcgggtgagcgaacagaacgaagccgcgctgctgccttacgccgtgatgctcaatgtcgatcttgtgtggatacacgcgtcggcgaccgtactggaatcgacgctggcgcactctcttaacacacgcggcgtgaagacgctggtggtcgaaatgggcgtaggaatgcgcataacggaaaaattctgcgctcagcttgtggacggaatactgaacctgctgaccgaactcggcatgtggggcggaacgtcagggcggacgcggccgcctcttgtctcaaaggatcacagcgtaggctttttgaactcggacgccggcgggatatttattccgcgcgccgtccatggcaaccacataaacgccggcgactgcataggcaatgtcatagacccgctcacaggaaccgtcgtcgaggaaacgattgcgccgtgcgacggcttgctgtttacgctcagggaatacccggtcgtattcggcggctcgcttttggcgcggattatggaggacactaaaaatggttaa

SEQ ID NO: 68030 - protein, 337 aa, Unknown
  Obtained from environmental sample
  DOMAIN (55)...(333): Succinylglutamate desuccinylase / Aspartoacylase family
  misc_feature (1)..(337): Xaa is any amino acid
MAFKEHLKIQMEVFRCSIVPKNGGFNDKHVSVAALPVAENFTIQKNRIENNAGKASKRVCIVTGTHGDELEGQYVCSRLAKILNDGKQKLSGIVDIYPAVNPLGIDSVTRGFPMFDLDMNRIFPGSSSGSLAEVAAYDVIRDIEGADMCIDIHSSNIFLREIPQVRVSEQNEAALLPYAVMLNVDLVWIHASATVLESTLAHSLNTRGVKTLVVEMGVGMRITEKFCAQLVDGILNLLTELGMWGGTSGRTRPPLVSKDHSVGFLNSDAGGIFIPRAVHGNHINAGDCIGNVIDPLTGTVVEETIAPCDGLLFTLREYPVVFGGSLLARIMEDTKNG

SEQ ID NO: 68031 - DNA, 1038 bp, Unknown
  Obtained from environmental sample
  misc_feature (1)..(1038): n is a, c, g, or t
ttgcgccgtgcgacggcttgctgtttacgctcagggaatacccggtcgtattcggcggctcgcttttggcgcggattatggaggacactaaaaatggttaaagatataatatattcgattaaatcgccctatcgtcagagcatggacattataggttacacattcggctcgggcgaacgctcatgctgcgtggtaggcgcgcttcgcggcaacgagatacagcagatggcaatctgcgcccaactggtagacacgctcaagcgcctggaagaaaacggctgcgtcgtccccggcaagagcataatgatcataccgtgcgcgaaccactactccatgaacataggcaaacgtttctggaccatggacaacaccgacatncaccgcatgttccccggatacgatcagggagagacaacacagcgcatcgctgacggcttgnttcaaagcgtcaaagattatgtctatggcatacagatggcgagtttctaccgcgagggcgactttctgccgcatatcaaggtgatggacacagactacggaaagatcgagacctacgagtcgctttccgatttcggcctgccctacggcctcctcaggacgccgcacccctacgacaccacgacgctgaactataattggcaggtatggggctgccgcgcctactcgctcttctctacctacaccgatcacatcggcaagcagtccatgcagaccgccgtaaacgcgacgctgcgcttccttatcgccaagggcatactcaaatggacgctgcaccgaggtatgcacacacgcatactgaacgaggagtcgataagaaccgtcaagacaggctgcgccggaatgctgaaaaaacacgtcacggtaggagacgaggtagccgagggcgacatcctctgcgagataattcatcccttggaggggaacacgataggccggatagtgtcgccggtggacgggacggtgttcttcgcccacaacaaacaattggtgatggagcacaccgatatgttcagcatcgtgccgttttctaatgtgtga

SEQ ID NO: 68032 - protein, 345 aa, Unknown
  Obtained from environmental sample
  DOMAIN (58)...(342): Succinylglutamate desuccinylase / Aspartoacylase family
  misc_feature (1)..(345): Xaa is any amino acid
MRRATACCLRSGNTRSYSAARFWRGLWRTLKMVKDIIYSIKSPYRQSMDIIGYTFGSGERSCCVVGALRGNEIQQMAICAQLVDTLKRLEENGCVVPGKSIMIIPCANHYSMNIGKRFWTMDNTDXHRMFPGYDQGETTQRIADGLXQSVKDYVYGIQMASFYREGDFLPHIKVMDTDYGKIETYESLSDFGLPYGLLRTPHPYDTTTLNYNWQVWGCRAYSLFSTYTDHIGKQSMQTAVNATLRFLIAKGILKWTLHRGMHTRILNEESIRTVKTGCAGMLKKHVTVGDEVAEGDILCEIIHPLEGNTIGRIVSPVDGTVFFAHNKQLVMEHTDMFSIVPFSNV

SEQ ID NO: 68033 - DNA, 432 bp, Unknown
  Obtained from environmental sample
  misc_feature (1)..(432): n is a, c, g, or t
atgtgtactcgtattcgcatttcacaaaactgctggaaaaccgcaaacccggtacgccgctcatccatgaaaacttgcggggaaaagactatttcaacggaggcggccatgtttgataatgccaccctcaaccaactccatgagcttaggctttcggccatggcccattgtttcaccgagcagcaaacccagcccggcattcactcgctgtcgtttgaagaacgctttgccctgttagtcgaaaccgaatggctgtcccgccgcagtaaacgcaccgaacggctggtcaggcaggcgggattccgcttcagtgccgctgttgaggatatcgactgccacagcaaaaaaggcatcggcaggcctgaagtcctcaaactctccctgtgctcatacatcaagaaagcccagctcggccgatctgatcatcggtaa

SEQ ID NO: 68034 - protein, 143 aa, Unknown
  Obtained from environmental sample
  DOMAIN (59)...(88): IstB-like ATP binding N-terminal
  misc_feature (1)..(143): Xaa is any amino acid
MCTRIRISQNCWKTANPVRRSSMKTCGEKTISTEAAMFDNATLNQLHELRLSAMAHCFTEQQTQPGIHSLSFEERFALLVETEWLSRRSKRTERLVRQAGFRFSAAVEDIDCHSKKGIGRPEVLKLSLCSYIKKAQLGRSDHR

SEQ ID NO: 68035 - DNA, 450 bp, Unknown
  Obtained from environmental sample
  misc_feature (1)..(450): n is a, c, g, or t
gtgcttattcgcagcacttcgcgcaccgtagaggtattctgcgagggggaacgcatagcatgccatgtgcgaagcgcggatccccgcaaacgcttcatcaccgagccatcccacatgccggaaaaccaccgggctgtcgccgactggtcgcctgatcgtttcatatcctgggcggcgaagacaggggataagaccaaggcgtatattacctggctgttagagcggaaggaacacccgcagcaggcgttcagaacctgcgccggcatactccgtataggagcgaccgtaacgccccagcggatggaagaagcctgcgctctggccttggaacgcaatgtgtactcgtattcgcatttcacaaaactgctggaaaaccgcaaacccggtacgccgctcatccatgaaaacttgcggggaaaagactatttcaacggaggcggccatgtttga

SEQ ID NO: 68036 - protein, 149 aa, Unknown
  Obtained from environmental sample
  misc_feature (1)..(149): Xaa is any amino acid
MLIRSTSRTVEVFCEGERIACHVRSADPRKRFITEPSHMPENHRAVADWSPDRFISWAAKTGDKTKAYITWLLERKEHPQQAFRTCAGILRIGATVTPQRMEEACALALERNVYSYSHFTKLLENRKPGTPLIHENLRGKDYFNGGGHV

SEQ ID NO: 68037 - DNA, 1089 bp, Unknown
  Obtained from environmental sample
  misc_feature (1)..(1089): n is a, c, g, or t
atgaggagaatcgttatggagaaagcaaaagaaatcctgcgtctgtccctgaacatgggactgagccaacgggatgtggcaagtggaaccggttgttcccttggaatggttaatgccgtgctggcacgggtaaaggaagcgggtgtcgccgaccctctcagccttgataccaaggagctggggtcaatcatctatccccctgaacacgggggagtgaaggaagaacctgacttcccgtacatcgacagggagatgaagaaaaaaggcgtgaccctgtttctgctgtgggaagagtacaaagtcaggcatcctgaaggctgtatgtattcccagttctgcgccaaataccgggaataccggaaacaaaacacggtgtatatgaggaaggtctacaaggcgggggaacaaatgctggtagactgggccggccttactatgaagtatagcgaaaaagacgggactgaaaagacagcctatgtatttgcggctatacttcccgctagttcaatgctgtacgcgcagacgttagccgacatgaagatggaaagctggatagaaggccacgtaaacgccttcgggtattttggaggggttccccggctgttggttcctgacaatacaaagacggcggtaacgaaagcaaaccgttatgaagcggagctgaacaaaacctacaaggaaatggcggaccattacggctgcgcaattgtccccgcccggccgtattctgcgactgacaaagcccctgtagagactgcggtacagatagtcgaacggcggataatcgccaagctcaggcataccaagttcttttccctggaagaactcggcgaggccttccgtgcggagcttgaggcactcaacgaccggccgttccagaaacagacgggcagccgccggagtgtgttcctgtcaaccgaacagcatgagttgatgaagctgcccgcaaggcggtatgagtatgcccgcttcaagcaggcaaaagccgggttgactaccatgtcgcctgggacaaggagcattattacagcgttccctatcaatttgcgggcaaagaagtgcttattcgcagcacttcgcgcaccgtag

SEQ ID NO: 68038 - protein, 362 aa, Unknown
  Obtained from environmental sample
  DOMAIN (129)...(304): Integrase core domain
  misc_feature (1)..(362): Xaa is any amino acid
MRRIVMEKAKEILRLSLNMGLSQRDVASGTGCSLGMVNAVLARVKEAGVADPLSLDTKELGSIIYPPEHGGVKEEPDFPYIDREMKKKGVTLFLLWEEYKVRHPEGCMYSQFCAKYREYRKQNTVYMRKVYKAGEQMLVDWAGLTMKYSEKDGTEKTAYVFAAILPASSMLYAQTLADMKMESWIEGHVNAFGYFGGVPRLLVPDNTKTAVTKANRYEAELNKTYKEMADHYGCAIVPARPYSATDKAPVETAVQIVERRIIAKLRHTKFFSLEELGEAFRAELEALNDRPFQKQTGSRRSVFLSTEQHELMKLPARRYEYARFKQAKAGLTTMSPGTRSIITAFPINLRAKKCLFAALRAP

SEQ ID NO: 68039 - DNA, 1113 bp, Unknown
  Obtained from environmental sample
  misc_feature (1)..(1113): n is a, c, g, or t
atgggaaagggagaagagcgatttgagcagttgctcagattattgccggaaggttgggaagcaaaagcgaaagagcttggagcgctacaacgcgcacgggcaatacaaacgccggaagaactactgaggctgatactgctgtacctgacggaagggaaatcgtttgcgggaaccagcgcgataggcaagttaacaggggaagcggccatgagcaaagtggcggtattcaaacgaataaaacacagcgcggcatggctccaatggctgtgcgagaacatctaccgggaaggcgggctaatcgtaaagaaaccgcaatggctgaaaaataaaaacgtgaaactggtggacgggagcgaggtgataaaatgcggggtgaggcggcaaagccatatgctgcattacagccttgacttgttcacgctgagcgcctgcgagtttgtggtgacgggcatggacaccggggagaagctgacgaatttcaaggggtttaagaaaggcgacatagtgatgggggatcgcgcgtacgggaccctgcccggaatagcctggctgcggcagcagggagccgattacgtgctgcggataaagatactcggcattacgctgtataacggcaggaaccgggaaatcgacctgccggggcggttaaaggggctaaaagcaggaaaaacagcggatatcgccgggaaatgcataatcaacggcgagtatgagccgatacgaatatgcgccctgcgcaaagacagggagagcgaaagagcggggctgaaacggctgaggaaagaaaaccagcgcaagcggggcggaaaagcggtgaccaaactgcagcgggaaagcaacaagtatatcatggtggcgacatcgctgggaaaggaagaagcgaccgccgcccaaattctggacttgtaccggatgcgctggcagatagagcttgcgttcaagcggctgaaatcgctgttcggctacagcgacctgcctgcgaagaaccctgaaagcgtgaaagcgtggttttacggaaagctgttgcttgccgccctgtgtgaaacgttagtgaacacagggcgtttttccccctcagccctcaaggcagaacaagggtcttcgccattctga

SEQ ID NO: 68040 - protein, 370 aa, Unknown
  Obtained from environmental sample
  DOMAIN (112)...(346): Transposase DDE domain
  misc_feature (1)..(370): Xaa is any amino acid
MGKGEERFEQLLRLLPEGWEAKAKELGALQRARAIQTPEELLRLILLYLTEGKSFAGTSAIGKLTGEAAMSKVAVFKRIKHSAAWLQWLCENIYREGGLIVKKPQWLKNKNVKLVDGSEVIKCGVRRQSHMLHYSLDLFTLSACEFVVTGMDTGEKLTNFKGFKKGDIVMGDRAYGTLPGIAWLRQQGADYVLRIKILGITLYNGRNREIDLPGRLKGLKAGKTADIAGKCIINGEYEPIRICALRKDRESERAGLKRLRKENQRKRGGKAVTKLQRESNKYIMVATSLGKEEATAAQILDLYRMRWQIELAFKRLKSLFGYSDLPAKNPESVKAWFYGKLLLAALCETLVNTGRFSPSALKAEQGSSPF

SEQ ID NO: 68041 - DNA, 546 bp, Unknown
  Obtained from environmental sample
  misc_feature (1)..(546): n is a, c, g, or t
gtggtcggggcaggacacatgcagggcataaaaacctggatggaaaaaattgccgccggggaaaaaagcgatgacgtttccgccttaaaagagattccgccccgaagcttcttttcaagggcgctgccgtttatcattcccctggctatcctggctctttttgtcagcggctttttcaggggcggtgcgggggtaagcctttccatgctgcgtacctatattttgtggaacggctccctcgcggcccttggggcgatcatcgccggaggccatcccctcgctatactggccgcctttgtatttgcccccattacgactttcaccccttttatcggggtggggcttttctccggggtgatacaggccagccttaaaaagccgcgtgtagccgacgcccagtcgatcattgacgacgtggggagcttaaagggcttttaccggaaccgcattacgcgggctttgcttgtctttttcctttcccagatgggcggcgcggcgggaacttttgttaccatccccgcgcttgccggcctacttgcccgctaa

SEQ ID NO: 68042 - protein, 181 aa, Unknown
  Obtained from environmental sample
  misc_feature (1)..(181): Xaa is any amino acid
MVGAGHMQGIKTWMEKIAAGEKSDDVSALKEIPPRSFFSRALPFIIPLAILALFVSGFFRGGAGVSLSMLRTYILWNGSLAALGAIIAGGHPLAILAAFVFAPITTFTPFIGVGLFSGVIQASLKKPRVADAQSIIDDVGSLKGFYRNRITRALLVFFLSQMGGAAGTFVTIPALAGLLAR

SEQ ID NO: 68043 - DNA, 585 bp, Unknown
  Obtained from environmental sample
  misc_feature (1)..(585): n is a, c, g, or t
atggccgagacgaggcgcaagggcatgaagggcgcaatcgccaaagcggaagaacttgccgcggcgactcccaattcatttattccccagcagtttaacaaccccgccaatccggccatacacgaaaaaaccacaggtcctgaaatttggaacgataccgacggaaaaatcgacattttagtaggcggagtcggaacaggcggaactttgacaggcgcgggaaaatttttaaaatcgaaaaaatcgagcataaaaattgtcgcggtagaacctgccgcatctcctgtgctttcaggcggttctcccggaccgcataaaattcagggtatcggagcgggatttaaaccacaggtttatgattccgccgttatcgacgagatttaccagactgatgaagtaaaagccggaaccgcggcgagaaggctcgccaaagaagaaggtatcatcgtaggtatttcatccggttctgttcttgaagcggcgttgactgtcgccaagaaaccggaaaacaacggcaagactatcgtagccgtattgccggacaccggcgagcgttacttatcaacatggctctgggaggagtga

SEQ ID NO: 68044 - protein, 194 aa, Unknown
  Obtained from environmental sample
  DOMAIN (1)...(182): Pyridoxal-phosphate dependent enzyme
  misc_feature (1)..(194): Xaa is any amino acid
MAETRRKGMKGAIAKAEELAAATPNSFIPQQFNNPANPAIHEKTTGPEIWNDTDGKIDILVGGVGTGGTLTGAGKFLKSKKSSIKIVAVEPAASPVLSGGSPGPHKIQGIGAGFKPQVYDSAVIDEIYQTDEVKAGTAARRLAKEEGIIVGISSGSVLEAALTVAKKPENNGKTIVAVLPDTGERYLSTWLWEE

SEQ ID NO: 68045 - DNA, 948 bp, Unknown
  Obtained from environmental sample
  misc_feature (1)..(948): n is a, c, g, or t
atggcaactgcagaattaaacgcgctgaataaggcgcaagcgtaccaacttacggatattacaaaaaccccgccgcaattcggcgctattacaccgcgttggcttacacgttttcttgaattcaaaggactggacgcaggtatttaccgcgtaaacaaagtagtcgaaggagaaacaccgcttgacgttctctgctcatcggaaaaaaagagcgccgagattcccgaaggatatgtacagtatcaacagaaaccgagggaatatatcctcaactcgatttctactattatcaatgtggacaccgccgtggaggatgtgttttcttcgccttatgatcaaacaaaagaacagctccatttggcaattgaaagtttgcgcgaacggcaggagagtcagattatcaataacgatgattacggcttgttgaaaaatgttcctgaaagccagcgcataacccccacaaaccgcgccggttctcccatgcccgatgaccttgatgaattaatttcaaaagtatggaaagagccgacgttctttttagcgcacccgagagctgttgccgcttttcagcgggaatgtacgcgcaggggcgttcctcccgtcaccacgtcattttttggcggtacgtttattctgtggcgcggcattccaatcgtgccaacggataaattgcttgtggacggcctgaaaaatcccaagagcaaaagcggtaaaaccaatattttgctggtgcgttcaggcgaggcaaaacgcggggttatcggcttgtaccagacaggtttgcagaatgaacagggtagagggctttccgtacgcttcaggggagtggataacaaagggcttgcgtcttacctcctgtcgctgtactgctcagccgcaattctttcagacgacgccatagccgttcttgaagatgtggaagtgggtaactactatgattacagctaa

SEQ ID NO: 68046 - protein, 315 aa, Unknown
  Obtained from environmental sample
  misc_feature (1)..(315): Xaa is any amino acid
MATAELNALNKAQAYQLTDITKTPPQFGAITPRWLTRFLEFKGLDAGIYRVNKVVEGETPLDVLCSSEKKSAEIPEGYVQYQQKPREYILNSISTIINVDTAVEDVFSSPYDQTKEQLHLAIESLRERQESQIINNDDYGLLKNVPESQRITPTNRAGSPMPDDLDELISKVWKEPTFFLAHPRAVAAFQRECTRRGVPPVTTSFFGGTFILWRGIPIVPTDKLLVDGLKNPKSKSGKTNILLVRSGEAKRGVIGLYQTGLQNEQGRGLSVRFRGVDNKGLASYLLSLYCSAAILSDDAIAVLEDVEVGNYYDYS

SEQ ID NO: 68047 - DNA, 1023 bp, Unknown
  Obtained from environmental sample
  misc_feature (1)..(1023): n is a, c, g, or t
ttgaagatgtggaagtgggtaactactatgattacagctaacggttacggcttgccggatccggaagaacttgaacagtgggcgttgccttattttcccgaattacaggaaaaaaagagcgaaaaggccgaagacgccaaaatcgggtattctcccgttgtcgtgccatataccagtacgcctaccggcgcgccttctgaagaagcgcttttcaaaagctctcctttgggggttggcgggtttgacgtaaaccgtattcgcggcgattttcctatcctgaatgaaagggtcgccggcggcaaaccgcttgtctggcttgacaacggcgcgacaacgcaaaagcccaacgcggtgatagaccgtattgcgtatttttaccggcatgaaaattcaaacgtccaccgcggcgcgcatgagcttgccgcccgttccaccgacgcctatgaagcggcgcgggaaaccatcgcgaaatttttaggcgcgccgtcaaaggacaacatcgtgtttgtgcgcggaacaacggagggcgtcaaccttgcggcgcagagttatgtaaagcccctgctgagtcccggcgatgaaataatactcactatccttgaacaccacgccaacatagtgccgtggcagatgatagcgcaggaaaccggcgcggtaataaaagtcgctccggttgacgatacgggtcagattattttgtccgaatacgcgcggcttttcagcccccggacaaagtttgtgtcggtaacgcacgtttcaaacgctctgggaaccattaccccggttcgggagatngattcaatcgcccacggacacggagtgcgcattctttatcgacggggcgcagtcggtagcccacacgccgctgaatgtcagcgagttggacgcggatttttttgtcttttccgggcacaaaatcttcggaccgacgggcataggcgcgttgtacggaaaagcggacgttctggaagaagccaagccgtatcagggcggcggcaacatgatcaaggacgtaacctttga

SEQ ID NO: 68048 - protein, 340 aa, Unknown
  Obtained from environmental sample
  DOMAIN (104)...(328): Aminotransferase class-V
  misc_feature (1)..(340): Xaa is any amino acid
MKMWKWVTTMITANGYGLPDPEELEQWALPYFPELQEKKSEKAEDAKIGYSPVVVPYTSTPTGAPSEEALFKSSPLGVGGFDVNRIRGDFPILNERVAGGKPLVWLDNGATTQKPNAVIDRIAYFYRHENSNVHRGAHELAARSTDAYEAARETIAKFLGAPSKDNIVFVRGTTEGVNLAAQSYVKPLLSPGDEIILTILEHHANIVPWQMIAQETGAVIKVAPVDDTGQIILSEYARLFSPRTKFVSVTHVSNALGTITPVREXDSIAHGHGVRILYRRGAVGSPHAAECQRVGRGFFCLFRAQNLRTDGHRRVVRKSGRSGRSQAVSGRRQHDQGRNL

SEQ ID NO: 68049 - DNA, 570 bp, Unknown
  Obtained from environmental sample
  misc_feature (1)..(570): n is a, c, g, or t
ttggacgcggatttttttgtcttttccgggcacaaaatcttcggaccgacgggcataggcgcgttgtacggaaaagcggacgttctggaagaagccaagccgtatcagggcggcggcaacatgatcaaggacgtaacctttgaacgcacggtgtacaatcccgcgccatccaaatttgaagcgggaaccggcaatattgccgacgccgttggtttaggcgcagcgttggattatgtttccggcataggaatcgcgaacatcagcgcgtatgaacatgaactgcttgattacgcgacccgcgagctgaaacgcatcaacggactgcgtcttatcggcactgcggcggagaaagcaagcgttctgtcctttgtgcttgataacgcaagcgtggagcaggttggtaaacatcttgcaagccacggaatcgccgtgcgcgcgggacatcactgcgctcagccgattttgcgccgcttcgggctggaagcgacggtacgcccgaccatcgcgttttacaacaccgccgaagaaattgacaaactggtaagcgcgattaaagaactgcgggtgtaa

SEQ ID NO: 68050 - protein, 189 aa, Unknown
  Obtained from environmental sample
  DOMAIN (1)...(180): Aminotransferase class-V
  misc_feature (1)..(189): Xaa is any amino acid
MDADFFVFSGHKIFGPTGIGALYGKADVLEEAKPYQGGGNMIKDVTFERTVYNPAPSKFEAGTGNIADAVGLGAALDYVSGIGIANISAYEHELLDYATRELKRINGLRLIGTAAEKASVLSFVLDNASVEQVGKHLASHGIAVRAGHHCAQPILRRFGLEATVRPTIAFYNTAEEIDKLVSAIKELRV

SEQ ID NO: 68051 - DNA, 1620 bp, Unknown
  Obtained from environmental sample
  misc_feature (1)..(1620): n is a, c, g, or t
gtggagttttgcgacagcaaaactccaagccatccggcgcagccggatggcacgccacccgcccagcaaaaagccgctaccgcagcgcccgttcagcagaaagccgctcctgcggcgcccgcccagcaaaaagccgctatcgcagcgccgcctcccgcagagcctgaaaaaaaagccataacagacccccaggcgcagcttgaacttggcaatcgttacgcaaacggcgagggcgtacaaaaagatgaagtaaaagcccttgaatggtggacaaaggcggcgaaacaaggattgatggaagcgcagtataaagtcgggctttgcaattataacggctattataacggcagcaatatgtatgaggacgtacccacagccgtaaaatggtggacaaaggcggcggaacagggagacgttagagcgcagtatatgctcggcgtttgttatacaagcggtcacataatcggaaaggacacgcaacttgcccgcgaatatttttctaaagccgccgcgcagggcaacacccaggcgaagaaagaattaagcaagcgtatcctcttgtttgacttgctggcggagcgtatcggcaactggccttacaattctcctttgccgtatatcacaagcataataatcggtttgtgcttcgcccccggcgcgtgggcgttattcgcaagggcgcttgcgctcaataccccccttgccattgcgctgtccgtactgacaatgggcgccggcggcttcatcacctacaaagcggtaaacgactggtattatgcttccggcggctatgtgctgattacgcccgccatcgccctcatcggcatagtgttctttttcatcgtcccccaaccggtcaaagcggatcagatcgccccgcgcgaaacaagcgcggacacggaggcggccattaaaacaaccgaaaccgcggaaatgaccggcaacgcgaatttccgcaaaggcccttccacaaacgacgcggttatcaggcagttaaagaaaggcgaccttgttatattgacaggcgaagtatcaggcggctggacgcaggttttacgagacggcgaaacaggctgggtcagttcggagtttttgaaagtatggggaggaggacaagccccgtctccgcagccgtcagcgcaggcacaaccaaagccgcaaccgcagacgcagaaacaaaacgcagagccgcaatctgagaaacaagcggaagctccggcaacggcgcagccggcagcggtacagccagtagcggcgcaaccggctcctgttcccgcagaggaaattgttgattgggcaaggggcaattatacggcaagtattaaagtcagcgcgaattccataacaggccataacatcaacataacaggagcgcggacagtcgttcaaaagcccttatcgggacaccccaatttaaaatgggcttatgtttatgtcggcgataaaaaatacggcgtcgtatgggacagaacaacgtatagccgttcaatgcatgacggaatagaactcggcataggaagcgaggcgcggtccgcgtttgatttttacggcggttcagacaaagacagtattttcgcggatattagccgcgaagcgcccgcgataaaggttgtgaagtga

SEQ ID NO: 68052 - protein, 539 aa, Unknown
  Obtained from environmental sample
  DOMAIN (312)...(369): Bacterial SH3 domain
  misc_feature (1)..(539): Xaa is any amino acid
MEFCDSKTPSHPAQPDGTPPAQQKAATAAPVQQKAAPAAPAQQKAAIAAPPPAEPEKKAITDPQAQLELGNRYANGEGVQKDEVKALEWWTKAAKQGLMEAQYKVGLCNYNGYYNGSNMYEDVPTAVKWWTKAAEQGDVRAQYMLGVCYTSGHIIGKDTQLAREYFSKAAAQGNTQAKKELSKRILLFDLLAERIGNWPYNSPLPYITSIIIGLCFAPGAWALFARALALNTPLAIALSVLTMGAGGFITYKAVNDWYYASGGYVLITPAIALIGIVFFFIVPQPVKADQIAPRETSADTEAAIKTTETAEMTGNANFRKGPSTNDAVIRQLKKGDLVILTGEVSGGWTQVLRDGETGWVSSEFLKVWGGGQAPSPQPSAQAQPKPQPQTQKQNAEPQSEKQAEAPATAQPAAVQPVAAQPAPVPAEEIVDWARGNYTASIKVSANSITGHNINITGARTVVQKPLSGHPNLKWAYVYVGDKKYGVVWDRTTYSRSMHDGIELGIGSEARSAFDFYGGSDKDSIFADISREAPAIKVVK

SEQ ID NO: 68053 - DNA, 2256 bp, Unknown
  Obtained from environmental sample
  misc_feature (1)..(2256): n is a, c, g, or t
gtgcattgccatactgcttttggtattgggaattctcgtagcggcctcatgcgcttgcaaattgcttggcaaaaacgaaaaaaaggaaaatgttacgcagccatgaaagactttaacgaccttttaatttcaagtttaaccggcggcaaatactccagcattcagtacgaaacgaatatggacgccatacttcgtcttatagtccttaacatcgcctataccattgcctcgattataatcatcatactgggcgttatagacatgcagggcggaaacatagaagacggccttattcagataacccttggctttatgacttttctaaatctttttttgctgcgcacggaaatgccctttatcgcaagcggcttgattattacctccatttttggcgtattctgcggagtgtcgatctttgtaaaatatgatatgcacggcatgggcagcttgtggatttattcatttccgttattgtccatttttacgctgggacttccaacaggccttatcccggcgctggtaatctttgccgccgccatagccggcacttttggcggttatgcaaaatacaattattccacgtcggaatcggttattttatgcggcgtttatatttttgtaatgattcttaccgccgtatatgaatacgtgcgcacaatcaaagaacgctggcttgcccgccaggacagttatatgaatctggtttttgataacagccccgatattattatgcttctggataaaaatgcctgccttgttcactgcgccaaagttttacgtcagaaattaaatattaaagatatggatgaaatccacagaacaagctttgaggaactttttgacgggtttaccgactgggaaacgcttcaccagattaccgctcatttcggcagatcaataaatgagaaaaagaccgtaacattcgagcgggttttggattttggcgatgtcggaaacgaccgccattacgagattcattttaccccgatgtataacaacaacggcgaatttcagggggcttttatattttttcatgacatgacggaaattctggacgccaaggaccgggcggaacaggccagcaaggcaaagtcaaatttcctcgccaacatgagccacgaaatccgcacgcccatgaacgcaattatcggcatgaccgccatcgcgaaaagctcaagagatccggcgcgaaaggattattgccttacaaaaatcgagggcgcttctattcatttgctcggtgttatcaatgacatcctggatatgtccaagattgaagaaaacaaatttgaactttcatacgccgagtttgagctgaacgccatgatacaaagggtggttaatatttttgaattccgttttggggagaaaaaaattaattttacaatgaatttagctcccgatcttccgcaaagaatcataacggatgaccagcggcttgcccaggttgttaccaacctgttcagtaactccgtaaaatttacgccggaagggggaagcattacgctttcggtaaaacggttggaagacaatgaaccgaatttctgcactttggaaattacggttaccgatacgggaataggaataccgcaggaacagcaaggcaagctgttcgcttcctttgttcaggtggattcgagcataagccggaaattcggcggaacaggccttggacttgccatttgcaaaagaattgttgaactgatgcacggtaatattacgctggtatccgaaacgggcaagggggctacctttacttttacgttccgcgccgaactcggaacatcgggcgccgccggggatgttccgtccgaagcgggcggcggcgcgcttaacagcgcggacaatattgatttccacggcaaacggatactgcttgcggaagacgtggaaataaaccgcgagattgttattaccgtattgcagcccctgggacttgaaataaccgaagccgaagacgggcaaaaggcatacgatttgttccgcgccgatcccgacgcctatgaccttatttttatggatattcatatgcccgacgttgacggctatgaatcgacaaaactcatccgcgcctttaaccacccaaaagcaaaaaccgtcccgataatcgcaatgacggctaatgtcttccgtgaggacatagaacgctgtcatgccgccggcatgaacgaccatatcggaaagccgcttgactttgacgcggtaatagcgacattgaagcggtatttatcttataatgcttctaaaggagtataa

SEQ ID NO: 68054 - protein, 751 aa, Unknown
  Obtained from environmental sample
  DOMAIN (236)...(352): PAS fold
  misc_feature (1)..(751): Xaa is any amino acid
MHCHTAFGIGNSRSGLMRLQIAWQKRKKGKCYAAMKDFNDLLISSLTGGKYSSIQYETNMDAILRLIVLNIAYTIASIIIIILGVIDMQGGNIEDGLIQITLGFMTFLNLFLLRTEMPFIASGLIITSIFGVFCGVSIFVKYDMHGMGSLWIYSFPLLSIFTLGLPTGLIPALVIFAAAIAGTFGGYAKYNYSTSESVILCGVYIFVMILTAVYEYVRTIKERWLARQDSYMNLVFDNSPDIIMLLDKNACLVHCAKVLRQKLNIKDMDEIHRTSFEELFDGFTDWETLHQITAHFGRSINEKKTVTFERVLDFGDVGNDRHYEIHFTPMYNNNGEFQGAFIFFHDMTEILDAKDRAEQASKAKSNFLANMSHEIRTPMNAIIGMTAIAKSSRDPARKDYCLTKIEGASIHLLGVINDILDMSKIEENKFELSYAEFELNAMIQRVVNIFEFRFGEKKINFTMNLAPDLPQRIITDDQRLAQVVTNLFSNSVKFTPEGGSITLSVKRLEDNEPNFCTLEITVTDTGIGIPQEQQGKLFASFVQVDSSISRKFGGTGLGLAICKRIVELMHGNITLVSETGKGATFTFTFRAELGTSGAAGDVPSEAGGGALNSADNIDFHGKRILLAEDVEINREIVITVLQPLGLEITEAEDGQKAYDLFRADPDAYDLIFMDIHMPDVDGYESTKLIRAFNHPKAKTVPIIAMTANVFREDIERCHAAGMNDHIGKPLDFDAVIATLKRYLSYNASKGV

SEQ ID NO: 68055 - DNA, 1686 bp, Unknown
  Obtained from environmental sample
  misc_feature (1)..(1686): n is a, c, g, or t
gtgcggcagagattcctggaaaatgtaaaagaagcgcttaaaggcagaaaactggattaccttgtggtacatcatgtcgaacccgaccattccgccgtgattccggatttgatacggcagcatcctgaattaaaaattgtttgcagcgcaagggtattggaatttatcaaacaattctacgattttgatatagattcgcacgtccgtctggtcgaagaaaacgatacattgaataccggaaagcacacttttcaatttattatggcccctatggtgcattggcccgaagttatgatgacctatgattctacagcaaaaatacttttttccgcggacgctttcggacacttcggcgcgttgaacggcgcccttttcgcggatgaagtgaatttctccaaggattatatggacgaggctcgccgttactatgcaaatatagtcggtaaatacgggatgcaggttgaatcggcgctggataaagcgtccgctcttaatatagaaacgatttgtccgcttcacggctttgtatggcgttcaaatctaaatgaaatcatttcaaaatatttgctttggagcaaatatgagccggaagaacgcggcgttatgatcgcctacgcctccgtctacggaaatacggaaaacgcggcggaaattcttgcctgccgcttgcgcgacaaaggaattaaaacaactgtattcgatgtttcagttacgccggcatcagagatagtaagcgccgcgttcaaatggagccacatggtattcgcctccacaacctacaacgccggaattttcgtaacaatggaagccttgattaacgatcttgcggcgcacaatattcaaaaccgaaaggttgccattatcgaaaacggttcatgggctccaacaagcggcggtttgattcgtgaaatattgggcaagtgcgaaaaaattaatattcttgaaaataatgtcagcatactatccggcttaaagcctgagcagctttcggatattgaatcaatagcggaagcgattggtaaggatttccccgcaccggcggtagttgttcagaataatcagtctgcgccaaacactgttgatcccaacgtcatgttcaagctgtcttatggtttatttgtgttaacagccagagacggcaataaggacaacggctgtatcatcaataccgttatgcaaataaccgtaactcccgtaaagataataatcggagtgaataaagctaattatacccacgatatgatactaaagactggaaaattcaatgtttccgttttaagcgagaaagcgcctttccgtgtttttcagcaatttggttttcatagcggaaaagacacggataaattcgccgacagcggcgaagccgtgcgcacaacaaacggcgtccgttatctgtcagaatatgcaaacggcgttatttccgcggaagtgaaagaaactgttgactgcggaacccatacgctgtttatcgccgaagtgaatcaggcgttttcgctgtcgagcgacgcaagcgtaacctatcaatattattttgataatataaaacccaagcctcagccgcctaaaggaaacaaaaagggatttgtctgcaaaatatgcggttatgtgcatgaaggcgatactttgccggatgattttatttgtccgctgtgcaagcacggcgcctcggattttgagcgcctttga

SEQ ID NO: 68056 - protein, 561 aa, Unknown
  Obtained from environmental sample
  DOMAIN (3)...(173): Metallo-beta-lactamase superfamily
  misc_feature (1)..(561): Xaa is any amino acid
MRQRFLENVKEALKGRKLDYLVVHHVEPDHSAVIPDLIRQHPELKIVCSARVLEFIKQFYDFDIDSHVRLVEENDTLNTGKHTFQFIMAPMVHWPEVMMTYDSTAKILFSADAFGHFGALNGALFADEVNFSKDYMDEARRYYANIVGKYGMQVESALDKASALNIETICPLHGFVWRSNLNEIISKYLLWSKYEPEERGVMIAYASVYGNTENAAEILACRLRDKGIKTTVFDVSVTPASEIVSAAFKWSHMVFASTTYNAGIFVTMEALINDLAAHNIQNRKVAIIENGSWAPTSGGLIREILGKCEKINILENNVSILSGLKPEQLSDIESIAEAIGKDFPAPAVVVQNNQSAPNTVDPNVMFKLSYGLFVLTARDGNKDNGCIINTVMQITVTPVKIIIGVNKANYTHDMILKTGKFNVSVLSEKAPFRVFQQFGFHSGKDTDKFADSGEAVRTTNGVRYLSEYANGVISAEVKETVDCGTHTLFIAEVNQAFSLSSDASVTYQYYFDNIKPKPQPPKGNKKGFVCKICGYVHEGDTLPDDFICPLCKHGASDFERL

SEQ ID NO: 68057 - DNA, 411 bp, Unknown
  Obtained from environmental sample
  misc_feature (1)..(411): n is a, c, g, or t
ttgccggacatattgcgcataatggagccgctgatgaaatcgggcgtcctgctcaggcggaccgcggagcagatccaggaaaagagactggattacgccgtatttgagattgacggctccgtccacgcctgcggcgccctgcacgactggggcgaaaaccagggcgaaatcgccgccgtggcgagcgatcccctgtattccggcatgaatctgggccgccgcgtcgtgggctatttaatagaaaaagcccgcaaaaaaggcctgacccgcgtattcgtccttaccaccgtcacgcaggactggttcgaaaccctcggcttccgcgaagcccgggtggacagcctccccgaaaagaagcggcaagcgtacgatcaaagccggaacagcaaagtcttcgccctggaattatag

SEQ ID NO: 68058 - protein, 136 aa, Unknown
  Obtained from environmental sample
  DOMAIN (33)...(108): Acetyltransferase (GNAT) family
  misc_feature (1)..(136): Xaa is any amino acid
MPDILRIMEPLMKSGVLLRRTAEQIQEKRLDYAVFEIDGSVHACGALHDWGENQGEIAAVASDPLYSGMNLGRRVVGYLIEKARKKGLTRVFVLTTVTQDWFETLGFREARVDSLPEKKRQAYDQSRNSKVFALEL

SEQ ID NO: 68059 - DNA, 492 bp, Unknown
  Obtained from environmental sample
  misc_feature (1)..(492): n is a, c, g, or t
atggcgcaaggtattgacggctcccgtgttgtggaacgaaacgaagacaggcggataacccaacaactggatttcaacgaagacgttatagacgaaactacgataaggggagcgattgaaaaccttgcggaatacggcgggcttgaaatgaggaatgaaaaattaggaatgaggcatttgtccgtggctgttatttacgctgacggcgtgagggtcgaggggaaggaacaggtaaagcgtcctttggtaactgacagcgaaataatgacggccgcctataaggtctataaaaagacggtagaccgccgtatacggatacgctcaatcggcattagttttgataatttagttcctttgggatttcagcctgatttattcgaaccggaaactgaaacggcaaacaggaaattacaggaagccgtagacaagatacaaaaccgttacggggcgggaaaaatcaccaggggattggtgttggcaattaggaattag

SEQ ID NO: 68060 - protein, 163 aa, Unknown
  Obtained from environmental sample
  misc_feature (1)..(163): Xaa is any amino acid
MAQGIDGSRVVERNEDRRITQQLDFNEDVIDETTIRGAIENLAEYGGLEMRNEKLGMRHLSVAVIYADGVRVEGKEQVKRPLVTDSEIMTAAYKVYKKTVDRRIRIRSIGISFDNLVPLGFQPDLFEPETETANRKLQEAVDKIQNRYGAGKITRGLVLAIRN

SEQ ID NO: 68061 - DNA, 3111 bp, Unknown
  Obtained from environmental sample
  misc_feature (1)..(3111): n is a, c, g, or t
atgaatatacggcttggattggtttcggcatattcacttttgtacgggacgcgcaggcatggggatatactggacagggcggcggcgtatggggttaaaactgtctcaatttgtgatttgaataatttatatggcgtgcatacttttcttgaagaagcaaaagagcgggggatacgaccgattatcggcgtaacgctgacaattcctcattcctcattcctcattcctaattatttatattgttttgcggaaaacagggctgggttcggaaggctgtgcgaaatactgacaattcggaataaagacaaggaaaactttgatccgatcccgctgttatgtgaacaatccgccggattggttttggcttcttctgatgaaaaaatcttggaaaacctttcgggaaaggttaaacggctgtatgccgccgttactcctgttgatattcgggcggtaaataccggcaaaaagctgaatattccgtctgcctttattgataattccgtttttttggaacatgaggattatgccgttcataaagtgttacgcgccattgcgctcttgaagactataggcaatttgggcgcgggtgatacggcggaacgggagagggttttccgcgattcaaaggaaatccgccgcaggctgattgcatggccgcaggcgtttaagggcgctgaagaaatagcgggattatgcggctttgacaatttatttgacggatggattttcccggcttacaggactgcttcgcaggcagagacagcagagctgtccgtttctgatgaattacggaagcgggtttatgaaggtaacgctgaacgctacggagaacttggagatatggaaatcgggcggattgattatgaattgaatgtgattgagaaaacggggtttccttcttactttttgattattgacgacatagtaaaaatggcttcaagaacgtgcggccgcggttcgggagcggcttcaattgtttcttacggtttgggtattaccaatgtggacccgttacgccataacctgtactttgagaggtttctaaaccctaaccgtcctgatccgcccgacattgatattgatttcgcgtgggatgaaagggatgatttaataaaggcggtaattgaaaaattcggttctgattactgcgcccgtgtcgctaaccataatatgttccgttacagatcggccatgcgggagacggcgaaggcttacggttttggagatactgagataaataataaatataaaataataaataataaagagaagatagatgatcctgtgtggaaagaagtattgcgtttggctgtaaagattgaaggtctgccccgtggtttgggtatgcactgcggggggcttgtcattacgccggaaccgatttgccgttatgcgccaatagaaaaatccgctgaggggtttccgcttttggcgtgggaaaaggagggaacggaagcggcggggtttgtgaaaatagaccttttgggtaataggagtttggcggttattagggatagtgttataaatataaaatataaaataagaaataataaatacggaataaaaaataatgaatatcagatgacagatgatgagggagattgtgatattgaggagaggttgagtggggcgataaatgacggggagacgattgaggcgttatctgggggggacagtatgggggttttctatattgaaagccccgctatgcggcagttacagaaaaaaacaaggtgcggggattttgagcatattgtaattcacagttctattattcgtcccgcggcgaataaatttatcgcggaatatgtacggccgcttaaaagcgggaaatgggagccggtgcacccgttacttgaaaatatacttgatgagacttacggtattttgtgctatcaggaagacgtgtcaaaaacggctatcgcgcttgccggatttaatgaggctgatgccgacaaactgagaaaagtaatcgctaagaaaatgggcggggcaaggcttgcggtatacaaaaaccagttttttgacggctgccggaaaaacggcgttagtgaggaaacaatactgaagatatgggaaatgatgttgagttttgacggatattctttctgtaaaccgcatagcgcaagttacgcaatggtttcttttcaatcggcctacttaagagtgcattacccggcggaattcatggcggctgttttgtccaatcaaggcgggttttatcgtcctcatgcctatattgcggaaatcaggcgaatgcggcttattactgtcggtcctgatattaatttgtcgcagtggaagtattacggcgatagcaaatataaaataacaaataaaaaagaacaaataaatagagatatcggttatcgcggcgtggtggttatcgggtttatggctgttaaggggctttccgtgtccggggcgaaagttattattgatgagcgggagcggggcggggatttttcttctttggaagattttttgcggcggataaaacttaaccgtgatgatattatcgcgctttgtcccgccggagtgtttgacggtatcgcggacggcgcgcccaggcatttgcaggcaagaagactgctggcaaataacaaagaagaaataataaataaaaaaggaattaggaatttagatttgtttgccgcggaggtttccaccgcttttgataccgcgcaaaaaagtatagttgcgccacaggtgaaaaagacgcttaagggcgataatgatttatgggaagagtatgacgctttgggttttttgcgtaatactcatccgctcgcgttatggaaaaatgaggtattggcggtgaagcatcgggttaaggctttacgtattggggaatatgtcgggcggaatgttaaaatggtcggctggcctgttacgcaaaaagacgtatggactaaggacggtttaactatgtgttttttaagtttggaagatgaaacggcattgtatgaaacggttgtttttccgcatgtgtatgagcgttataatagactgctttttgaccaactgcctttgcttgtttttggacttgttaaaaacgatgagggggccgtttcccttgagattaacaggattgaagtattggggaaataa

SEQ ID NO: 68062 - protein, 1036 aa, Unknown
  Obtained from environmental sample
  DOMAIN (3)...(171): PHP domain
  misc_feature (1)..(1036): Xaa is any amino acid
MNIRLGLVSAYSLLYGTRRHGDILDRAAAYGVKTVSICDLNNLYGVHTFLEEAKERGIRPIIGVTLTIPHSSFLIPNYLYCFAENRAGFGRLCEILTIRNKDKENFDPIPLLCEQSAGLVLASSDEKILENLSGKVKRLYAAVTPVDIRAVNTGKKLNIPSAFIDNSVFLEHEDYAVHKVLRAIALLKTIGNLGAGDTAERERVFRDSKEIRRRLIAWPQAFKGAEEIAGLCGFDNLFDGWIFPAYRTASQAETAELSVSDELRKRVYEGNAERYGELGDMEIGRIDYELNVIEKTGFPSYFLIIDDIVKMASRTCGRGSGAASIVSYGLGITNVDPLRHNLYFERFLNPNRPDPPDIDIDFAWDERDDLIKAVIEKFGSDYCARVANHNMFRYRSAMRETAKAYGFGDTEINNKYKIINNKEKIDDPVWKEVLRLAVKIEGLPRGLGMHCGGLVITPEPICRYAPIEKSAEGFPLLAWEKEGTEAAGFVKIDLLGNRSLAVIRDSVINIKYKIRNNKYGIKNNEYQMTDDEGDCDIEERLSGAINDGETIEALSGGDSMGVFYIESPAMRQLQKKTRCGDFEHIVIHSSIIRPAANKFIAEYVRPLKSGKWEPVHPLLENILDETYGILCYQEDVSKTAIALAGFNEADADKLRKVIAKKMGGARLAVYKNQFFDGCRKNGVSEETILKIWEMMLSFDGYSFCKPHSASYAMVSFQSAYLRVHYPAEFMAAVLSNQGGFYRPHAYIAEIRRMRLITVGPDINLSQWKYYGDSKYKITNKKEQINRDIGYRGVVVIGFMAVKGLSVSGAKVIIDERERGGDFSSLEDFLRRIKLNRDDIIALCPAGVFDGIADGAPRHLQARRLLANNKEEIINKKGIRNLDLFAAEVSTAFDTAQKSIVAPQVKKTLKGDNDLWEEYDALGFLRNTHPLALWKNEVLAVKHRVKALRIGEYVGRNVKMVGWPVTQKDVWTKDGLTMCFLSLEDETALYETVVFPHVYERYNRLLFDQLPLLVFGLVKNDEGAVSLEINRIEVLGK

SEQ ID NO: 68063 - DNA, 804 bp, Unknown
  Obtained from environmental sample
  misc_feature (1)..(804): n is a, c, g, or t
gtgacaaagatatattacttcagcggtactggtaacagcttatggtcggcaaaaagaatatcgcgcataatcggcgaaccttgtgaattgtataatatcggtcttgaggctgaaaaagccgaaataataattgacgcggaagcagtgatatttgtgtatccgtcctatgcttatgggctgcctctgatagtccgccgctttgcgaaaaaggctgtttttagcgcgccgtatctggcggcatttgtaacctacggctctgatcccggaggcacacaggcggaattaagcaggatactaaaaaagaaaaaaatcggctcgctttactttggcaaaattcccgcggtggaaaattacattcccgtctttggcccgcccaatgacaaaaaaatcgcggaacgctcagccatgcaggaaaaagagactgaaaaagcagcgcgctatgtaattgaaagaaagacaaacagagtttatcccttccgtccgctgtcttccttaatttcgtttcttttttcgcttggagtaaaaatattttacagatattacagggtaagcgataaatgtaatggctgcggcatctgcgaaaaagtttgcccggttgccgctatagaaattaaggaaaaacgccccatcttcagcggcaaatgcgaaaattgcgccgcctgtatcgacatctgcccgttacgcgccattcagttcggacgcgctaaatttggcatgaggggatattgccatccggggatcgggattaaagaacttggaagggtaccacttttcacttctaggaaggaaggaaggaataaataa

SEQ ID NO: 68064 - protein, 267 aa, Unknown
  Obtained from environmental sample
  DOMAIN (208)...(231): 4Fe-4S binding domain
  misc_feature (1)..(267): Xaa is any amino acid
MTKIYYFSGTGNSLWSAKRISRIIGEPCELYNIGLEAEKAEIIIDAEAVIFVYPSYAYGLPLIVRRFAKKAVFSAPYLAAFVTYGSDPGGTQAELSRILKKKKIGSLYFGKIPAVENYIPVFGPPNDKKIAERSAMQEKETEKAARYVIERKTNRVYPFRPLSSLISFLFSLGVKIFYRYYRVSDKCNGCGICEKVCPVAAIEIKEKRPIFSGKCENCAACIDICPLRAIQFGRAKFGMRGYCHPGIGIKELGRVPLFTSRKEGRNK

SEQ ID NO: 68065 - DNA, 336 bp, Unknown
  Obtained from environmental sample
  misc_feature (1)..(336): n is a, c, g, or t
atgcgtaaaaaacgtgaatttgtcgaaaacgccttttatcatgttacttccagaaccaatgataaagtccgcattttcgagaaccgtcttggcaggaaaattatgcttatcgccctacaggacgctaagaataaataccatttccggcttactaacttctgtataatgcctacccatattcatttactgattagaccagcggaaggtacttgcctatacaggattattcaatggattaagacacgttccgccaggcattggaactgtatacatggctccactgatcacgtttggggcgctcaaaaaatacacggcgttaagccgtgtttcttctaa

SEQ ID NO: 68066 - protein, 111 aa, Unknown
  Obtained from environmental sample
  misc_feature (1)..(111): Xaa is any amino acid
MRKKREFVENAFYHVTSRTNDKVRIFENRLGRKIMLIALQDAKNKYHFRLTNFCIMPTHIHLLIRPAEGTCLYRIIQWIKTRSARHWNCIHGSTDHVWGAQKIHGVKPCFF

SEQ ID NO: 68067 - DNA, 483 bp, Unknown
  Obtained from environmental sample
  misc_feature (1)..(483): n is a, c, g, or t
atggtcagaagtttatggacaggcgcgtcgggaatgattggtcagcagtcaaatacggatgtaatcgcgaataacctcgcaaacgtgaatactcacggatacagaaaacagcgcgcggattttgaggatcttatctatcagactgtcagagtggcgggcactccggctaccgaggacactgtcgttccggtcgggattcagatgggccacggcgttaaactggcggatacccagcgcgtttttactcaaggttctttacagcagaccgaagtgtccaccgacatggcgattatgggcgaaggttttttcaagattaaaaggtacgacggcagtatggcgtatacgcgtaacggaaactttaaggtcgatccggacgggcgtatggtagacagcaacggtaattggctgataccggatataataatgcccgaactttttttacctgatacaattaatataacaaaagacggcagggtaagctaa

SEQ ID NO: 68068 - protein, 160 aa, Unknown
  Obtained from environmental sample
  DOMAIN (5)...(35): Flagella basal body rod protein
  misc_feature (1)..(160): Xaa is any amino acid
MVRSLWTGASGMIGQQSNTDVIANNLANVNTHGYRKQRADFEDLIYQTVRVAGTPATEDTVVPVGIQMGHGVKLADTQRVFTQGSLQQTEVSTDMAIMGEGFFKIKRYDGSMAYTRNGNFKVDPDGRMVDSNGNWLIPDIIMPELFLPDTINITKDGRVS

SEQ ID NO: 68069 - DNA, 915 bp, Unknown
  Obtained from environmental sample
  misc_feature (1)..(915): n is a, c, g, or t
atgataaaaaagagggcaaataagctcttttcttggagggaaagtttgataagaggatggtatacaggcgccagcggcatgagggcgcagcagtggcggctggacgcggttgcgaacaatctggctaacgtggacacggacggatttaagcgggatttagcggttcataaagccaatcccgagcttttgataaggcggcaggacgatgacggggtatacaaaatccccttcggctcggcggatgccgcgcccatagtcggaaaattgggcatgggcattgaagttaacgaattatataccatttttgaacagggtgcgatgaaagaaacccagagcgatttcgacattgctctggataacagaataggacagagggccataggtttttttacggtttccaccccctggggcgagcgttataccagaaacggctcgtttacccttggaaaagagggctttttagagtcaaaagaaggctatccggttatgggcgaaaacggtcccatcagggtaaaagccaacaattttcaggtagataaagagggaaggatatggataaacgccgcctatcccgacgagcccgatgtgtttgtaggcagggaatccaatcgatgggaagatatggaattgcttgataccctaaaaatcgtaaattttgataatgaccggtatctgaaaaaacagggaagcagtctttattatgaaacagaatattcagggcccgcggagataataccgctggacgaacgcccgaaagttttgcagggctttgtcgaggcctcaaatgttaacccggttgtagagatggttcaaatgatcgaagtgaaccgcgcttatgaggcgaatcaaaaaataatccagacccacgaggcaatgttgggtactttaataaatcaagtagccaagtttggctga

SEQ ID NO: 68070 - protein, 304 aa, Unknown
  Obtained from environmental sample
  DOMAIN (20)...(50): Flagella basal body rod protein
  misc_feature (1)..(304): Xaa is any amino acid
MIKKRANKLFSWRESLIRGWYTGASGMRAQQWRLDAVANNLANVDTDGFKRDLAVHKANPELLIRRQDDDGVYKIPFGSADAAPIVGKLGMGIEVNELYTIFEQGAMKETQSDFDIALDNRIGQRAIGFFTVSTPWGERYTRNGSFTLGKEGFLESKEGYPVMGENGPIRVKANNFQVDKEGRIWINAAYPDEPDVFVGRESNRWEDMELLDTLKIVNFDNDRYLKKQGSSLYYETEYSGPAEIIPLDERPKVLQGFVEASNVNPVVEMVQMIEVNRAYEANQKIIQTHEAMLGTLINQVAKFG

SEQ ID NO: 68071 - DNA, 1410 bp, Unknown
  Obtained from environmental sample
  misc_feature (1)..(1410): n is a, c, g, or t
ttgggcggaaatcgtttaacgggctataattgggaaaataatttttcaaacgcgggccaggactggcatcattccaacgatctttatcttgtgcctaaagataaagacagttcaacaccgggtattacgatactggactttgttaaaaaggccaataaactgggagcatacgcgcttattacattgcctatggcgggatatgtatccaatgacgggaacggtacggtcgataaaaatgatacggcgccttcgaaacgttttgtgcctgtaaaagaccgtaaaaacggcgcgttgtcactaaaaccgaatctttccgacagcgcggtttattcggatgaattagtcaattacctgatttccaaacttggaaattcgcataacggcggcgtacgcggttattcgctggataacgagcccgctctgtggtatagaacgcatccgcgcattcaccccgtaaaggtcaatgtcgctgaaatactggaaaaatcgatttccctgtcttcagttgtcaaagactttgattccgccgccgaagtattcggtcccgcgttatacggcgtcgcggcttacgttgattttcaaagcgctcccgactggtttaaatattccgcttcttacaggtggtttatcgatgcctacctggacggaatgcgtaaggcaggcgcggaaaaaagccgccgtctgcttgatgtgcttgacgtgcattattacacggaagcgcgttcgcctcttggtcaccgtgtaagtgaggatcgtgacactaacgaagaatgtatctacacgcgttttcagtctacgcgctcgttatgggataaaacctaccgtgaaaaaagctggattgagcagaactttggaaaatttttaccaattttgccttcccttaacgcgtccattgaacagtattaccccggtaccaaacttgccgtaagcgagtacaacttcggcggagaggatcatgtttcaggcggtatcgcgcaggccgacgctctcggtatttttgcttctcatggcgtgtattacgcggcgttctggcctatgtccgaaaaacttgattatatatattccggcgtcaacctttacaccaattatgacggcaagaacagcgccttcggcaatacgcttgttgaatcttcaacaagcgatattgaaaattcatcggtctacgcgtcaacaggcgaagacggcgcgcttcatgttattttattgaataaaaacataaaaaagccggaacagtttatatttacagtaaattccgacgcgcgttatacaaattttgtatattacggatttaacgctaaaagctccgctattaaaaaatacgattccggcgctataggtccaaaaggcgccgacggcttctcaatacagataatgccaatgtccgctgttcatcttgttttttctttataa

SEQ ID NO: 68072 - protein, 469 aa, Unknown
  Obtained from environmental sample
  misc_feature (1)..(469): Xaa is any amino acid
MGGNRLTGYNWENNFSNAGQDWHHSNDLYLVPKDKDSSTPGITILDFVKKANKLGAYALITLPMAGYVSNDGNGTVDKNDTAPSKRFVPVKDRKNGALSLKPNLSDSAVYSDELVNYLISKLGNSHNGGVRGYSLDNEPALWYRTHPRIHPVKVNVAEILEKSISLSSVVKDFDSAAEVFGPALYGVAAYVDFQSAPDWFKYSASYRWFIDAYLDGMRKAGAEKSRRLLDVLDVHYYTEARSPLGHRVSEDRDTNEECIYTRFQSTRSLWDKTYREKSWIEQNFGKFLPILPSLNASIEQYYPGTKLAVSEYNFGGEDHVSGGIAQADALGIFASHGVYYAAFWPMSEKLDYIYSGVNLYTNYDGKNSAFGNTLVESSTSDIENSSVYASTGEDGALHVILLNKNIKKPEQFIFTVNSDARYTNFVYYGFNAKSSAIKKYDSGAIGPKGADGFSIQIMPMSAVHLVFSL

SEQ ID NO: 68073 - DNA, 531 bp, Unknown
  Obtained from environmental sample
  misc_feature (1)..(531): n is a, c, g, or t
ttgaaaaacgcgcgagtgcaaaccaacatgacttaccttgatgaaaagcgcgtggaattaatttacgacatgcccctttccgaagtcttgttcgatttctacgaccgtcttaaaagcatttccaggggttacgcgtcatttgactacgatatttcaggctacaagccgacggaacttgccaaactggacattcttcttaacggcaaggcggtggacgccctttcccagcttgtgtttaagggcaacgcctacgaccgcgcccgcaaagtctgcgaaaggttacgcgacgaaatcccccgccagcagttcaagataccgattcaaggctccataggcagccagattatcgcgcgggaaacggtcaacgccctgcgaaaagacgtactagccaaatgctacggcggcgacatcacgcgcaaacgcaaacttttggaaaaacaaaaagaaggcaaaaaacgcatgaaaatggtaggggatgtggaactcccccaaagcgcgtttttggcggttttgaaagcgaaggacgaatag

SEQ ID NO: 68074 - protein, 176 aa, Unknown
  Obtained from environmental sample
  DOMAIN (1)...(65): Elongation factor G C-terminus
  misc_feature (1)..(176): Xaa is any amino acid
MKNARVQTNMTYLDEKRVELIYDMPLSEVLFDFYDRLKSISRGYASFDYDISGYKPTELAKLDILLNGKAVDALSQLVFKGNAYDRARKVCERLRDEIPRQQFKIPIQGSIGSQIIARETVNALRKDVLAKCYGGDITRKRKLLEKQKEGKKRMKMVGDVELPQSAFLAVLKAKDE

SEQ ID NO: 68075 - DNA, 1677 bp, Unknown
  Obtained from environmental sample
  misc_feature (1)..(1677): n is a, c, g, or t
ttgtttttcaaggtatttcttgaattttatattcatatatataataattatagtatgccggaaaccgcgcaaacacagtcgtcttatgttgacactttgcagcaagcccttatcgcccgaaaggattttatggaaagggaagagatgcaaaaactcaaagatgaactgagaagttttcatacctcattcgcctctttgtacaacatatatttaaagaaaaaattaattgacgaagacccctataaacaggaagcaaaaatcaatgagctggaagtgccggacgcatcgccttttaacgaacaaaaacgcatagaacaaatgtcgataaggctggccaattatgacaaccagctggactatttaaccaacttttaccaacttggcatagatttcctgaatctggaccgtataaaacgtattgtaggccttgtccgctatatagactgggtcgcattatcgccggacagccagagccttatgaccaaagcggtcgcggaaatatcaatcaactctaaagccggcgttgatcctataacgcttagtataataggcgaaagcctttcaagactgtccaaaacgacagcgtcttcaatgaccatattgaagaatctgagtatctactacagggaatgttataaacttgatatacgccaaaaaataacgcagagcatgaccccgaacgaagcaactcttgaaaacataaagaaaaaaatgtcttccgcaatgccgggatcgccgttctataaagaactggttgatgaagttatcaaggaagattattccaaagacggtcaggacatgaaggaaatggtccttaacaaccttaaggttcccggagtcaaacaaaaggctgtaaaagccgcagtaaatttcaaaaacatcctgctggacggcattcaggtaataggcggcgcctcagcttcgctcacagaaatcatgacaaaacttgatgataaccaggccataatggaaagccctaaaaaaggcttcatgcatatgatcaaggagcttatcaggcagattacaaacgctgaacctgaagaagttatctacaccgtggaatacatggatcaaaccaaggatgtgccggtaaaagaaaagataagttatcatcagttcagggatgagctggaaaaaaagataagatttttgtccagtttaatgaggggaccggcttatcagaaactgtcgcaaatgacggaagaacagataatcggctatctggaaagaaatatcgccgaaatgcaaagttatcacaaaaccctgggcgcgcttgatgattttttcaaggcaaaagtcgccccggaaaacagggataaaattaaagggattaaaccggaattgtcggcgttaaaaaattcttatgtaaaggccaaccaactgcgttatgattacagcgcccaaaaagaagaagaagaacagctaaggcgccttggcatacacatggacaccgaagacgccgcggcagctccgccctccggatccccctctgccgccggaagtccccctgccgccgggaaacctcctgccggcggaaaacctcctgccgccgggaaaccgcccgccgcgggaaagcctcccgccgggaaaccgccggcgcccgcaggcaaaccccccgctgccgggaaaccgcccgccgccgcgggaaagcctcccgcaaaagggaaagcctcctga

SEQ ID NO: 68076 - protein, 558 aa, Unknown
  Obtained from environmental sample
  misc_feature (1)..(558): Xaa is any amino acid
MFFKVFLEFYIHIYNNYSMPETAQTQSSYVDTLQQALIARKDFMEREEMQKLKDELRSFHTSFASLYNIYLKKKLIDEDPYKQEAKINELEVPDASPFNEQKRIEQMSIRLANYDNQLDYLTNFYQLGIDFLNLDRIKRIVGLVRYIDWVALSPDSQSLMTKAVAEISINSKAGVDPITLSIIGESLSRLSKTTASSMTILKNLSIYYRECYKLDIRQKITQSMTPNEATLENIKKKMSSAMPGSPFYKELVDEVIKEDYSKDGQDMKEMVLNNLKVPGVKQKAVKAAVNFKNILLDGIQVIGGASASLTEIMTKLDDNQAIMESPKKGFMHMIKELIRQITNAEPEEVIYTVEYMDQTKDVPVKEKISYHQFRDELEKKIRFLSSLMRGPAYQKLSQMTEEQIIGYLERNIAEMQSYHKTLGALDDFFKAKVAPENRDKIKGIKPELSALKNSYVKANQLRYDYSAQKEEEEQLRRLGIHMDTEDAAAAPPSGSPSAAGSPPAAGKPPAGGKPPAAGKPPAAGKPPAGKPPAPAGKPPAAGKPPAAAGKPPAKGKAS

SEQ ID NO: 68077 - DNA, 318 bp, Unknown
  Obtained from environmental sample
  misc_feature (1)..(318): n is a, c, g, or t
ttgacacgatattcctgcttatcttctattatcggtaaaattccggcattaaggaatacaaaatcaggaggctttcccttttgcgggaggctttcccgcggcggcgggcggtttcccggcagcggggggtttgcctgcgggcgccggcggtttcccggcgggaggctttcccgcggcgggcggtttcccggcggcaggaggttttccgccggcaggaggtttcccggcggcagggggacttccggcggcagagggggatccggagggcggagctgccgcggcgtcttcggtgtccatgtgtatgccaaggcgccttag

SEQ ID NO: 68078 - protein, 105 aa, Unknown
  Obtained from environmental sample
  misc_feature (1)..(105): Xaa is any amino acid
MTRYSCLSSIIGKIPALRNTKSGGFPFCGRLSRGGGRFPGSGGFACGRRRFPGGRLSRGGRFPGGRRFSAGRRFPGGRGTSGGRGGSGGRSCRGVFGVHVYAKAP

SEQ ID NO: 68079 - DNA, 384 bp, Unknown
  Obtained from environmental sample
  misc_feature (1)..(384): n is a, c, g, or t
ttggcatacacatggacaccgaagacgccgcggcagctccgccctccggatccccctctgccgccggaagtccccctgccgccgggaaacctcctgccggcggaaaacctcctgccgccgggaaaccgcccgccgcgggaaagcctcccgccgggaaaccgccggcgcccgcaggcaaaccccccgctgccgggaaaccgcccgccgccgcgggaaagcctcccgcaaaagggaaagcctcctgattttgtattccttaatgccggaattttaccgataatagaagataagcaggaatatcgtgtcaactttaaagaaaacggctctggtgctgattatctcgggtcttctttatgccgggatggtctatttactggattttga

SEQ ID NO: 68080 - protein, 127 aa, Unknown
  Obtained from environmental sample
  misc_feature (1)..(127): Xaa is any amino acid
MAYTWTPKTPRQLRPPDPPLPPEVPLPPGNLLPAENLLPPGNRPPRESLPPGNRRRPQANPPLPGNRPPPRESLPQKGKPPDFVFLNAGILPIIEDKQEYRVNFKENGSGADYLGSSLCRDGLFTGF

SEQ ID NO: 68081 - DNA, 933 bp, Unknown
  Obtained from environmental sample
  misc_feature (1)..(933): n is a, c, g, or t
atggataaaatcgttgtggacaatgtggagttggccttggcccaccccgtagcaacctccgtggagtggattgggcagaccgagccgctacggcagttgctcgcctgctggatcaccgtcgacaaacgcgacctgccgctcacgccgcgcatcatcggctaccccggaatcggcaagaccacgctcgccatagccgcggcgcgggcgcgggggcaagacgtctacatcatgcaatgcaccgcggacacgcgccccgaagacctccttgtcacgccggtgctctccgaacaaggcaaaatctcctaccacgcctcgccgctactcacagccgccgtcagaggcgcggtcgccattctcgacgaaggcaacaggatggcggaaaagtcgtgggcgtcgctcgccggactcttcgacaaccgcaggatggcggagtcggtcgtcgccggaataaccgtatgcgcgcaccccgatttcaggccgcccatacccatgaacgaggactcatccacattcgaaatcccggactacatcatgtcgcgcttgcagccggggataaagattccctctccggagcgggaagacgagatgaagatcctctcctacagcctcccattttcgagcgcggagatactagatatgtgcgttgactacctgcagaaggcgcacgggttggatttgccctnttcggtgcgcgacgggatcaacataatacgttacgcgctgaaactcaaagagagcgacaagggcgcggacacgggcgagttgttcaaaaaggcagtgagccagatactcggcgaagacgccttggacatagacaaattggcgcagagccgtaagaggcaggggggcgacattccgtcgatgaacttgggtgattttttcttctccgacgatgaggatctcaaccccgacgccaacaaggagtggggttaa

SEQ ID NO: 68082 - protein, 310 aa, Unknown
  Obtained from environmental sample
  DOMAIN (51)...(183): ATPase family associated with various cellular activities (AAA)
  misc_feature (1)..(310): Xaa is any amino acid
MDKIVVDNVELALAHPVATSVEWIGQTEPLRQLLACWITVDKRDLPLTPRIIGYPGIGKTTLAIAAARARGQDVYIMQCTADTRPEDLLVTPVLSEQGKISYHASPLLTAAVRGAVAILDEGNRMAEKSWASLAGLFDNRRMAESVVAGITVCAHPDFRPPIPMNEDSSTFEIPDYIMSRLQPGIKIPSPEREDEMKILSYSLPFSSAEILDMCVDYLQKAHGLDLPXSVRDGINIIRYALKLKESDKGADTGELFKKAVSQILGEDALDIDKLAQSRKRQGGDIPSMNLGDFFFSDDEDLNPDANKEWG

SEQ ID NO: 68083 - DNA, 582 bp, Unknown
  Obtained from environmental sample
  misc_feature (1)..(582): n is a, c, g, or t
gtggattgggcagaccgagccgctacggcagttgctcgcctgctggatcaccgtcgacaaacgcgacctgccgctcacgccgcgcatcatcggctaccccggaatcggcaagaccacgctcgccatagccgcggcgcgggcgcgggggcaagacgtctacatcatgcaatgcaccgcggacacgcgccccgaagacctccttgtcacgccggtgctctccgaacaaggcaaaatctcctaccacgcctcgccgctactcacagccgccgtcagaggcgcggtcgccattctcgacgaaggcaacaggatggcggaaaagtcgtgggcgtcgctcgccggactcttcgacaaccgcaggatggcggagtcggtcgtcgccggaataaccgtatgcgcgcaccccgatttcaggccgcccatacccatgaacgaggactcatccacattcgaaatcccggactacatcatgtcgcgcttgcagccggggataaagattccctctccggagcgggaagacgagatgaagatcctctcctacagcctcccattttcgagcgcggagatactagatatgtgcgttga

SEQ ID NO: 68084 - protein, 193 aa, Unknown
  Obtained from environmental sample
  misc_feature (1)..(193): Xaa is any amino acid
MDWADRAATAVARLLDHRRQTRPAAHAAHHRLPRNRQDHARHSRGAGAGARRLHHAMHRGHAPRRPPCHAGALRTRQNLLPRLAATHSRRQRRGRHSRRRQQDGGKVVGVARRTLRQPQDGGVGRRRNNRMRAPRFQAAHTHERGLIHIRNPGLHHVALAAGDKDSLSGAGRRDEDPLLQPPIFERGDTRYVR

SEQ ID NO: 68085 - DNA, 1074 bp, Unknown
  Obtained from environmental sample
  misc_feature (1)..(1074): n is a, c, g, or t
gtgtcaggtaacactttcggcaaactatttaaagtaactaccttcggcgaatcgcacggagccgctatgggctgcgtaatagacggctgtccctcaggcttagaattgtcagctaacgacattgaaacagagcttgcccgccgccgtcccggcgcgatttacggctccagagacgaaaaagactcgcctgaaattttatcgggagtttatgaaggcaaaacgcttggcagcccgatagcgattattgtccgcaacgcaaaccagaacagcaaagactatgacgaaataaaagacatttacagacccggacacgccgattacacatgggaagcaaaatacggttttagagaccatcgcggcggcggcagaagctcagggcgcgaaactctttgcagagtcgccgcgggcgcggtggcgaaaaaatttctcgctttacaaggaataaaaatacaagcgtggacatcgtccatcgccggtatagatcaaccctcccctaacgaagacggttttgattttgaagaaatagagcgcaatccttttcgcgtcccaagcaaaagcggcgcggaaaaagcagccgcaaaaatagaggaacttcgctcagaaggcgaaagcgcaggcggcgtaataacctgtcttacaacaggcgtacccgttggattaggagagcctgtatttgaaaaacttgacgcaagtctagccgccgcagtaatttcaattggagcgtgcaagggcgttgagtttggagcgggtttcgccgccgcaaacttgaaaggcagtgaaaacaacgacaagccttgcgaatgcggcaaaggtaaattcgccacaaataattgcggcggcatattggggggcatttcttcggggcaggatattgtttttagagcggcgtttaagccgacgccctcaatcagtaagccgcaaaaagttttagatagggatggcggcgtgaaagaaatagcgattaaaggcagacacgatgtttgcattgttccaagagccgtgcctgttgtggaagcaatgaccgcgcttatactcgctgactttttgcttttatcgcggtgcgcgaaagtttaa

SEQ ID NO: 68086 - protein, 357 aa, Unknown
  Obtained from environmental sample
  DOMAIN (10)...(353): Chorismate synthase
  misc_feature (1)..(357): Xaa is any amino acid
MSGNTFGKLFKVTTFGESHGAAMGCVIDGCPSGLELSANDIETELARRRPGAIYGSRDEKDSPEILSGVYEGKTLGSPIAIIVRNANQNSKDYDEIKDIYRPGHADYTWEAKYGFRDHRGGGRSSGRETLCRVAAGAVAKKFLALQGIKIQAWTSSIAGIDQPSPNEDGFDFEEIERNPFRVPSKSGAEKAAAKIEELRSEGESAGGVITCLTTGVPVGLGEPVFEKLDASLAAAVISIGACKGVEFGAGFAAANLKGSENNDKPCECGKGKFATNNCGGILGGISSGQDIVFRAAFKPTPSISKPQKVLDRDGGVKEIAIKGRHDVCIVPRAVPVVEAMTALILADFLLLSRCAKV

SEQ ID NO: 68087 - DNA, 504 bp, Unknown
  Obtained from environmental sample
  misc_feature (1)..(504): n is a, c, g, or t
atgcaaacatcgtgtctgcctttaatcgctatttctttcacgccgccatccctatctaaaactttttgcggcttactgattgagggcgtcggcttaaacgccgctctaaaaacaatatcctgccccgaagaaatgccccccaatatgccgccgcaattatttgtggcgaatttacctttgccgcattcgcaaggcttgtcgttgttttcactgcctttcaagtttgcggcggcgaaacccgctccaaactcaacgcccttgcacgctccaattgaaattactgcggcggctagacttgcgtcaagtttttcaaatacaggctctcctaatccaacgggtacgcctgttgtaagacaggttattacgccgcctgcgctttcgccttctgagcgaagttcctctatttttgcggctgctttttccgcgccgcttttgcttgggacgcgaaaaggattgcgctctatttcttcaaaatcaaaaccgtcttcgttaggggagggttga

SEQ ID NO: 68088 - protein, 167 aa, Unknown
  Obtained from environmental sample
  SIGNAL (1)...(19)
  misc_feature (1)..(167): Xaa is any amino acid
MQTSCLPLIAISFTPPSLSKTFCGLLIEGVGLNAALKTISCPEEMPPNMPPQLFVANLPLPHSQGLSLFSLPFKFAAAKPAPNSTPLHAPIEITAAARLASSFSNTGSPNPTGTPVVRQVITPPALSPSERSSSIFAAAFSAPLLLGTRKGLRSISSKSKPSSLGEG

SEQ ID NO: 68089 - DNA, 816 bp, Unknown
  Obtained from environmental sample
  misc_feature (1)..(816): n is a, c, g, or t
atgatatctccaaaagaagtaaatatggacgtaaaacttatagacatggttgactcgtttggtctttccggtctagcgatgaagtgtttaaaaatgcttcttggaagcgaggaagttcaagtgtctcaggaatacgcaaatatagtttctatcgtaagacttggatacaacgaccacggtcctgtccacatgcgcactgtagcgtataatgccatgttaatgctgaatttgttaaagaaatccggaataaaaacaagtcttgaaactgatggatgtggcagttttgaggacagcataatcggtgtaatgcttgccggtatgtttcatgattttggcatggctatgggaagacaaaatcacgaatcacacagcatgattcttgctatgcccgatatcgataaaagtgtagagcagatatacaaagatgatttgaaaaaaagagtaatgatccgcgctctggctcttgaaggaatgcccggtcacatgggatcaataactatttcttctcttgaggcgggaataatacaggttgcggacggctgcgacatgaccaaaggcagggcgcgcattccgatttctatttctcatttaacaagggttggacaaattcaccaattttcagccaattcaatagaggaagtcgttataaacgccggcaaagaaaaacctgtccgcgttgacgtatacatgtcgagcgaagtcggtctttttcaggttgaagaagtgctgatgcataaaatcgcccaaagcaccgccaaacagtatatagaattatacgctaatgttactaacgaggaaacaagaaggtatttatag

SEQ ID NO: 68090 - protein, 271 aa, Unknown
  Obtained from environmental sample
  misc_feature (1)..(271): Xaa is any amino acid
MISPKEVNMDVKLIDMVDSFGLSGLAMKCLKMLLGSEEVQVSQEYANIVSIVRLGYNDHGPVHMRTVAYNAMLMLNLLKKSGIKTSLETDGCGSFEDSIIGVMLAGMFHDFGMAMGRQNHESHSMILAMPDIDKSVEQIYKDDLKKRVMIRALALEGMPGHMGSITISSLEAGIIQVADGCDMTKGRARIPISISHLTRVGQIHQFSANSIEEVVINAGKEKPVRVDVYMSSEVGLFQVEEVLMHKIAQSTAKQYIELYANVTNEETRRYL

SEQ ID NO: 68091 - DNA, 1296 bp, Unknown
  Obtained from environmental sample
  misc_feature (1)..(1296): n is a, c, g, or t
atgcccgagggcaagggagggtcatattcgaatattggaaaaaattcgggaccggcggttttttcctttcattttccgcgaattgtcgccgaaccgcatttatcgaccaatatggattttggtccgtgtcatatttatgagcccgcaaaaaaacaaggcggcgtagaaggtgtaagaagtcttttcagcgtcaatgttgatcctcaaacaattccttctatgggcgaatggtttatagttgaatatactccaagccaaaggattgtatacaaacgcaataaagattactggaaaaaagacgtaaacggcgtatcgcttccctacccagaggaaatgatccttcgtataatcccggaagaaaacacaaaacttttaatgtttaaaaacggagatgttgaaacctacagccttcgtcctgaagatgttgacgggcttataaacagaggcgacggaagttatactgtttttaacagcgaaggttctttaggcgcatcgttttggacgttcaatcaaaataccataaacgaaaaaagtcccaaatacgaatggtttacaaaaaaagaattccgtcaggcgatgagctgtctttttaaccgcgacagaataaacgcccaagtataccgcggtctcgctcagccaaaaattaatattttccctgaaaccaatccttactataatcccaatattactttgcaatatctttttgatacggaacgcgctattgaacttttatcttctatcggtattaaacaagataaaaggggaattatgcgggattggaaaaaccgtaaacttgaatttgatttaacgataagatcggaaagttccgtgtatcaggatatagcgtctatcataagagatgaactttcaaaagtcggcattaaggtaaatatccgcgtattggattttcaaaaacaggtacagttaatacaaaaaacttttgagtgggattcaatgttgataggtctttcaggttcaaatacattcccaagtcagggaagcaatgtctggccgtcgtcatctaacttgcatatgtggtttccaaatcaagaaaagcccacgacggaatgggaagcgcggattgattatctttacaacgaaggtaaatttacaatcgacgcgaaaaaagcgcaggaaatttgggatgagtttcaatcaatactgcttgaacagtgtcctatgatatacttaatgcgttcacgcggtttttgggcgataaacaatcgctgggatttatcaaatgtttattttgataaccgaaacggcgatgaaacaaattatacttttttaaaataa

SEQ ID NO: 68092 - protein, 431 aa, Unknown
  Obtained from environmental sample
  DOMAIN (7)...(345): Bacterial extracellular solute-binding proteins, family 5 Middle
  misc_feature (1)..(431): Xaa is any amino acid
MPEGKGGSYSNIGKNSGPAVFSFHFPRIVAEPHLSTNMDFGPCHIYEPAKKQGGVEGVRSLFSVNVDPQTIPSMGEWFIVEYTPSQRIVYKRNKDYWKKDVNGVSLPYPEEMILRIIPEENTKLLMFKNGDVETYSLRPEDVDGLINRGDGSYTVFNSEGSLGASFWTFNQNTINEKSPKYEWFTKKEFRQAMSCLFNRDRINAQVYRGLAQPKINIFPETNPYYNPNITLQYLFDTERAIELLSSIGIKQDKRGIMRDWKNRKLEFDLTIRSESSVYQDIASIIRDELSKVGIKVNIRVLDFQKQVQLIQKTFEWDSMLIGLSGSNTFPSQGSNVWPSSSNLHMWFPNQEKPTTEWEARIDYLYNEGKFTIDAKKAQEIWDEFQSILLEQCPMIYLMRSRGFWAINNRWDLSNVYFDNRNGDETNYTFLK

SEQ ID NO: 68093 - DNA, 729 bp, Unknown
  Obtained from environmental sample
  misc_feature (1)..(729): n is a, c, g, or t
atgggtaagagcgaattagtaatgtatcaacctgacagaactgttacggttgaggtcagactcgaaaatgaaaatgtctggttaaacagacagcaaattgctgttttgtttgatagggatataaaaaccatcggaaaacatatcaacaatgcattggatgaagaattagcggcattttcaaccgtcgcaaaatttgcaacggttgggaaaaagaagggtaaaaattcagttgtcgcaaattttgcgacaactgggaaaaaaaggggtgaaaatccagttgtcgcaaattttgcgacaactgccgcagatggtaaagcatatcaagtggaatactataatcttgatgtaattttgtcggtaggttacagggtaaaatcaaatcgcggtattcagtttagaatttgggctaaccatgtcttgaaaaattatataatgaagggttatgcggttaataaaaggtttgaacgcctggaaaatcgtgtaactaaaaccgagaaaaaaattgatttttttgtgaaaaatgccctgcccccggtacaaggtattttttatgaaggacaaatttttgacgcttatgtattcgtttctaatttgataaaaacagcgaagaagtcaataattttaattgataacttcatagatgagagcgttttacttttgttgtcaaacggcaaacaaaagtcagcgcacaaatttatacgaaacgcatatccgagcaattacagttag

SEQ ID NO: 68094 - protein, 242 aa, Unknown
  Obtained from environmental sample
  misc_feature (1)..(242): Xaa is any amino acid
MGKSELVMYQPDRTVTVEVRLENENVWLNRQQIAVLFDRDIKTIGKHINNALDEELAAFSTVAKFATVGKKKGKNSVVANFATTGKKRGENPVVANFATTAADGKAYQVEYYNLDVILSVGYRVKSNRGIQFRIWANHVLKNYIMKGYAVNKRFERLENRVTKTEKKIDFFVKNALPPVQGIFYEGQIFDAYVFVSNLIKTAKKSIILIDNFIDESVLLLLSNGKQKSAHKFIRNAYPSNYS

SEQ ID NO: 68095 - DNA, 1803 bp, Unknown
  Obtained from environmental sample
  misc_feature (1)..(1803): n is a, c, g, or t
atggactacgatacaattgttatcggcggcggtcatgccggaatagaagcgtccctcgcgacaagccgccttggattttccactctcctcgttacacagaacccagacagaatcggggctctttcctgcaaccccgcgatcggcggtctttccaagggcaaccttgtgcgcgaagtagacgccctggggggcgaaatgggaaaattaacggacgcgacaatgattcaataccgggtactcaaccgctccaggggccctgcggtacaggctccgcgcgcgcaagccgacaaacaaatgtaccaaatggcggcgcgttccgttttggaaaagcaaaaaaacctaacaatttttatggataccgttacggatttattaacagagaatgtcgccgataaaaataccgacgcgcagggagattccgctaaagtttacggtatcgttacggcgcggggacatcgtataacggcgcgtactgtgatactctccgccgggactttcatggaaggaaaaatatttatcggcgaatatgacgctccttgtggacggcttggggaagaagcggcggcaggactgggcaaatccttgcgccgtctgggctttcctgtaggacggttaaagacggggacaccggcgaggattgcggaaccttctatcgacttttcaaaaatggaaaaacaggacggcgatgaaatgcggccgttttctttttgcgctcagatgggagcgcaagacatcgttaaaaacagaccatctttaccgtgctggattacttatactaactcaagaacacacgagattataaaagcaaatattcaccgttcccctttatttggcggtaagataatcggcgtaggggcgcgttactgtccgtctattgaggataaggttgtgcggtttccccagagggaaaggcatcatatttttattgagcctgaaggactttcaactaatgagatgtacatgaatggagcgtccagttctctgccggaagacgttcaacgcgattttattcacagtattgcgggacttgaagatgcgaaaattgtccgccccgcttatgctgttgagtatgattacatcgatccgctcgatctttatccgtcccttgagtcaaagcgcctgtcaggtttttttacggcggggcagactaacggctcgtcaggttacgaagaagccgcagcccagggaataatcgccggcatcaacgccgcgatgaaaatgcagggaaagccgccctttatcctcggccgcgccgaagcctacataggcgtactagttgacgatcttaccactctcggaacaaaggaaccgtaccgaatgttcacaagccgagccgaacaccgtttaatgctccgccacgacacagccgacacaaggcttactcccaaagggcgcgaagccggccttgtagacgacgcccgctgggagcattttttggaaaagacaagaaagctggacgaaattaaggaactgctcgcccggcgaaaatctgatgaagtttcagctaacgcgcttacgggcaagtcccttgccaactatcctgcggaactggtggaaagagcgcttttggacaaaaagtacgccggctacatcgaaaaggaaatccgttttgccgcgaaagccgccaaaatggacgccatcaaacttaatcccaacacagactattcggctatcagcggactctcgtccgaagcaaaagagaaactccaatccgtgaaacccctcaacgtgggacaagccgcccgaatcccgggcgtaaggcaaggggatatagctatgttaattattctcgcaaggaaatga

SEQ ID NO: 68096 - protein, 600 aa, Unknown
  Obtained from environmental sample
  DOMAIN (4)...(411): Glucose inhibited division protein A
  misc_feature (1)..(600): Xaa is any amino acid
MDYDTIVIGGGHAGIEASLATSRLGFSTLLVTQNPDRIGALSCNPAIGGLSKGNLVREVDALGGEMGKLTDATMIQYRVLNRSRGPAVQAPRAQADKQMYQMAARSVLEKQKNLTIFMDTVTDLLTENVADKNTDAQGDSAKVYGIVTARGHRITARTVILSAGTFMEGKIFIGEYDAPCGRLGEEAAAGLGKSLRRLGFPVGRLKTGTPARIAEPSIDFSKMEKQDGDEMRPFSFCAQMGAQDIVKNRPSLPCWITYTNSRTHEIIKANIHRSPLFGGKIIGVGARYCPSIEDKVVRFPQRERHHIFIEPEGLSTNEMYMNGASSSLPEDVQRDFIHSIAGLEDAKIVRPAYAVEYDYIDPLDLYPSLESKRLSGFFTAGQTNGSSGYEEAAAQGIIAGINAAMKMQGKPPFILGRAEAYIGVLVDDLTTLGTKEPYRMFTSRAEHRLMLRHDTADTRLTPKGREAGLVDDARWEHFLEKTRKLDEIKELLARRKSDEVSANALTGKSLANYPAELVERALLDKKYAGYIEKEIRFAAKAAKMDAIKLNPNTDYSAISGLSSEAKEKLQSVKPLNVGQAARIPGVRQGDIAMLIILARK

SEQ ID NO: 68097 - DNA, 450 bp, Unknown
  Obtained from environmental sample
  misc_feature (1)..(450): n is a, c, g, or t
ttgggaataggttcttttgtaataaatagcgctatacaaacaataaacaaatctaaatatagacactatgatgagtatttagaaataaatccatttccattccaattacctgacgatgataaattagaattcaataaaaattatcgaaatcgaatattaagtcattgtggtatagctatatttatatttggaaataaaaaaaaggataatgacatcattattgcggatggtgttttagaagaatttaaaatttcaaaagaaaataaattatttgtaataccaattggttcgactggatttgcatcttctcaattattaattgaaataaaaaacaaccttaatgattataagtatttacaaacagaaattaatacgcttgattcatctaaaaatattgatgatataataaattcagtaatatcaataatcaaaggaataataggaagataa

SEQ ID NO: 68098 - protein, 149 aa, Unknown
  Obtained from environmental sample
  misc_feature (1)..(149): Xaa is any amino acid
MGIGSFVINSAIQTINKSKYRHYDEYLEINPFPFQLPDDDKLEFNKNYRNRILSHCGIAIFIFGNKKKDNDIIIADGVLEEFKISKENKLFVIPIGSTGFASSQLLIEIKNNLNDYKYLQTEINTLDSSKNIDDIINSVISIIKGIIGR

SEQ ID NO: 68099 - DNA, 723 bp, Unknown
  Obtained from environmental sample
  misc_feature (1)..(723): n is a, c, g, or t
atgggcggggtgttgatgctgtccagggcagcggaactgcaaactgagataaaagggtggcttgaagcgtcgggctttgaagacgtaatggttacgggcaaggaaaatgaggagcttaatatggctatctgcaacaagaagccccgtctggtcattgttgacagcttgttttttcaggacggtacggcttgcagggtcggcgatctggtgaagctgtttccaaaactgaatgtcgccgttgtttctttccatgacttcgacgcgagccgcgccccatggttcatctgggagggggcgaagtcataccttagcttgtgggaagggtatggggaattccagcgtggcttgcggattgtgcgggagggcggccagtatatttcgccgaaggttcagcgcctgattgaccattgcgatgtatggccggataccaaaagcaggatgaccaaacggcgtagggaatgccttgttatgctatgctgcgggcttatccctgagcaaattggggaaatactgcatatatccagaaaaacggttgacagacatcttgacggtttatacagagcctttcatgccggcagccgtgaagagatggttgcgcttgcttgggagatggagcttgttacccccaaagatattcggctttataacaagaagaaagagcgcttgacgcttcctgaatgggcggcggtgaaacagaaatgcgacaggttctattttgattga

SEQ ID NO: 68100 - protein, 240 aa, Unknown
  Obtained from environmental sample
  DOMAIN (144)...(201): Bacterial regulatory proteins, luxR family
  misc_feature (1)..(240): Xaa is any amino acid
MGGVLMLSRAAELQTEIKGWLEASGFEDVMVTGKENEELNMAICNKKPRLVIVDSLFFQDGTACRVGDLVKLFPKLNVAVVSFHDFDASRAPWFIWEGAKSYLSLWEGYGEFQRGLRIVREGGQYISPKVQRLIDHCDVWPDTKSRMTKRRRECLVMLCCGLIPEQIGEILHISRKTVDRHLDGLYRAFHAGSREEMVALAWEMELVTPKDIRLYNKKKERLTLPEWAAVKQKCDRFYFD

SEQ ID NO: 68101 - DNA, 1245 bp, Unknown
  Obtained from environmental sample
  misc_feature (1)..(1245): n is a, c, g, or t
atgaaaattcataatgattttaccctttattttagggtaattccttcggggaaacgggtcgtgtatttctacgcttacgacgaaaaaggcaataggacaaagggcaggtctacagggcaactgaccaaaacggcggcaagggtgcttgtaaacaggctcatgaaagaaggggcattgttgccgaaacaagacaatgtgcctaccttcggggaatatgccgtgttctggtgggattgggaaaaatgcgattatttaaaaaaaagacggaaacgtgccaatataacccaaagttattctgaccacatgatgaggaatttaaataaagttatattgccgtattttaagaatatgaaaatggacgccattacaccttccgttatcgaggcgtttcttgacagccttataaaacagggttataaacattccacgattaacgactattacggaactttcaaaaccatgatgatcgaagccgttgaccgtgaaattatcgctaaagaccctacagccaaagttgaacggctgataaataactgtaaaacaataaaaattattactccgcttgaattcaaaaagctatttgtcggggattggcgcaaggtttgggaagataaccgcattgtctataccgttaataaactggcggctttgtcgggtatgagggtgtcggagattttagggcttaaaggggattgcctgttcgatgaccatatttacgtacatatgcaatatgacgtatacggctacaggcttactaaaacgaaggataaacataatataccccttccggcttccctgattgacgatttgaaaatactgaaagaaaaaaatggggacggttttttgttttccactgacggcggctgcgtacctatttgcagaaagacggttttaatgtatttgcgaaaggcgttaataaatatcggcattaccagcgcggaaattaaagagcgtaatttgcatatccacgcttggcggcatttctttaatacggaaatgttaaaaggcggaatgaccaaagaacaggcgcaggcgataaccacgcataagagtgaaaggatgacggaacggtacacgcattttgacccgcttgaatttgtaaaggcgaaggaaatacaggaagccttgttacagcctgttgacgaaaaaccgcaagcgcgggaagcggaaaaaaaggaactgccgccgaacgtgttttctttccctgtgtccggcataccgcaagaggaactgaaacaggcataa

SEQ ID NO: 68102 - protein, 414 aa, Unknown
  Obtained from environmental sample
  DOMAIN (195)...(368): Phage integrase family
  misc_feature (1)..(414): Xaa is any amino acid
MKIHNDFTLYFRVIPSGKRVVYFYAYDEKGNRTKGRSTGQLTKTAARVLVNRLMKEGALLPKQDNVPTFGEYAVFWWDWEKCDYLKKRRKRANITQSYSDHMMRNLNKVILPYFKNMKMDAITPSVIEAFLDSLIKQGYKHSTINDYYGTFKTMMIEAVDREIIAKDPTAKVERLINNCKTIKIITPLEFKKLFVGDWRKVWEDNRIVYTVNKLAALSGMRVSEILGLKGDCLFDDHIYVHMQYDVYGYRLTKTKDKHNIPLPASLIDDLKILKEKNGDGFLFSTDGGCVPICRKTVLMYLRKALINIGITSAEIKERNLHIHAWRHFFNTEMLKGGMTKEQAQAITTHKSERMTERYTHFDPLEFVKAKEIQEALLQPVDEKPQAREAEKKELPPNVFSFPVSGIPQEELKQA

SEQ ID NO: 68103 - DNA, 1326 bp, Unknown
  Obtained from environmental sample
  misc_feature (1)..(1326): n is a, c, g, or t
atgaatacaaaagcgtttcagaagatttacactcacatcgaaaacgtgactaaggccacgtgtactgtgcacgccgacggtgtgaccaacgatgaaatggcgatggtggccgggcgtccggcgcaggtcgtgaagattgtaggcgaccgcgtgacgctccagatattccccggcacgcagggcatagccacgaacgccgaggtggtgttcctcggcaggccgcccgtcatcaaggtgtcggacgagctcaaggggcgcttcttcaacccctacggccagcctatcgacggcggcccggaggtcgaaggcaaggagatagagatcggcggcccgtcggttaaccccgtgcggcgcaaacagccctccgagcttatcgccaccggtatcgccggcatcgacctgaacaatacgctcgttactggccagaagatcccgttcttcgccgactccgaccagccgtacaacgcggtcatggccgacgtggcgctcagagcgaaagccgacctcatcattctgggcggcatgggcatgtccaacgacgactacctgtactataggaagctgttcgaaaacgccggcgcgctcgaccgcatcaccgcgttcgtcaacacgaccgacaacccgccggtggagcgtctgctcgttcccgacatgtgcctgaccacggcggagcacttcgccgtagagcagaagatgaaggtgctggtgctgctcaccgacatgacgctgtacgccgacgcgctctccatcgtgtctaaccgtatggaccagattccctctaaagacagtatgcccggttcgctgtacagcgacttggcgaagatatacgaaaaggccgcccagttccctgacggcggctctatcacgatcatcgcggtcacgaccctctccggcggcgacatcacgcacgccatccctgacaatacggggtacatcaccgaggggcagttgtatttgcgccgcgataccgacgtgtcgaaggtcattatcgacccgttccgcagcttgtcgcgtctgaaacagctcgttatcggcaagaagacgagaaaggatcacccgcaggttatgaactgcgccatccgactgttcgccgacgccgcgagcgctaagacgaagttggaaaacgggttcgatttgacggattacgacacgcggtcgttgcaattcgcgaaagagtattcgcgtgaactgttggcgattgacatcaacattgaaatcgagcacatgcttgatacggcttggaagctgttcggcaagtactttacgcaggacgaggtgggtatcaagaaggagttgatggatcagttctggaaggcttcggcgtaa

SEQ ID NO: 68104 - protein, 441 aa, Unknown; identical to SEQ ID NO: 53770
  Obtained from environmental sample
  DOMAIN (127)...(337): ATP synthase alpha/beta family, nucleotide-binding domain
  misc_feature (1)..(441): Xaa is any amino acid

SEQ ID NO: 68105 - DNA, 2130 bp, Unknown
  Obtained from environmental sample
  misc_feature (1)..(2130): n is a, c, g, or t
gtgctcgatttcaatgttgatgtcaatcgccaacagttcacgcgaatactctttcgcgaattgcaacgaccgcgtgtcgtaatccgtcaaatcgaacccgttttccaacttcgtcttagcgctcgcggcgtcggcgaacagtcggatggcgcagttcataacctgcgggtgatcctttctcgtcttcttgccgataacgagctgtttcagacgcgacaagctgcggaacgggtcgataatgaccttcgacacgtcggtatcgcggcgcaaatacaactgcccctcggtgatgtaccccgtattgtcagggatggcgtgcgtgatgtcgccgccggagagggtcgtgaccgcgatgatcgtgatagagccgccgtcagggaactgggcggccttttcgtatatcttcgccaagtcgctgtacagcgaaccgggcatactgtctttagagggaatctggtccatacggttagacacgatggagagcgcgtcggcgtacagcgtcatgtcggtgagcagcaccagcaccttcatcttctgctctacggcgaagtgctccgccgtggtcaggcacatgtcgggaacgagcagacgctccaccggcgggttgtcggtcgtgttgacgaacgcggtgatgcggtcgagcgcgccggcgttttcgaacagcttcctatagtacaggtagtcgtcgttggacatgcccatgccgcccagaatgatgaggtcggctttcgctctgagcgccacgtcggccatgaccgcgttgtacggctggtcggagtcggcgaagaacgggatcttctggccagtaacgagcgtattgttcaggtcgatgccggcgataccggtggcgataagctcggagggctgtttgcgccgcacggggttaaccgacgggccgccgatctctatctccttgccttcgacctccgggccgccgtcgataggctggccgtaggggttgaagaagcgccccttgagctcgtccgacaccttgatgacgggcggcctgccgaggaacaccacctcggcgttcgtggctatgccctgcgtgccggggaatatctggagcgtcacgcggtcgcctacaatcttcacgacctgcgccggacgcccggccaccatcgccatttcatcgttggtcacaccgtcggcgtgcacagtacacgtggccttagtcacgttttcgatgtgagtgtaaatcttctgaaacgcttttgtattcatccgtccctctcctccgtgctacgcgtgcgccgcgccggccttgggttccgatacccgctcagccaacaggctgtcgagctctttttcgagtccgttaaatttatcgctctgaaactccagatagttcatctggcgcatcaagttaatcgccttcttaaagtaattgcctatctcctcaaaaccctcgaagttaaacttcgcgtcaacgatgcccagcaccttgttgaccatatactgctggcggttgagcggcgaacacgagtcgattttgtcgaaagcgtcctgctgcaaaatcacgaagtcgatgacctcagacttgttgaagatgatatggtagtcaagcggcacgccgtcgtcgcccaagatgttgatttggtcgcgggcctccttgccgcgcaacagcgtattcttgagaacttcgacctttttcacccaacccggctctatctccttgtcgaggtactcgatcacctcgtcgtactcaaggtacttcgaatagctgtcaataggatcgacagccggatagcgcttagagtcggcgcgtccctggccgagcgcgtagaagcaacgcgccgccttcttcgtggactcggtgaccggctccttcaagttaccgccggcggggctgaccgtccctatgaaggtgatggaacccgtattgccgttgttcaggtagacgaatccggcgcgggagtagaactgcgagataaccgccggcaagtccatagggaacgcgtcggggccgggcagctcctccatacggttggacatctcgcgaagcgcctgcgcccagcgggaggtcgagtcggccaaaagcagaaccttgaggcccatcatacggtagtattcggcgatggtcatacccgtgtaaacgctggcctcgcgggccgcgacgggcatatttga

SEQ ID NO: 68106 - protein, 709 aa, Unknown
  Obtained from environmental sample
  misc_feature (1)..(709): Xaa is any amino acid
MLDFNVDVNRQQFTRILFRELQRPRVVIRQIEPVFQLRLSARGVGEQSDGAVHNLRVILSRLLADNELFQTRQAAERVDNDLRHVGIAAQIQLPLGDVPRIVRDGVRDVAAGEGRDRDDRDRAAVRELGGLFVYLRQVAVQRTGHTVFRGNLVHTVRHDGERVGVQRHVGEQHQHLHLLLYGEVLRRGQAHVGNEQTLHRRVVGRVDERGDAVERAGVFEQLPIVQVVVVGHAHAAQNDEVGFRSERHVGHDRVVRLVGVGEERDLLASNERIVQVDAGDTGGDKLGGLFAPHGVNRRAADLYLLAFDLRAAVDRLAVGVEEAPLELVRHLDDGRPAEEHHLGVRGYALRAGEYLERHAVAYNLHDLRRTPGHHRHFIVGHTVGVHSTRGLSHVFDVSVNLLKRFCIHPSLSSVLRVRRAGLGFRYPLSQQAVELFFESVKFIALKLQIVHLAHQVNRLLKVIAYLLKTLEVKLRVNDAQHLVDHILLAVERRTRVDFVESVLLQNHEVDDLRLVEDDMVVKRHAVVAQDVDLVAGLLAAQQRILENFDLFHPTRLYLLVEVLDHLVVLKVLRIAVNRIDSRIALRVGASLAERVEATRRLLRGLGDRLLQVTAGGADRPYEGDGTRIAVVQVDESGAGVELRDNRRQVHRERVGAGQLLHTVGHLAKRLRPAGGRVGQKQNLEAHHTVVFGDGHTRVNAGLAGRDGHI

SEQ ID NO: 68107 - DNA, 1686 bp, Unknown
  Obtained from environmental sample
  misc_feature (1)..(1686): n is a, c, g, or t
ttgatggccgaggcaccagctgatggccgaggtgataagatcggcggcaagaacgcatacgtgcaggtgttcgaaagtacgcgcgggctctacgtcgggtgtacggcggagtttgccgggcacatgcttgaggtgacgctcggccccggtatgcttaaaaggaactacgacggtctgcaaaacgacctcgacgccatggagggggtcttcctcaaacgcggcgactataccaagccgctcgacgaggccaagaagtggcgattcacgcccctcgccaaagccggcgacaccgtccgcgcatccgattggctcggcaatgtgaaggaggggtggatagaccacaagatcatggtgccgttcaacatgagcggtacgtacacggtcaagagcgtcgtctccgagggcgattacaatattaaggagaccatagcggttctctccgacggctctaaagattataacgtgaccatggctatgaagtggccggtgaaggtggaggtgggcggttacaagaacaagccgcgcccgttcaaggtcatggcgacgggcgtccgtacgatagacacgctcaacccgatcaccgaaggcgggacggggttcatcccggggcctttcggttgcggcaagacggttatgcagcacgccctttccaaatacgccgaagccgacctgattatagtcgtggcctgcggcgagcgcgccaacgaggttgtggaaatcttcaccgagttcccggaactcgacgacccgcgcacaggccgcaaactcatcgagcgtatgattattatatgtaatacgtcaaatatgcccgtcgcggcccgcgaggccagcgtttacacgggtatgaccatcgccgaatactaccgtatgatgggcctcaaggttctgcttttggccgactcgacctcccgctgggcgcaggcgcttcgcgagatgtccaaccgtatggaggagctgcccggccccgacgcgttccctatggacttgccggcggttatctcgcagttctactcccgcgccggattcgtctacctgaacaacggcaatacgggttccatcaccttcatagggacggtcagccccgccggcggtaacttgaaggagccggtcaccgagtccacgaagaaggcggcgcgttgcttctacgcgctcggccagggacgcgccgactctaagcgctatccggctgtcgatcctattgacagctattcgaagtaccttgagtacgacgaggtgatcgagtacctcgacaaggagatagagccgggttgggtgaaaaaggtcgaagttctcaagaatacgctgttgcgcggcaaggaggcccgcgaccaaatcaacatcttgggcgacgacggcgtgccgcttgactaccatatcatcttcaacaagtctgaggtcatcgacttcgtgattttgcagcaggacgctttcgacaaaatcgactcgtgttcgccgctcaaccgccagcagtatatggtcaacaaggtgctgggcatcgttgacgcgaagtttaacttcgagggttttgaggagataggcaattactttaagaaggcgattaacttgatgcgccagatgaactatctggagtttcagagcgataaatttaacggactcgaaaaagagctcgacagcctgttggctgagcgggtatcggaacccaaggccggcgcggcgcacgcgtag

SEQ ID NO: 68108 - protein, 561 aa, Unknown
  Obtained from environmental sample
  DOMAIN (182)...(404): ATP synthase alpha/beta family, nucleotide-binding domain
  misc_feature (1)..(561): Xaa is any amino acid
MMAEAPADGRGDKIGGKNAYVQVFESTRGLYVGCTAEFAGHMLEVTLGPGMLKRNYDGLQNDLDAMEGVFLKRGDYTKPLDEAKKWRFTPLAKAGDTVRASDWLGNVKEGWIDHKIMVPFNMSGTYTVKSVVSEGDYNIKETIAVLSDGSKDYNVTMAMKWPVKVEVGGYKNKPRPFKVMATGVRTIDTLNPITEGGTGFIPGPFGCGKTVMQHALSKYAEADLIIVVACGERANEVVEIFTEFPELDDPRTGRKLIERMIIICNTSNMPVAAREASVYTGMTIAEYYRMMGLKVLLLADSTSRWAQALREMSNRMEELPGPDAFPMDLPAVISQFYSRAGFVYLNNGNTGSITFIGTVSPAGGNLKEPVTESTKKAARCFYALGQGRADSKRYPAVDPIDSYSKYLEYDEVIEYLDKEIEPGWVKKVEVLKNTLLRGKEARDQINILGDDGVPLDYHIIFNKSEVIDFVILQQDAFDKIDSCSPLNRQQYMVNKVLGIVDAKFNFEGFEEIGNYFKKAINLMRQMNYLEFQSDKFNGLEKELDSLLAERVSEPKAGAAHA

SEQ ID NO: 68109 - DNA, 918 bp, Unknown
  Obtained from environmental sample
  misc_feature (1)..(918): n is a, c, g, or t
atgttaatgaataaatatctgatttatagttttttaattattgccacagttatttttgccatcacagcctgtaatgccaacaagggcaaagaaataaccgaccgttccggacgacaggttgtattaaacggaacggttaaccgcgttgtttccaccgcgccttccaatacggaaataattaccgatcttggcatggctcataaacttgtcgccatagacgtccattcggcgaatgtcgcggggattcccggggggcttccgcaactggattttttctaccccgacgccgaggtgataataaatctggaacctgatataatcatcgcaaacgggcataatcccacaggctcaggcgaagaccctttccggatcctgcgggaaattggaatccccgtggcgtatattcccatgagcaagagcattgatgatatttataaggatattgcctttatcgccgatcttttacaggctcaaacaaagggagaggaagtgatcaattccatgaaagcgcagattgccgaattacgccaaaggggggcgcgggcggatacaaaaaaaaccgtgtattttgaaatatcggcggcgccggatatgctaacttttggaaaggacagttatttgaatgatatgatcgccgttatcggggcgcgtaacatttttgaaaatgacaactggattgtcagccccggcgcggagtcaatcattgggcgtaatcccgatgtaatcctgaccaatgtgaattacatcccggacccaatcgccgaaataaagagcaggcccggttttgaacatattaacgccgttatcaataatcacgtctatcagatagacaacgattcctcggtgcgtccctcaacccgcgttattttggctttaaggcaaatgtcccgcgcagtgtacccggagttgtatgagtaa

SEQ ID NO: 68110 - protein, 305 aa, Unknown
  Obtained from environmental sample
  SIGNAL (1)...(26)
  DOMAIN (46)...(280): Periplasmic binding protein
  misc_feature (1)..(305): Xaa is any amino acid
MLMNKYLIYSFLIIATVIFAITACNANKGKEITDRSGRQVVLNGTVNRVVSTAPSNTEIITDLGMAHKLVAIDVHSANVAGIPGGLPQLDFFYPDAEVIINLEPDIIIANGHNPTGSGEDPFRILREIGIPVAYIPMSKSIDDIYKDIAFIADLLQAQTKGEEVINSMKAQIAELRQRGARADTKKTVYFEISAAPDMLTFGKDSYLNDMIAVIGARNIFENDNWIVSPGAESIIGRNPDVILTNVNYIPDPIAEIKSRPGFEHINAVINNHVYQIDNDSSVRPSTRVILALRQMSRAVYPELYE

SEQ ID NO: 68111 - DNA, 1020 bp, Unknown
  Obtained from environmental sample
  misc_feature (1)..(1020): n is a, c, g, or t
atgagtaacaggaagcgcgtcctcgcaggattatttatctcaattttaatcatcattgttggcgcctctttgggcagctccgtcatcagttttggcgacactgttttgatcattctgcataaaattttcaggcttccccttaacgcggaaattgacccgaaaaatgtttcgattgtctggctgctgcgcctgcctcgtgtattactcgcttttcttgtgggcggctgccttgcgatgagcggcgcggtctgccagtcaattttgcgcaatccccttgcctcgccctacattttgggcgtctcgtccggcgcgtccctgggcgcgggaatagtcatcatcagcggaatcgcaattcccttgctgggatcttttaccctgccgctgacaggttttgtcttcggccttctgaccgtcttttttgtagccgcattttcctcccgcgttgacaagtcaatgtcgaataacacaatcgtcctcttcggcatggtgttttcgctttttttaaacgccctgcttaccctgttaagcgcggttttctccgatgacctgcggcgcatcgccctttggcagatgggcagttttgccatgcggggctggacgtatattcaactgctgctgccgtttttggtaattgggacggtcggcataatcctttataccaaagaaatggacattatgacctttgacgatgatcaggcgaaatcggcgggagtggaaacaacagggctgagaaaaaaactactggttctctgctcagtattgacaggcgcggcggtggcgttaagcggcgttatcggctttgttgaccttatcgccccgcacgcggcgcggaaaatcaccggttcaaaacacaggtatttaatccccatgtcgtttatcctcggcggctcattggtggtaataaccgatttaatcgccagaacagtcatttcgccctcggaactgccggtaggggcgatcaccgctcttatcggggcgccgtttttcgcctgggtgtatttcagggggcgcggacgatga

SEQ ID NO: 68112 - protein, 339 aa, Unknown
  Obtained from environmental sample
  SIGNAL (1)...(25)
  DOMAIN (87)...(336): ABC 3 transport family
  misc_feature (1)..(339): Xaa is any amino acid
MSNRKRVLAGLFISILIIIVGASLGSSVISFGDTVLIILHKIFRLPLNAEIDPKNVSIVWLLRLPRVLLAFLVGGCLAMSGAVCQSILRNPLASPYILGVSSGASLGAGIVIISGIAIPLLGSFTLPLTGFVFGLLTVFFVAAFSSRVDKSMSNNTIVLFGMVFSLFLNALLTLLSAVFSDDLRRIALWQMGSFAMRGWTYIQLLLPFLVIGTVGIILYTKEMDIMTFDDDQAKSAGVETTGLRKKLLVLCSVLTGAAVALSGVIGFVDLIAPHAARKITGSKHRYLIPMSFILGGSLVVITDLIARTVISPSELPVGAITALIGAPFFAWVYFRGRGR

SEQ ID NO: 68113 - DNA, 768 bp, Unknown
  Obtained from environmental sample
  misc_feature (1)..(768): n is a, c, g, or t
atgagcgcggcaatgcttgaagtcaacgggctctgcgccggatacggcactggtgatgttatacgcaatataaattctaaggccagcaggagggaatgtctctgtgtactggggccgaacggctgcggtaaaagtaccatgcttaaatcaatagcgggaattcttaattaccgcggctctgtcttggttgacggcggcgatatttccgccgttccacgcaaagagcttgcgcgaaaaatcgccctgcttggtcagaatatgcaggtcttttttccctacacggtatatgaaacggtttcaatgggccgctacgcctattcgcaggggattttgaaaaatctttccacgcaagacaaaacaattattaatgatactctcagaaaacttgacgtatgggacataaaggagcgcatgattaatgaactgagcggcggaactttgcagcgtgtttttctggcaaaaacgatggctcaaactccccgccttattctgctggacgagccggtgaatcatcttgatctgaaacaccagatcgcgctgctggattatttgaaatcatggattaaggaaaacaacacaagtttaataggcgtgtttcatgatgtaaatttagcgcggtattttggtgatacagcgattctgatgaatgaagggaacctggccgcctgcggatcaatagaagaaatgttaaacagcgaaattttgaatacaatctacggaattgacatccgcgcatttatgcgaaattcgctggaaaagtggaaatag

SEQ ID NO: 68114 - protein, 255 aa, Unknown
  Obtained from environmental sample
  DOMAIN (31)...(218): ABC transporter
  misc_feature (1)..(255): Xaa is any amino acid
MSAAMLEVNGLCAGYGTGDVIRNINSKASRRECLCVLGPNGCGKSTMLKSIAGILNYRGSVLVDGGDISAVPRKELARKIALLGQNMQVFFPYTVYETVSMGRYAYSQGILKNLSTQDKTIINDTLRKLDVWDIKERMINELSGGTLQRVFLAKTMAQTPRLILLDEPVNHLDLKHQIALLDYLKSWIKENNTSLIGVFHDVNLARYFGDTAILMNEGNLAACGSIEEMLNSEILNTIYGIDIRAFMRNSLEKWK

SEQ ID NO: 68115 - DNA, 813 bp, Unknown
  Obtained from environmental sample
  misc_feature (1)..(813): n is a, c, g, or t
atggctaagctgccctttaagctgccggccttctccttcttgactgaaggcaaaaaagcccagcagcaaaaaaccataccgcagaaaacgataccgcggttgaaaatgtttttctttattgttgactgggacaaggccgcgatgatttccaaagtttttgaggaagaacacgtccgtttccacttcataagcaaaggaagggggaccgccagttccgagatacacgatctattgggaataggcgccaccgacaaggctgtgatcatctgcgttgagcaggatgttcttgttcaggtgctgttaaaggaagtgaggaaaaaactcgggttccatacccccggcgccggcattgcctttatcattcccttatcggggatcaacacgcccctgctgcgggttttcaaggaaagcatacacaagaatgaaaaaataacccaggatgaatattcagccggcaaaaacgaaggaggaactatggcatcggggaaaaaaccggccgctgttataaataatgatcttattattgcggtaattaatcacggattcagcgacgaatttatgaatgtcgccagagaggccggggctacgggcggcactgtagtccatgccagggggcttgcccacgcgggcccggtgaaattcttcggcatctcggttcaggaagagagggaaattgtgcttgtgcttaccagccgcgaaaagaaactgcccatcatggaagcggtcagccgttcctgcggaattaccacaaaagcggaaggattgatcttctccctccccgtggaaaatgtcatgggtttgaatcttgagtaa

SEQ ID NO: 68116 - protein, 270 aa, Unknown
  Obtained from environmental sample
  misc_feature (1)..(270): Xaa is any amino acid
MAKLPFKLPAFSFLTEGKKAQQQKTIPQKTIPRLKMFFFIVDWDKAAMISKVFEEEHVRFHFISKGRGTASSEIHDLLGIGATDKAVIICVEQDVLVQVLLKEVRKKLGFHTPGAGIAFIIPLSGINTPLLRVFKESIHKNEKITQDEYSAGKNEGGTMASGKKPAAVINNDLIIAVINHGFSDEFMNVAREAGATGGTVVHARGLAHAGPVKFFGISVQEEREIVLVLTSREKKLPIMEAVSRSCGITTKAEGLIFSLPVENVMGLNLE

SEQ ID NO: 68117 - DNA, 876 bp, Unknown
  Obtained from environmental sample
  misc_feature (1)..(876): n is a, c, g, or t
atgccgagcgcgcgaaatcaaccctttattgttccggcggccgatacatcacgtgatgtagccaggcacttcttctaccaatttccgatttattttaaggaagtttccctggccctgggcgccgtaatcatttgctttgttattttccagttgattacccggcgataccaccgccaccacctgggccgcatcgccgtggggttcgtctataccctgatcggccttgtattgtttttgacaggcgtaaacgcgggctttttctccgaaggcaggctcctcggccgcttgcttgcctcatcgcaatacaaatgggtattggtgccgcttgggactctggtgggatattttatcgtagccgcggaaccggcggttcacgtactcaacaagcaggttgaggaaatctctgaaggagccataactcaaaagatgatgatgcgggggcttgcaatcggcatgtccattgctttgacaattaccatgattagaatactgctccgcatacccatcatgtacattctgattcccggctatgtcttatcgctgagccttactttttttgtaccaaaaatttttaccggcatagcgtttgattccggaggtgtttgcagcggtcccatgacatcaacatttctcctgccgctggcaatgggaacctgcgaaggatccggcggggatatgatgatggacgcgttcggcatcgtggcaatggtcgccatgacgccgctcgtcatcatacagataatgggcctgatctacagcctgaaacagaaagaggcgaccgccgttgaaattgaacaaatgaccaggtatatgggttcaattacgcctgaggaaacgggaagtatcacggtgttcgaggagaccataaatggctaa

SEQ ID NO: 68118 - protein, 291 aa, Unknown
  Obtained from environmental sample
  DOMAIN (38)...(253): Protein of unknown function (DUF1538)
  misc_feature (1)..(291): Xaa is any amino acid
MPSARNQPFIVPAADTSRDVARHFFYQFPIYFKEVSLALGAVIICFVIFQLITRRYHRHHLGRIAVGFVYTLIGLVLFLTGVNAGFFSEGRLLGRLLASSQYKWVLVPLGTLVGYFIVAAEPAVHVLNKQVEEISEGAITQKMMMRGLAIGMSIALTITMIRILLRIPIMYILIPGYVLSLSLTFFVPKIFTGIAFDSGGVCSGPMTSTFLLPLAMGTCEGSGGDMMMDAFGIVAMVAMTPLVIIQIMGLIYSLKQKEATAVEIEQMTRYMGSITPEETGSITVFEETING

SEQ ID NO: 68119 - DNA, 531 bp, Unknown
  Obtained from environmental sample
  misc_feature (1)..(531): n is a, c, g, or t
ttggtttgctatctttcagacaaagaagaaatcggctccgtcggaaacacgggcgcgcgttccgtcaattttgaaaacttcatcgctctcctttgcggcggctctcaagcggacttacggctgtgcttctcgcgctccgccatgctgtccgccgatgtcaacgctgcgtttgatccaacctacgcaagcgtattcgacaaaaacaacggatcgtttatcgggaagggaattgtgctttcaaagtacacagggtcaggcggcaagagcggagcgagcgacgccaacgctgaattctgcgcaaaggtgcaggcaatcatgagcaggaacaaagttcagtggcaattcggggaattgggaaaagtagacaagggcggcggcggaacaatcgccttgtatgccgccaacttggggatagaagttatcgactgcggcgttcccgtcctgtcaatgcactcgccgtttgaggtaatcagtaagattgacctttatacaacgtacaggggatatatcgctttctatagggaagcttaa

SEQ ID NO: 68120 - protein, 176 aa, Unknown
  Obtained from environmental sample
  DOMAIN (1)...(173): Aminopeptidase I zinc metalloprotease (M18)
  misc_feature (1)..(176): Xaa is any amino acid
MVCYLSDKEEIGSVGNTGARSVNFENFIALLCGGSQADLRLCFSRSAMLSADVNAAFDPTYASVFDKNNGSFIGKGIVLSKYTGSGGKSGASDANAEFCAKVQAIMSRNKVQWQFGELGKVDKGGGGTIALYAANLGIEVIDCGVPVLSMHSPFEVISKIDLYTTYRGYIAFYREA

SEQ ID NO: 68121 - DNA, 783 bp, Unknown
  Obtained from environmental sample
  misc_feature (1)..(783): n is a, c, g, or t
ttgcatggacatcgaagaaacgcaagccgtgacagcggaaaattagtgcctcgtttccgtcccggtcccgatcctgattttccccgcttggaaccgacggtatattttcaattccccgatccaaacgaatgtgaagacaacattgtcggcgtaggcggcaacctttcgcccggaatgttactctccgcctatgagcagggaatcttcccatggtacggacccgaagaccctctcatctggcaatcccccgacccccgctgtgtaatcttccccgaaaaactgcacgtttcctcatctatgcgaaaaatcttaaacgccggcacattcaaaataacttacaatgaaaattttgacggagtaatcagaggctgcgccgaaaaaatacgcccgggtcaaaacggaacatggataacaaaggacataattgaagcgtacacggagcttcatcaacttggttttgttcattccgccgaagcgtggcaggacggaacccttgtcggcggctgttacggtttactgcttggaaaagttttctgcggcgagtcaatgttcgccaacgtgcccaacgcctcaaaagccgccttcctaagctttgcggaaaaaatttttgcggaaggagccgctttcattgactgccaaataccgacgaggcatttgattagtcttggcggggaagaaatgtcacgcaaggattttcttgagttgctgaataaatatatgttaagaagagatctaccacgaaccacacgaacaaacacgaacctagagagcggagaggtttag

SEQ ID NO: 68122 - protein, 260 aa, Unknown
  Obtained from environmental sample
  DOMAIN (56)...(229): Leucyl/phenylalanyl-tRNA protein transferase
  misc_feature (1)..(260): Xaa is any amino acid
MHGHRRNASRDSGKLVPRFRPGPDPDFPRLEPTVYFQFPDPNECEDNIVGVGGNLSPGMLLSAYEQGIFPWYGPEDPLIWQSPDPRCVIFPEKLHVSSSMRKILNAGTFKITYNENFDGVIRGCAEKIRPGQNGTWITKDIIEAYTELHQLGFVHSAEAWQDGTLVGGCYGLLLGKVFCGESMFANVPNASKAAFLSFAEKIFAEGAAFIDCQIPTRHLISLGGEEMSRKDFLELLNKYMLRRDLPRTTRTNTNLESGEV

SEQ ID NO: 68123 - DNA, 2085 bp, Unknown
  Obtained from environmental sample
  misc_feature (1)..(2085): n is a, c, g, or t
ttggagcttttacatgtgctatcccacagttacggcgaggatggttttgtaaattcccaaaaaggcgagaaatacgcgggtatcgacgatgacgccgacgcccagaaaaaagcaagtaaaaaaacagcgcttgaacgatacgcaatagatttaaccgcccttgcgcgtgagcataaattggaacccgtaatcggcagggaagacgaacttgatcgcacggtacaagtgctttgccgcagattgaaaaataaccccattcatgtcggggattcaggcgtaggaaagacggcgattacggaagggcttgcccagcgaatcattgccggcaatgttccgccgcttctaaaaagcttcagcatctatgctcttgatatgggttctctcttggcaggtacaaaataccgaggcgattttgaagaaagagtaaaacgagtagttgaggaactgttaaaaaaagaaaagacaatactttttatcgacgagatacatacccttgtcggggcgggagcggtttccggcggagcgatggacgcttccaacttgttaaagcccgctcttacttcgggcaaactccgctgtatcggctctacgacacacgaggagtacaacaagttttttgaaaaagaccgagcgctttcaaggcgtttccaaaagatcgatattaacgaaccgtcggtggaaacggcgattgatatactcaagggagttaaatgccgatacgaagactaccaccatgtccactacagcgatgaagttgtggagacagcggtgcgcctttccgctcaatttatcacggagcgccgtctgcccgataaagcgatagatgtaattgacgaagccggcgcttacgctcggatagaggcgtacaagcacgcaacagaagactcgaacgccgacagcaaaacagaaaacgagtcggttgaacaaccgattgttgaagcggcaacagcggaactgtttgcggaggaaacaacagcggcggaaaaagcaacggctgaaaagacggcggctgaaaagacgattgaggagaagactcaaaagtctacaaccgtacaggacgctcaaattgaaaaaatagaaataacccttcctgttattgaatctgtagtttcaaaaatcgctcgtataccgcagaggtctgtcggcgagagcgagaaagacaaacttaaagaattggaaacaaggcttaaacaaaaagtctttggtcaggacgatgcgatagcggcggtagtaaaagccgttaaacgttcaagggcgggctttagagcggacggcaaacccgtcgctaactttttatttgtcggacccacaggcgtgggcaagacggagttggctcgtcagttggcggaaacattgggcatttccatgctccgctttgacatgagcgagtaccaagagaagtatacaatctcacgccttatcggttcttcgcccggctatgtcggctacgaagacggcggtcagcttaccgacgcagttcgcaaacagccgcacgcagtagtcttactcgacgaaattgaaaaagcccacagcgatatcttcaatatacttttgcaaattatggattacgccacccttaccgacaatcagggacgcaaggcggacttccgcaatgtaattttgataatgacaagcaacgcaggggcgagagacatcggcaaagggcttatcggttttggagatcgcattcaagatgacagcgtggttgacgacgcaatagaaaaaatctttactcccgaattccgcaacaggctggacgccgttgtccgctttggacatctttcacgcgaaattatggtttccattgtccataaagagttggacgcattcaccgcccagcttacggaaaagaacgtaacgcttaccgttacggaaacctgtgtggacaaattggcggaggaaggctacagcaaagaattcggcgcaaggaatgcgggcagactaatcgaagaaaagataaaaagcttctttgtagatgaagtcctcttcggcagtctaagcgagggcggaagcgcggtcgtagactggcgtgacggctattgcatggacatcgaagaaacgcaagccgtgacagcggaaaattag

SEQ ID NO: 68124 - protein, 694 aa, Unknown
  Obtained from environmental sample
  DOMAIN (384)...(682): Torsin
  misc_feature (1)..(694): Xaa is any amino acid
MELLHVLSHSYGEDGFVNSQKGEKYAGIDDDADAQKKASKKTALERYAIDLTALAREHKLEPVIGREDELDRTVQVLCRRLKNNPIHVGDSGVGKTAITEGLAQRIIAGNVPPLLKSFSIYALDMGSLLAGTKYRGDFEERVKRVVEELLKKEKTILFIDEIHTLVGAGAVSGGAMDASNLLKPALTSGKLRCIGSTTHEEYNKFFEKDRALSRRFQKIDINEPSVETAIDILKGVKCRYEDYHHVHYSDEVVETAVRLSAQFITERRLPDKAIDVIDEAGAYARIEAYKHATEDSNADSKTENESVEQPIVEAATAELFAEETTAAEKATAEKTAAEKTIEEKTQKSTTVQDAQIEKIEITLPVIESVVSKIARIPQRSVGESEKDKLKELETRLKQKVFGQDDAIAAVVKAVKRSRAGFRADGKPVANFLFVGPTGVGKTELARQLAETLGISMLRFDMSEYQEKYTISRLIGSSPGYVGYEDGGQLTDAVRKQPHAVVLLDEIEKAHSDIFNILLQIMDYATLTDNQGRKADFRNVILIMTSNAGARDIGKGLIGFGDRIQDDSVVDDAIEKIFTPEFRNRLDAVVRFGHLSREIMVSIVHKELDAFTAQLTEKNVTLTVTETCVDKLAEEGYSKEFGARNAGRLIEEKIKSFFVDEVLFGSLSEGGSAVVDWRDGYCMDIEETQAVTAEN

SEQ ID NO: 68125 - DNA, 342 bp, Unknown
  Obtained from environmental sample
  misc_feature (1)..(342): n is a, c, g, or t
ttgagtatatcaatcgccgtttccaccgacggttcgttaatatcgatcttttggaaacgccttgaaagcgctcggtctttttcaaaaaacttgttgtactcctcgtgtgtcgtagagccgatacagcggagtttgcccgaagtaagagcgggctttaacaagttggaagcgtccatcgctccgccggaaaccgctcccgccccgacaagggtatgtatctcgtcgataaaaagtattgtcttttctttttttaacagttcctcaactactcgttttactctttcttcaaaatcgcctcggtattttgtacctgccaagagagaacccatatcaagagcatag

SEQ ID NO: 68126 - protein, 113 aa, Unknown
  Obtained from environmental sample
  misc_feature (1)..(113): Xaa is any amino acid
MSISIAVSTDGSLISIFWKRLESARSFSKNLLYSSCVVEPIQRSLPEVRAGFNKLEASIAPPETAPAPTRVCISSIKSIVFSFFNSSSTTRFTLSSKSPRYFVPAKREPISRA

SEQ ID NO: 68127 - DNA, 1686 bp, Unknown
  Obtained from environmental sample
  misc_feature (1)..(1686): n is a, c, g, or t
gtgtacactttggatatatccgaacccgattcggcgtggtatccggcgacattaaaacaaaaggaattatacagttttaatataaattatgatatcggagtacaaaaaacaatgctgtggatcaacgccccggtctttgaaagcgaacgcgcaatcggcattgtcgggacaggcattgacctttcaggttttattgattcgctgtatgcggactttgacccttccatgcccttctatctgttcaataaattatcagaaataacaggagcgcgggatcattctctggtaatcaacaagaaaacaataaacgattactttggggaggcgggagcttctattctcaaatcagcagagcaatccggcaaagttccgcaaacattttatcttggcaacagcgaatatgtcgtgggaagtattgaaagcctggactggcatatcaccgccattcttcccattaccgctctggacaccctgaacaacggagtaaccatcttcttcatggtaatgctggcggtcatagcggtcattctcattatttcttttatatttatcagcagccttctcaaacccatgcgttacatgatacaaacgctggatcaaatagctaaaaaccgggacctcacccggcggcttgaattcaagcaccatgacgaaatcggaacagtgggtgatttttttaaccggacttttgaagaattcagaattcttgtagggacaataaaatataaaatcaacgggcttaaccataccagttttgagctttccgacaatatgagcaaaacctcgacagccgtagagaagatttcgtctaaccttgacaacatggaaaaccttgtagtcaaacaggaaaacggagcgttagtagcaggcgaggcggtaggggctattaaaacaaatattgacagccttaacaaaatgatagaacaacaggctgaaagcgtagatatgtcatcctccgccattgaggagatgacagctaacgttcattcagtaacccagactcttgcggaaaacagcaagaatgtcgatgttttagtcgaagcgtcggggaacggcaagactggactccagaccgtcgcgcaggagatacgggaaatagcccatgattccgaagggttgctggaaataaactcggtgatgaacaatatcgcaagtcagaccaatctgctttctatgaacgccgctattgaagcggctcatgccggagaagtcggtaaaggctttgccgtagtcgctgatgaaatccgcaaacttgccgagtcgtcaagtaagcagtcaaaaaccaccgctacaatgctaaaaaaaataaaagcgtccatagacaacattacaaaatcgtctaatgacgtattagaccgttttggcgcaatagactcaagcgtaaaaacagtttccgaacatgaacaaaatatccttaaagcgatgcaggagcaggaaatcggagggaagcaaatactgaaatccataggtatattgagagacataacccattcggtaaaaaaagggtctgatgacatggcaaaatcaggcgaaactctagtcaaggaaactgataatttcataaaaaccagtcaggaaacggcggaaggcatgaacgagatactgacaggcattaaccagataaaatcttcagtgaaccatgtaaatgaaatgagccatgaaaacaacagtaactttgaatgttaa

SEQ ID NO: 68128 - protein, 561 aa, Unknown
  Obtained from environmental sample
  DOMAIN (308)...(526): Methyl-accepting chemotaxis protein (MCP) signaling domain
  misc_feature (1)..(561): Xaa is any amino acid
MYTLDISEPDSAWYPATLKQKELYSFNINYDIGVQKTMLWINAPVFESERAIGIVGTGIDLSGFIDSLYADFDPSMPFYLFNKLSEITGARDHSLVINKKTINDYFGEAGASILKSAEQSGKVPQTFYLGNSEYVVGSIESLDWHITAILPITALDTLNNGVTIFFMVMLAVIAVILIISFIFISSLLKPMRYMIQTLDQIAKNRDLTRRLEFKHHDEIGTVGDFFNRTFEEFRILVGTIKYKINGLNHTSFELSDNMSKTSTAVEKISSNLDNMENLVVKQENGALVAGEAVGAIKTNIDSLNKMIEQQAESVDMSSSAIEEMTANVHSVTQTLAENSKNVDVLVEASGNGKTGLQTVAQEIREIAHDSEGLLEINSVMNNIASQTNLLSMNAAIEAAHAGEVGKGFAVVADEIRKLAESSSKQSKTTATMLKKIKASIDNITKSSNDVLDRFGAIDSSVKTVSEHEQNILKAMQEQEIGGKQILKSIGILRDITHSVKKGSDDMAKSGETLVKETDNFIKTSQETAEGMNEILTGINQIKSSVNHVNEMSHENNSNFEC

SEQ ID NO: 68129 - DNA, 414 bp, Unknown
  Obtained from environmental sample
  misc_feature (1)..(414): n is a, c, g, or t
atgttaaaacaagaaacggataaatttaatgatactgtcggcaacgaaaaacaaaaagttcttgtagtagatgacgacagtattcatctcgaaatggtggaagcggtattacagagcgagtatgaaatatctaccgccaaaaccggcaaagaagcgttaggattattctatcaaggacttgttcccaaattagtattattagacttaataatgccggatatggatggttgggatatttacaaaagaataaaagcaataagcggcttacacgatacctcgatagcgtttttcacatcttcaaccgatcaaaaagacataaaacacgcgcacgaaatgggcgcggttgattatatcaaaaagccctatgataaagacgacttgcttcgcagggtggggagaattattagaaaatga

SEQ ID NO: 68130 - protein, 137 aa, Unknown
  Obtained from environmental sample
  DOMAIN (18)...(132): Response regulator receiver domain
  misc_feature (1)..(137): Xaa is any amino acid
MLKQETDKFNDTVGNEKQKVLVVDDDSIHLEMVEAVLQSEYEISTAKTGKEALGLFYQGLVPKLVLLDLIMPDMDGWDIYKRIKAISGLHDTSIAFFTSSTDQKDIKHAHEMGAVDYIKKPYDKDDLLRRVGRIIRK

SEQ ID NO: 68131 - DNA, 1161 bp, Unknown
  Obtained from environmental sample
  misc_feature (1)..(1161): n is a, c, g, or t
ttggccgagcgcgttgacagcgttcttgaagacgtgcaaaggctgaaccgtcctgtagtaattcacgtaattactcaaaaagggaaaggttacggctacgcggaagacgaaccggacagctatcacggcgtaggctctttttccgttgacgacggtatcggcccggacaagccggatgacaataaaccggcggcaaataatacgggcgggaaaaaaacttttacggaagctttttcaaacataatactggaagcggcaaagagggacaaacgagtagccgccgtaaccgccgcaatgcagaccggaacggggcttactaaatttaagcaggcttttcccgaccgtttttttgataccgggattgcggaagaacacgccgccacttttgccgcaggccttgccgcccggggactgcgcccaatagcggctatatactcaacatttatccaaagatcggtagatcaggtaatacacgatgccgccctgcaaaatttgcccgttatttatgcgctggacagagcaggttttgtcggcgcggacggggaaactcatcaggggttattcgacatctcgctcttccgcagtacgcccaatatgacaattctttctcccgcaagcgaaaacgaactgcgccttatgctggactgggcacttgcaaaaaaagacggccccgtaatcatccgttaccccaaagcgtactgccccgccgaactgcctgagttttcacaacctgttcaaaccgggcgcggggtttttctctcccaggaaagaaaggagcaggtttgcctaatattcacaggaggcctttacagagaagctctggaagcggcggcaatcctaanacagagcggaattgaggcggatctttataacctccgctttttaaaacccgtagacgaagattatatcgcaggattattaaacgaatacaaactgaccgctattattgaagagggaataaaagagggaggtttcggcgaatatctgacttctcttgccggccttcgtaactgtaaatctaaaaccgtaatattagcggcagaaagcgatttttttgagggaaacatggcgttgggaacaagggaagaactgcttgcggaaaacggactggatggtaaaagcatagcgggaaaaataagcaaaatttatataagggattga

SEQ ID NO: 68132 - protein, 386 aa, Unknown
  Obtained from environmental sample
  DOMAIN (248)...(375): Transketolase, C-terminal domain
  misc_feature (1)..(386): Xaa is any amino acid
MAERVDSVLEDVQRLNRPVVIHVITQKGKGYGYAEDEPDSYHGVGSFSVDDGIGPDKPDDNKPAANNTGGKKTFTEAFSNIILEAAKRDKRVAAVTAAMQTGTGLTKFKQAFPDRFFDTGIAEEHAATFAAGLAARGLRPIAAIYSTFIQRSVDQVIHDAALQNLPVIYALDRAGFVGADGETHQGLFDISLFRSTPNMTILSPASENELRLMLDWALAKKDGPVIIRYPKAYCPAELPEFSQPVQTGRGVFLSQERKEQVCLIFTGGLYREALEAAAILXQSGIEADLYNLRFLKPVDEDYIAGLLNEYKLTAIIEEGIKEGGFGEYLTSLAGLRNCKSKTVILAAESDFFEGNMALGTREELLAENGLDGKSIAGKISKIYIRD

SEQ ID NO: 68133 - DNA, 483 bp, Unknown
  Obtained from environmental sample
  misc_feature (1)..(483): n is a, c, g, or t
atgagaagaaaagacaaagagataattgatataaatgaaaaacttgaaattatcgcaaaatgcaaaatttgcaggcttgggttatctgataataattatccgtatattgtgccgttaaattacggcttttcccatgatgatggaaaattaactttatattttcacagcgcagcggaaggaaaaaaagttgacatcattaaaaaaaataataacgtatgttttgaaattgactgcgatacaaaattaatcgaaagagaaaatccctgtgattatggttatgaatttaaaagcataattggttttggtaaaataataattttgaacttgaaagatgaaaaaataaacggattaaattatttaatgaaacaacaaaccggaaaaaatattaaatatgattttaatgaaaatgaactaaataacattctggtttttaaaatgtcggttgatgaatttacaggaaaacaaaaaacaagaaataaataa

SEQ ID NO: 68134 - protein, 160 aa, Unknown
  Obtained from environmental sample
  misc_feature (1)..(160): Xaa is any amino acid
MRRKDKEIIDINEKLEIIAKCKICRLGLSDNNYPYIVPLNYGFSHDDGKLTLYFHSAAEGKKVDIIKKNNNVCFEIDCDTKLIERENPCDYGYEFKSIIGFGKIIILNLKDEKINGLNYLMKQQTGKNIKYDFNENELNNILVFKMSVDEFTGKQKTRNK

SEQ ID NO: 68135 - DNA, 681 bp, Unknown
  Obtained from environmental sample
  misc_feature (1)..(681): n is a, c, g, or t
ttgttcatggacaccaccattgaaagccgcatagccctgcttcaggcctttgacccgctgtttcccacaggggcctatacgatgtcgggcggcttggaaacccacacccagaaaggactcgttaatgataaacccgcccttgtttcatatttaaaagccatgatttacattctgccctacggcgacctgggtatctgcgcgaaaacggcgcaaggcgaagactttattttaatggacaatctgtgcgccgcgatgaaacagccctttgagatacgaaccggcagtgagaaactctgtacgcgtttcttaaaagcgcaggaatcgttatgcgattatccatcgcttgccgggtacaggcaggcgataaagcaaacaaaatgccggggacattacgcagtcgcggttggcctttttatgcgcgatttaaacgcaaacctgaatgaggcgctggaattgtattgctacagccttttgtcgcaggcggtaaaccatgccgtaaaactgattcctctggggcaatcggatgggcaagcggccctttttgaggcaatgcgcctgatccctagtgcggcacaaaaggcaatggcggctgatgttgacgaattgggcgtttcaggctgcggttttgatttacgcgctatgcagcacgagacgcttcacggaagactgtatatcaattga

SEQ ID NO: 68136 - protein, 226 aa, Unknown
  Obtained from environmental sample
  DOMAIN (40)...(189): UreF
  misc_feature (1)..(226): Xaa is any amino acid
MFMDTTIESRIALLQAFDPLFPTGAYTMSGGLETHTQKGLVNDKPALVSYLKAMIYILPYGDLGICAKTAQGEDFILMDNLCAAMKQPFEIRTGSEKLCTRFLKAQESLCDYPSLAGYRQAIKQTKCRGHYAVAVGLFMRDLNANLNEALELYCYSLLSQAVNHAVKLIPLGQSDGQAALFEAMRLIPSAAQKAMAADVDELGVSGCGFDLRAMQHETLHGRLYIN

SEQ ID NO: 68137 - DNA, 327 bp, Unknown
  Obtained from environmental sample
  misc_feature (1)..(327): n is a, c, g, or t
gtgtcttcaaaggggactgaaatagggctcaggctttcacaaccattgttcgacggcggagtgttatacgaagacaacgaaaaaattatatgtctggaacttctgccntgcgagacaacgcgggcgcatattcacaatatgaaagaaatggggcacctttgttttgaacttggcaaccgccacctgcctctttctatcgcggaagattctgtaagcacgccctatgacaaacccacttttgaatatctggaaaaacttggtttccactgcgagcgtgtaacggaaaaatttacgccggagataattgttcatggacaccaccattga

SEQ ID NO: 68138 - protein, 108 aa, Unknown
  Obtained from environmental sample
  DOMAIN (42)...(107): UreE urease accessory protein, C-terminal domain
  misc_feature (1)..(108): Xaa is any amino acid
MSSKGTEIGLRLSQPLFDGGVLYEDNEKIICLELLPCETTRAHIHNMKEMGHLCFELGNRHLPLSIAEDSVSTPYDKPTFEYLEKLGFHCERVTEKFTPEIIVHGHHH

SEQ ID NO: 68139 - DNA, 1563 bp, Unknown
  Obtained from environmental sample
  misc_feature (1)..(1563): n is a, c, g, or t
ttgagagacggaatgggccagtcctgcaatgtaaaggacgccgactgtcccgaccttgttattacaaacgccataatccttgaccacacgggaataataaaagcggacatcggcattaaagacggcaagatttgcggcataggcaaggcgggaaacccggacattatggacggcgtaacaaaagggctgacggtcggcgcgtccacggaaattatcgccggtgaaggcatgattgttaccgcgggcggcatcgacacccatatacattttatcagccccactcagatagaaaccgcgctgtattcgggagttacgacaatgatcggcggcggaaccgggcccgctgacggaacaaacgccactacctgcacgcccggacgcttcaaccttgaaaaaatgctggaggcggctgagggctacccgatgaatctcggtttcctcggcaagggcaacagctcatcgcttaacgcgcttatcgaacagattgaggcgggggcctgcgggcttaaaatccacgaggactggggctcaaccgctgccgttatccgcgcatcgcttgacgccgccgacaaatacgacgttcaggtcgctattcacacggacacgctgaacgagggcggctttgttgaggacacgctcgccgcgataggcggacgcgtcattcacacataccacaccgaaggcgcgggcggcgggcacgctcccgacattatcaaggcggccagcctgcctaatattctgccgtcatcgacaaaccccaccatgccgtttacccgtaacaccgccgacgaacatcttgatatgcttatggtctgccaccacctggacagccgagtgcccgaagacgtggccttcgccgattcgcgcatacgccccgaaacaatcgccgccgaggacgtgttacacgacatggggattttctcgatgatgagctccgattcgcaggcgatggggcgtgtcggcgaggtgatcatgaggacctggcagaccgcaagcaaaatgaaggatcagcgcggccgccttaccgaagacagcgaacgcaatgacaactaccgggcgaagcgttatgtgtcaaaatacacgataaatcccgcccttacccacggcattgcggaatatgtcggctccgtggaagcgggcaaattcgccgaccttgttatctggaggcccgcgctctttggggcgaagcctgaaatgatcataaagggcggatatataatcgcctccaaaatgggagacgcgaacgcttccattcctacgccccagcccgtgttttacaggaatatgttcggcgcttcggatctggcgcaaaaacgcacatgcattacctttgtatcaggcgcggcggcaaaaggcggaatcgccaaacggctggggttatgccgcatagtccttcccgtaaagaactgccgcaaactgtcaaaagcggatatgcgttttaatgaccgtacgggggacataaaggttgatcctgagacatacacggttacggtggacggaaagaaagttacctgcgaagctgctgaacacttaagcttaacaagaaaatattggctgttttaa

SEQ ID NO: 68140 - protein, 520 aa, Unknown
  Obtained from environmental sample
  DOMAIN (1)...(72): Urease alpha-subunit, N-terminal domain
  misc_feature (1)..(520): Xaa is any amino acid
MRDGMGQSCNVKDADCPDLVITNAIILDHTGIIKADIGIKDGKICGIGKAGNPDIMDGVTKGLTVGASTEIIAGEGMIVTAGGIDTHIHFISPTQIETALYSGVTTMIGGGTGPADGTNATTCTPGRFNLEKMLEAAEGYPMNLGFLGKGNSSSLNALIEQIEAGACGLKIHEDWGSTAAVIRASLDAADKYDVQVAIHTDTLNEGGFVEDTLAAIGGRVIHTYHTEGAGGGHAPDIIKAASLPNILPSSTNPTMPFTRNTADEHLDMLMVCHHLDSRVPEDVAFADSRIRPETIAAEDVLHDMGIFSMMSSDSQAMGRVGEVIMRTWQTASKMKDQRGRLTEDSERNDNYRAKRYVSKYTINPALTHGIAEYVGSVEAGKFADLVIWRPALFGAKPEMIIKGGYIIASKMGDANASIPTPQPVFYRNMFGASDLAQKRTCITFVSGAAAKGGIAKRLGLCRIVLPVKNCRKLSKADMRFNDRTGDIKVDPETYTVTVDGKKVTCEAAEHLSLTRKYWLF

SEQ ID NO: 68141 - DNA, 834 bp, Unknown
  Obtained from environmental sample
  misc_feature (1)..(834): n is a, c, g, or t
atgtacgctaaaggcgtggaattgttaagccccgcaagaaaccgtcagtttttttatgaaaccgaacttccaaaactgtattttcagtggtcgcagactgatgatgttttgtattacattgcggaagttgacgttacgcctgaattcagaaatcccattatcaaaaagcagacgacggctttgtccttttccgattcaagtcttggagaaggagtctggtactggcgcgtaacgcccgttttttctcaaacagacgacggcggcattaattcaagcgccgccgcttttcgtatagttaaaagcaaagaaccgctaacgccgtctttagtttttgccgaagagttattgccttcgtcttcgtatgcggcggttcccgaacccgcagccgcgcccgagcctgtacccgctgtaaaaccggcgccttctcaacccctgagtcaatcgaatattccgcctattccgtttcttgccgctccctctaatcgtcagcctgccgacggataccgtatcggcatagaagaactgaaaaaagtcaacatcaattttagctggtcggcggtacggggagcaaatagttatattcttaccatttacaaagaaacgaacggcgaacggaagcaaattatgcaaatgggaccggaaaaccgtacctcatggtcaacggatattaaaactctcggacggggaaattttatctggcgcatagaagcggtaaacgtaggacgcagtaatgtaattgaacagcatggtaacccggcggaaagccgttttgttgtggacattccccgcgccggacccgtgcagataattaacgggctagaggatatacaatga

SEQ ID NO: 68142 - protein, 277 aa, Unknown
  Obtained from environmental sample
  misc_feature (1)..(277): Xaa is any amino acid
MYAKGVELLSPARNRQFFYETELPKLYFQWSQTDDVLYYIAEVDVTPEFRNPIIKKQTTALSFSDSSLGEGVWYWRVTPVFSQTDDGGINSSAAAFRIVKSKEPLTPSLVFAEELLPSSSYAAVPEPAAAPEPVPAVKPAPSQPLSQSNIPPIPFLAAPSNRQPADGYRIGIEELKKVNINFSWSAVRGANSYILTIYKETNGERKQIMQMGPENRTSWSTDIKTLGRGNFIWRIEAVNVGRSNVIEQHGNPAESRFVVDIPRAGPVQIINGLEDIQ

SEQ ID NO: 68143 - DNA, 903 bp, Unknown
  Obtained from environmental sample
  misc_feature (1)..(903): n is a, c, g, or t
atggcaaacgcgaaaaaaacaggcggtaaattccgttttattgatctttttgtcgtccttctctgcctttcagcttcagcttacagcattaacctgttcaggcttgatttgtttcaaactctcaacggacaaaataaaacgcctatcggatccgtttccattaaaagaaacaccgttcagcgccgcatgtcggacagggtgatatgggacagattgataaaagaatcgcccgtatattccgatgatacgatccgcgtcgcggataattccgaagccgatcttcacgtgggcggcaatgacattattttgaatgagaacacgcttatccgcctgcgttacgacaaagaaaccggcgaatataaaattgaacttacaacgggaaacatggggcttgttaccgcaaacgagggcggtaatgtcgttttaaatattatgggccgtcatgtggaagcaaaaccgggaaccgcgcttaacgccgccgcgggaaacaatggcatagctttacaggtcagcgaaggcgcggcggtaatcgcggaagaaggacagaacctcgaactttcttcaggcgaaatgatcgcgatggacggcgaaggttccattctctctgaacccgcggcaatgatcattcaaccccgtcccaatgccatttacagaaaaaacggcggagagccgcttaatgtcgctttttcatggaacagaataaatcttcaaccggatgaaactttgcgcctggagatggctgaagatcaaagcttcagccgttctgtccgcgttcttgacgggcttaacgcttcggcgcaggccgccttgaacgcgggtctttggaactggcggcttatttacgacggcggcgataaaagctcccgtccttggttccgggcgtttcaccataatgtacgctaa

SEQ ID NO: 68144 - protein, 300 aa, Unknown
  Obtained from environmental sample
  misc_feature (1)..(300): Xaa is any amino acid
MANAKKTGGKFRFIDLFVVLLCLSASAYSINLFRLDLFQTLNGQNKTPIGSVSIKRNTVQRRMSDRVIWDRLIKESPVYSDDTIRVADNSEADLHVGGNDIILNENTLIRLRYDKETGEYKIELTTGNMGLVTANEGGNVVLNIMGRHVEAKPGTALNAAAGNNGIALQVSEGAAVIAEEGQNLELSSGEMIAMDGEGSILSEPAAMIIQPRPNAIYRKNGGEPLNVAFSWNRINLQPDETLRLEMAEDQSFSRSVRVLDGLNASAQAALNAGLWNWRLIYDGGDKSSRPWFRAFHHNVR

SEQ ID NO: 68145 - DNA, 1902 bp, Unknown
  Obtained from environmental sample
  misc_feature (1)..(1902): n is a, c, g, or t
atgacagattggccgagagacgcctcctatgtaaaaaagacagggcaatccccgatcttgaagacggccttaagcccgtacagcggcgtatcatgcacacctctctttgaaaaagacgacggtaaatttcataaagtcgccaatgtagtgggggagtgcatgaagttccatccacacggcgaggcttcaatttatcccgcgcttgttgtgcttgccaacaaagaactttttatcgaaaggcagggaaacttcggcaacctttacacaggcgacgaagcttccgcgccgcgctatatagaatgcagagtaacgccgctcgcgaaagatgttttttacaatccaaagcttacccagtgggcggaatcttacgacggcagaaaccgcgaacccgtgcttttccccgcgaaaattcccgtggtgttgattatgggcgtggaaggaattgccgtcggcatgtccacaaagattctgccgcacaacgccgtcgaggtgctggaagcggagattgcctgccttaccgggaaaaagtttgatctttatcccgattttccgacaggcggctatgttgacatttccgaatatcaaggcggaaacggcaaggttctggtacgcgcaaaattagacacttccgatccaaagcgcattcttattaccgagcttccgttcggctcaaccaccgaaagcatcataaacagcatagacagcgcggcaagagcgggcagaattaaaattcagagcattaacgattttaccaccgataaagttgaaatcgaggtgaaaatggcccgcggcgtatacgcccaggaaaccatcgacgcccttttcgcctttaccgaatgccagcagtccatttccgtcaatcttcttgtgataaggaacgggctgcccgccattatgaccgtcaccgaggttatccagcaccacgcgaaacagcttgtcaaaattcttacaaaagagctggaactggaaaaaaaggaactcagcgacaagctccacctgcggaccctggaaaggatttttatagaggagcgcatatacaaaggcatcgaaaaaatgaaaaccgccaaaggggtccaagaagcggttatcaccggttttaagccttttatgaaagaaataggcccgcgcggggtaagcgaagatgacgtggaacaccttttgcgcatccccatccgcagaatatcgttatacgacataaacagggcgcaagaagaaatgctccagatacaggcccggattaaggaaattaacgcccaccttaaaagcataaccgcgtattcaatcaatttcctgaaagggatcatcgccaagatacaggccaatgaggaactgggaaaggggatcagaaaaacaaaagtcggcgcttttgacaaaatcgacgtgaaggaagcggccagaaaggacattgagcttaaatatgacaaaaaaaccggttatttgggaaccaatgtcgccggggcaaaaatcgccgaagtttcgcctttcgaccgcatactggcgattcgaaaaaacgggatgtacacgataatggatctaagcgaaaaaacatttgtcggcgcggacgcgtggtggataggcgtcgcggacaaggaagccctttccaaaacaatttttacgatcatttacaaggaaaaagaaacaggtttcgcgtgcataaaacgctgcgtaatagagggctggataatgaacaaggattatttccttgttccggacggggcgcaggttttccatgtggacacaaggcaaaaatttgttttcagcgtaaaatatgttccaaagcccaggcttaaagtcctttccgaggattttaaggcgcataactacaatgtgcgcggcgttaaagcggggggaatcaggctttcctcgaaagaagccgcgaaaatcgaatgccgggagaaataa

SEQ ID NO: 68146 - protein, 633 aa, Unknown
  Obtained from environmental sample
  DOMAIN (35)...(439): DNA gyrase/topoisomerase IV, subunit A
  misc_feature (1)..(633): Xaa is any amino acid
MTDWPRDASYVKKTGQSPILKTALSPYSGVSCTPLFEKDDGKFHKVANVVGECMKFHPHGEASIYPALVVLANKELFIERQGNFGNLYTGDEASAPRYIECRVTPLAKDVFYNPKLTQWAESYDGRNREPVLFPAKIPVVLIMGVEGIAVGMSTKILPHNAVEVLEAEIACLTGKKFDLYPDFPTGGYVDISEYQGGNGKVLVRAKLDTSDPKRILITELPFGSTTESIINSIDSAARAGRIKIQSINDFTTDKVEIEVKMARGVYAQETIDALFAFTECQQSISVNLLVIRNGLPAIMTVTEVIQHHAKQLVKILTKELELEKKELSDKLHLRTLERIFIEERIYKGIEKMKTAKGVQEAVITGFKPFMKEIGPRGVSEDDVEHLLRIPIRRISLYDINRAQEEMLQIQARIKEINAHLKSITAYSINFLKGIIAKIQANEELGKGIRKTKVGAFDKIDVKEAARKDIELKYDKKTGYLGTNVAGAKIAEVSPFDRILAIRKNGMYTIMDLSEKTFVGADAWWIGVADKEALSKTIFTIIYKEKETGFACIKRCVIEGWIMNKDYFLVPDGAQVFHVDTRQKFVFSVKYVPKPRLKVLSEDFKAHNYNVRGVKAGGIRLSSKEAAKIECREK

SEQ ID NO: 68147 - DNA, 909 bp, Unknown
  Obtained from environmental sample
  misc_feature (1)..(909): n is a, c, g, or t
gtggatgatattttacaaaacgatccgcgtaacggtgattttttgttaatgaaagcccacatcctgatagagcagaacaattttacccaggcaaacgcgccgcttgacgcttatgcctcaattaaccccaacaacaggctgtatttgtttttacgcgccagattacaggcggaaggaaaccgcaaccgcgattccgccctgaattacctgcgctcaatctttcgtaacaatcccgatgacgaagaagcggtaatttacgccgcggggcttctcatggaatcccagcgtgcaggtgatcaggaggagggcagggcgcttcttgaccgcctgcggcaaatgtccggctcttcgatcaccgtgctcagtttaagcctccgcgacgccgtccggcgcgaaaattggcgggaggcgcaggggtatttgaaccgtatacttccagtacgccgcaccgatcaggatcttcaggacgcttacaacgtggaacgcggtttgaacaacaacgcaagagcgcttgccttcgcgcgtgaactttatgaaagggatacttccaaaaatgattatattgcagtctatatttcggcgttaatcgataacggcagaaaagaagaagcgtccaggttattggaaagccgcatcgcggcggcgggcggcggggccgataaaagccggtatttttttctgcgcagccgcattcaaaccaatgaagaggcggcgctgggcgatcttcgctccagcctttttgaagacccgcgcaatcttgacgcgttaatcgctatgtttgaaatttaccaccgccgccgcgaggaacgccgcgcggttcactatctcaggcaggctctcgccatttctccggacaacccgcgcctgaaacgttacgagacagaatacgcggctttgctgaaaaattaa

SEQ ID NO: 68148 - protein, 302 aa, Unknown
  Obtained from environmental sample
  misc_feature (1)..(302): Xaa is any amino acid
MDDILQNDPRNGDFLLMKAHILIEQNNFTQANAPLDAYASINPNNRLYLFLRARLQAEGNRNRDSALNYLRSIFRNNPDDEEAVIYAAGLLMESQRAGDQEEGRALLDRLRQMSGSSITVLSLSLRDAVRRENWREAQGYLNRILPVRRTDQDLQDAYNVERGLNNNARALAFARELYERDTSKNDYIAVYISALIDNGRKEEASRLLESRIAAAGGGADKSRYFFLRSRIQTNEEAALGDLRSSLFEDPRNLDALIAMFEIYHRRREERRAVHYLRQALAISPDNPRLKRYETEYAALLKN

SEQ ID NO: 68149 - DNA, 564 bp, Unknown
  Obtained from environmental sample
  misc_feature (1)..(564): n is a, c, g, or t
gtgctggcgcgtaaccaggtcgcgatatatcccacggtcgggggcaagctggtagaatcccgcattggcatcggggacagggtcggcataggcaacgtggtggcgatggttgatccctcgcggccgggcgaggtttattctctcagccccgttgtttccaccatatcggggactgtcctgcaggccccttacagcatcggcgataccgtttcggcgcaatcatcgttgtttgtggtgggcgacctttccgtcctgcgggtggaaacctttgtgccagagcgttttgtctcatcgatcagactagggcttggcgcctcggtgaaccttgaggcccttcccggcgaaacctttctcgcggaaatagacgaggtaaaccccgtgcttgatccggcaagcagaaccctgcggatacggctgcgttttacagacaaagcggcagaggcgccgcggatacgcggattaaatcggggatgtttgcgacaatcagcctggtcaccagaaccagggccaacgtgccggtcatacccagaacctcggttatcaatacctacggttcatggatag

SEQ ID NO: 68150 - protein, 187 aa, Unknown
  Obtained from environmental sample
  misc_feature (1)..(187): Xaa is any amino acid
MLARNQVAIYPTVGGKLVESRIGIGDRVGIGNVVAMVDPSRPGEVYSLSPVVSTISGTVLQAPYSIGDTVSAQSSLFVVGDLSVLRVETFVPERFVSSIRLGLGASVNLEALPGETFLAEIDEVNPVLDPASRTLRIRLRFTDKAAEAPRIRGLNRGCLRQSAWSPEPGPTCRSYPEPRLSIPTVHG

SEQ ID NO: 68151 - DNA, 798 bp, Unknown
  Obtained from environmental sample
  misc_feature (1)..(798): n is a, c, g, or t
atgcaagacatctggaaggaaacattagagatacgctttggcagcgtagaccgctctgacaggtttacgctggcgagcgtttttaacttttttcaggaagcggccatcagccacgcggcgaatctgggagtggggcgggatgcgctggggcggtcgggacagggctggatactttccaggctctcgctttttatcgagcgcagggcgtcttacggtgaagttgtcgaggtaagcacctggccgcgcggatcggaaaagctctttgccatgcgcgattacgagatcaaagacgcccaggggaaagcgattgtccgcggccgcgggggctggcttgtgctggacattgaaaagcgcaggccgctcaggccgcagcaaatggtggacgccttaccccacaataccgggcgcgacgcttttcccaccggtcccctggggcttgatccaaggaagggccttgttaaattcgcggaacggagcgcgcagtattcagacatagatttttacggccacgcaaataatgcccgctatatacagtggatacaggatgttaccgacatggaaattcttacaaaggcgtcgcagatccggctggatattaattacctgagcgaagtgatgcccggcgatacggtagaactatggactgccgctataacaaacgccgtgccggagggaactgaaacagaaattcaaaagagggattatcctttatcgcccgggccgtccttcgcctacgaagggaaaaggcccgattcgggacaggcggtattcagggcggagctgcgaactggcgggtga

SEQ ID NO: 68152 - protein, 265 aa, Unknown
  Obtained from environmental sample
  DOMAIN (2)...(259): Acyl-ACP thioesterase
  misc_feature (1)..(265): Xaa is any amino acid
MQDIWKETLEIRFGSVDRSDRFTLASVFNFFQEAAISHAANLGVGRDALGRSGQGWILSRLSLFIERRASYGEVVEVSTWPRGSEKLFAMRDYEIKDAQGKAIVRGRGGWLVLDIEKRRPLRPQQMVDALPHNTGRDAFPTGPLGLDPRKGLVKFAERSAQYSDIDFYGHANNARYIQWIQDVTDMEILTKASQIRLDINYLSEVMPGDTVELWTAAITNAVPEGTETEIQKRDYPLSPGPSFAYEGKRPDSGQAVFRAELRTGG

SEQ ID NO: 68153 - DNA, 525 bp, Unknown
  Obtained from environmental sample
  misc_feature (1)..(525): n is a, c, g, or t
ttgttcaaggagttatttatgaaaaaggtatttttttgtttggcattaattttaagcgttttactgttttttgcctgtgcttccgcgccggctgcgccaaaatctacgtctacggcttcatcagctgctgcagatacatcagcgccttctacgccgaccgcgacgcctcagcaaactaccaatacatctacaccagcttcagcttccagtaataccgatatcatccttagcggctcggagacttatactgtagtttggggtgacacgcttacgaaaattgcccgaagcaaatacggaaacggtttttattacccgcttattttaatggcctcaagtaatgtcgttagggatcaggacaggattataccgggcatgagattaacgattccgagactgcaggccaatctggatgattccagggccagagccagtatgaaaaggttctttttggaaacagccagtattaccgagcgaaaaaggcctcgcgacgccgcgggcttgcgaaatttagccaactctctgtag

SEQ ID NO: 68154 - protein, 174 aa, Unknown
  Obtained from environmental sample
  SIGNAL (1)...(27)
  DOMAIN (82)...(130): LysM domain
  misc_feature (1)..(174): Xaa is any amino acid
MFKELFMKKVFFCLALILSVLLFFACASAPAAPKSTSTASSAAADTSAPSTPTATPQQTTNTSTPASASSNTDIILSGSETYTVVWGDTLTKIARSKYGNGFYYPLILMASSNVVRDQDRIIPGMRLTIPRLQANLDDSRARASMKRFFLETASITERKRPRDAAGLRNLANSL

SEQ ID NO: 68155 - DNA, 2454 bp, Unknown
  Obtained from environmental sample
  misc_feature (1)..(2454): n is a, c, g, or t
gtgggcattttcacgagttttcccagaataccaggacgacgggagaaatccgagaaaaaggcgatagaggtaattaagcgggcgataaacggtgaaaagcaggtgtttgattgggttcatcgttcttctttgggagagcttattccttttgaagttacgttggaacgcatgatgaataacgggaagtatgtggtaatagcttttcaatatgacctgcgcaatatcaaaaagatggaaaaaaacatacgcgaacagggcgagcagctaaaaatcaggctcgaacagcaggtgctaatttccgaactttcaagaggatttatttcgtcaggtgattcacaagccctggtaaaagaagcagtcgccaagttgggacgctaccataaagtgtcattagtgttcgttttcgcaatagattatgagcgtaaagatacgcgtctggcatatcattggtgcgctgacggcgcgtcgctgcggacggctattgccaatctatatgactatttagttgatatttttccagggacactgcccgactgcgctactttaccgatagttgtttgtgatgataccgccgtcaattctgacgcggtttttcaggcgctctatgctattaatgtcatggcagttatcggcgcgccgctttatgttgacggccgcctatggggagtaatatgcgtagaacagaactatacggcccgtaagtggacgcaaaatgaaaaagagtttgtagccatgacggcaagtaccatcgcgggcgtaatcatgcgtgacatctatactataaaactcaaagacgccttgcataaggcgatggaagcaagcaaggccaaaagcgaattcctttccaacatgagccacgaaatgcgcacgcccctgaacgcgataaccggcatgacgacaatcggcaagaacgcgaaagacatggaacgcaaagactatgcgctgggcaagatagaaaacgcgtcgacgcatctgctcggcgttattaacgacgtactcgatatgtcaaaaatagaagcaaagatgctggagctttcgccctgtgaatttaatttcgagaaaatgctgcaaaaagttgttgcggtagtaaatttccgcgtggacgaaaagcggcaaaaacttgttgttcacattgacaataaaattccaaaaatactgatagccgatgaccagcgccttgcccaggttattgccaatctgctcagcaatgctgtcaaattcacgcccgaagaaggttccatcatccttaacgcgaattttataggggaagaaaacggcatttgtaccatacaggttagcgtgagcgacactggaatcggaataagcgccgaacagcaaaagcgcctattcagttctttcatgcaggccgagtcgagcacgacgcgcaaatacggcggaacggggctgggcctagcgatttccaaaagcatagtggagatgatgggcggaaaaatatgggtcgagtcggaagtcgaaaaaggctcaactttcgcatttaccgttcaggcaaagtgcggcgcggaaatcaggcaaaagcgtttgctggatgtcaacctgagcgatgtccgtataatggcaatagatgatgacccggatattttatcgcattttactgaaataatgcagggctatggcgtatcatgcgataccgctacaagcggagaaagagcgcttgaacttattgagcaaaagggcgactaccatatctattttatagactggaaaatgccgggcatggatggcatacagcttgcccgtgaaataaattcgcgcaggtcaggaaattccattgtaacgatgatttccgccgccgaatggagcgcgatcgcggaagacgcaaaagcggcaggtgtcgataagttcctgtccaagcccctgttcccgtccacaatcgcggaaataatcaatgattgcctcggcgttgacaataaggaagctgaagaaacacaagcggccgacattgccggcatttttgccgggcggcgcatccttctggcggaagatgtggaaataaaccgcgagatcgtacaggctttgtttgaaccgacgaagttgaagatagactgcgcggaaaacggcatagcggccgtcaggaaattctacgaagccccgaacgcctatgatttgatatttatggacgtacaaatgcccgaaatggacggctacgaggcgacgcggcggattaggactattgaagcggccctgaataaaaatgctcctgacaagccaagaaggattccgattatcgcgatgaccgccaacgtattccgcgaagacatcaacaaatgccttgacgccggcatggacaaccatgtggggaaaccgcttgatttcaatgaggtgattaaaaaagctaagaaaatatctgcaataaagggggtaaaaccttttgctacagagagttggctaaatttcgcaagcccgcggcgtcgcgaggcctttttcgctcggtaa

SEQ ID NO: 68156 - protein, 817 aa, Unknown
  Obtained from environmental sample
  DOMAIN (111)...(254): GAF domain
  misc_feature (1)..(817): Xaa is any amino acid
MGIFTSFPRIPGRREKSEKKAIEVIKRAINGEKQVFDWVHRSSLGELIPFEVTLERMMNNGKYVVIAFQYDLRNIKKMEKNIREQGEQLKIRLEQQVLISELSRGFISSGDSQALVKEAVAKLGRYHKVSLVFVFAIDYERKDTRLAYHWCADGASLRTAIANLYDYLVDIFPGTLPDCATLPIVVCDDTAVNSDAVFQALYAINVMAVIGAPLYVDGRLWGVICVEQNYTARKWTQNEKEFVAMTASTIAGVIMRDIYTIKLKDALHKAMEASKAKSEFLSNMSHEMRTPLNAITGMTTIGKNAKDMERKDYALGKIENASTHLLGVINDVLDMSKIEAKMLELSPCEFNFEKMLQKVVAVVNFRVDEKRQKLVVHIDNKIPKILIADDQRLAQVIANLLSNAVKFTPEEGSIILNANFIGEENGICTIQVSVSDTGIGISAEQQKRLFSSFMQAESSTTRKYGGTGLGLAISKSIVEMMGGKIWVESEVEKGSTFAFTVQAKCGAEIRQKRLLDVNLSDVRIMAIDDDPDILSHFTEIMQGYGVSCDTATSGERALELIEQKGDYHIYFIDWKMPGMDGIQLAREINSRRSGNSIVTMISAAEWSAIAEDAKAAGVDKFLSKPLFPSTIAEIINDCLGVDNKEAEETQAADIAGIFAGRRILLAEDVEINREIVQALFEPTKLKIDCAENGIAAVRKFYEAPNAYDLIFMDVQMPEMDGYEATRRIRTIEAALNKNAPDKPRRIPIIAMTANVFREDINKCLDAGMDNHVGKPLDFNEVIKKAKKISAIKGVKPFATESWLNFASPRRREAFFAR

SEQ ID NO: 68157 - DNA, 831 bp, Unknown
  Obtained from environmental sample
  misc_feature (1)..(831): n is a, c, g, or t
ttgctgcattcggcagcgcgaatattctcaaacgccattatcggtgaagaaatggggctcgaatccgaaaaaaccttccaggcgctggaacgccgcgaaaaaatggcggccgcgctgaacagggcggctgtaaagtttctctcgcacagcgaacaatcccttgaagacaccatgacggcgggcatgaaagatatcgccgacgtgttcaatctggacaggttttccctgttgcgcaacttcaccaggcctgacggttcgcgttacgcagggcaaatctaccgctgggacagaaaatccggcgggaccacggcgccgataaaagggatggcatctttctctcctgaaaagtatgtgccgagctggaggaaaatttttgcttcgggcggaacgattaatggcccggtacggctcctgcccgacgcgaccgtgctgcaatcgttcggtttagtgtcgatatgcgttacgccggtgtttatcaacaatattttctggggcattgccttttttgaggatctcagtaccgagcgctttttcgaggaagacagcgttgaaatgatgcgctcggcggcgttcctgtgcgcgaacaccgtcatacgcgccgacatggaacgtgaaatagccaacgccaacgaatttaacaacaccatccttgcctctttgcctttttgcttgtctttttttgacggaaacgcccgcacttttgactggcacgattttactttgaaagcgatggaaacaacaaaagaatactacagtgggcattttcacgagttttcccagaataccaggacgacgggagaaatccgagaaaaaggcgatagaggtaattaa

SEQ ID NO: 68158 - protein, 276 aa, Unknown
  Obtained from environmental sample
  DOMAIN (53)...(197): GAF domain
  misc_feature (1)..(276): Xaa is any amino acid
MLHSAARIFSNAIIGEEMGLESEKTFQALERREKMAAALNRAAVKFLSHSEQSLEDTMTAGMKDIADVFNLDRFSLLRNFTRPDGSRYAGQIYRWDRKSGGTTAPIKGMASFSPEKYVPSWRKIFASGGTINGPVRLLPDATVLQSFGLVSICVTPVFINNIFWGIAFFEDLSTERFFEEDSVEMMRSAAFLCANTVIRADMEREIANANEFNNTILASLPFCLSFFDGNARTFDWHDFTLKAMETTKEYYSGHFHEFSQNTRTTGEIREKGDRGN

SEQ ID NO: 68159 - DNA, 426 bp, Unknown
  Obtained from environmental sample
  misc_feature (1)..(426): n is a, c, g, or t
atgaaactgtcggcctacatttcggcggcgctgctggcatgctcgcctctggccttttttcgcccagtacaggtgaggggtgagagcatggagccttccctgcacagcgggcagcttgtattcgcgctatggccttggtgttctggaagcccggccctgggcgaaatctgggtgctggaaagccccgacggggcggccatcaagcgcgtcttggccctgccaggctcggagctcgagcagcgcaatgggcgcctggccttggatggccgcgctttggatgagccatacatcactttctgggatacgggaaacgacgggcgctggctggccggggccggatatttgttgctgggcgacaaccgccccgncagcagggactgcagggcgtgggggccattgacaaagccgctttgcggggtagggtga

SEQ ID NO: 68160 - protein, 141 aa, Unknown
  Obtained from environmental sample
  SIGNAL (1)...(25)
  DOMAIN (24)...(90): Peptidase S24-like
  misc_feature (1)..(141): Xaa is any amino acid
MKLSAYISAALLACSPLAFFRPVQVRGESMEPSLHSGQLVFALWPWCSGSPALGEIWVLESPDGAAIKRVLALPGSELEQRNGRLALDGRALDEPYITFWDTGNDGRWLAGAGYLLLGDNRPXSRDCRAWGPLTKPLCGVG

SEQ ID NO: 68161 - DNA, 777 bp, Unknown
  Obtained from environmental sample
  misc_feature (1)..(777): n is a, c, g, or t
ttgtccccatccattgtgtatgcttcgccgataaatgttggcagcggctttgtgaaatgcgcccacggcacgctgccagtccctgcgcccgccacggcgcacttgctgcggggagtacccacgtacagcagcggtccaaacagcgaactctgtacaccgacgggggccgcgttattgaggcactttgtgaagtcgcacggcagtatgcccatgatgtcggtggaaaaaattggctgcgggatgggcaaaaaagatttcgacgcattgaactgcatcagggctttctatggtgagcttggctcaacggaatcggaaggccccatcgagggggacgtggttgaactcagttgcaatttggacgatatgacgccagaagccgtagcgtttgcccagcaactgcttcacgatgaaggggctctggacatctacaccgcgccagtcgtgatgaaaaagggacgcatgggaaccagcttcacctgcctctgcctggcggccgacaaagaaaaaatggcggcgctgatcttcaagcacacgagtacactagggataaaagaataccaatgccgccgctacacgcttgcaagaaagagcctcctcgttgagacggagctgggcagcgtgggcgtgaaaatctcctctggctatggcgcggcaaaatccaaacccgaatttgaggatatagccaaaatcgccaaagacaaaagcatctcgctggatcaagcccacgcgcttgtcaagcttagccacggacaacacccgttcctattccatttctaa

SEQ ID NO: 68162 - protein, 258 aa, Unknown
  Obtained from environmental sample
  DOMAIN (3)...(252): Protein of unknown function DUF111
  misc_feature (1)..(258): Xaa is any amino acid
MSPSIVYASPINVGSGFVKCAHGTLPVPAPATAHLLRGVPTYSSGPNSELCTPTGAALLRHFVKSHGSMPMMSVEKIGCGMGKKDFDALNCIRAFYGELGSTESEGPIEGDVVELSCNLDDMTPEAVAFAQQLLHDEGALDIYTAPVVMKKGRMGTSFTCLCLAADKEKMAALIFKHTSTLGIKEYQCRRYTLARKSLLVETELGSVGVKISSGYGAAKSKPEFEDIAKIAKDKSISLDQAHALVKLSHGQHPFLFHF

SEQ ID NO: 68163 - DNA, 1029 bp, Unknown
  Obtained from environmental sample
  misc_feature (1)..(1029): n is a, c, g, or t
ttgaagtatttatggaggttttttatggcgcacatgtattacgaaaaagactgcgatttggggatgcttaaaagcaaaaccattgcggtaatcggttatggttcacagggacacgcccacgccctgaacgctaaggaatcggggcttaaagtgattgtcggtctttatgaaggctcaaaatcatggaaaaaagcggaagaagcgggctttcaggtaatgacggcaaaagacgcggcgcaggcggcggattttatcatgatcctgattaacgatgaaaaacaggcggctctttacagggaatcaatcgcccccgcgctgaaaaaaggaaaaacactttccttcgctcacgggttcaacattcactttgggcagatagtaccgccgcccgatgtcaatgttgtaatgatcgctcccaagggaccgggacacactgtacgagaacagtacaaattaggcgcaggcgtaccctgccttatcgccgttcatcaggacgcaagcggagacgctaaaaaattggctatggcttacgctatgggaataggcggcgcaagagcgggaatattggaaacaacttttaaggaagaaaccgagaccgatcttttcggcgaacaagcggtactttgcggcggcgtatcagcgttgatgaaagccggctacgaggtgcttgttgaagcgggctatcagcctgaaagcgcgtactttgaagtaatgcacgagatgaaactcatcatcgatcttgtaaacagaggcggacttgcctttatgcgttattcaatttccgacacagcggaatacggcgattatattacgggaccgaaaatcatcaccaaagagacaaaggacacaatgcgtcaggtattgaaggatattcaaacaggcaaattcgcaagggaatggatacttngaaactcaagtaacctgtccgttctttaccgcatgagggcgcttgaagctgaacatcctattgagaaaacaggaaaggaacttcgcggaatgatgccctggttaaagaagaacgaggaaaaataa

SEQ ID NO: 68164 - protein, 342 aa, Unknown
  Obtained from environmental sample
  DOMAIN (192)...(337): Acetohydroxy acid isomeroreductase, catalytic domain
  misc_feature (1)..(342): Xaa is any amino acid
MKYLWRFFMAHMYYEKDCDLGMLKSKTIAVIGYGSQGHAHALNAKESGLKVIVGLYEGSKSWKKAEEAGFQVMTAKDAAQAADFIMILINDEKQAALYRESIAPALKKGKTLSFAHGFNIHFGQIVPPPDVNVVMIAPKGPGHTVREQYKLGAGVPCLIAVHQDASGDAKKLAMAYAMGIGGARAGILETTFKEETETDLFGEQAVLCGGVSALMKAGYEVLVEAGYQPESAYFEVMHEMKLIIDLVNRGGLAFMRYSISDTAEYGDYITGPKIITKETKDTMRQVLKDIQTGKFAREWILXNSSNLSVLYRMRALEAEHPIEKTGKELRGMMPWLKKNEEK

SEQ ID NO: 68165 - DNA, 1647 bp, Unknown
  Obtained from environmental sample
  misc_feature (1)..(1647): n is a, c, g, or t
atgagcaataacgagcaagcgccgtctaacttgatacctctggaaattttagacaccactctgcgggacggcgcacagggagagggaataactttttccgtgcaggacaaacttgatgtagtccgcgcccttgatgatttgggaatctcatggatagaggcggggaatcccggaagcaatccaaaagatatggaattcttccgtcttgccggagaccttaaacttgaacacgcaaaactctgcgccttcggttctacccgtaaaaagggagttaaagcaagcgaggactcgagtttgttaagcctgcttgaagcgcagaccaaagcggtagtgatcttcggcaagagctgggatcttcatgtgacggaagtgctgagggtaagccacgaggaaaacctcgccatgattgcggagacaatcgctttcctgaaagaaaaggggcggcaggttttttacgacgcggaacatttctttgacggctggaaggcaaatcccgagtacgctcttacaactctgaagacggcaatatccgccggggcggatcgcatagtactgtgcgacacaaacggcggcgcgtttcccgacacgatagagaaggcggttaaagaagccatgaagattgttgacagcgcaggcagagcagacggttctccttgcattctgggcattcacgcgcacaacgacatggatatggcgagcgcgaataccgtaaccgccgtccttgccggatgccgccatgttcagggaacccttgtcggcttcggcgaaaggtgcggcaacgcaagcctcgcggctgtcatgcccagccttgaattaaaacttggtttccgctgccttgttgaaggaaaaatggaaatgctttccgaaataacccgcattgtcgcggaaacggcgaatgtcgccgtaccgggcaatatgccatacgtgggaagccatgcctttacccacaaggcgggaatgcacgcggacggaattttaaaggttagccgttcatttgaacatatcgatccttcgcttgtggggaacgacaggcattttataatgagcgaagtcggcggacgttcggcaatagcggagagggcgaaaaaaatcgacgcgtccattacaagggagcaccctgttacaaaaaccctcgcgcaaaagttaaaaacccttgaggcggagggctggcagtttgagggcgcggacggcagttttgatcttatggttcgcagagaacttggccgctacaagccgctgttcaaaatcgaggcttaccgcgtggtaagcgaacacccgacgggcgagactatagcctgttcccacgcgtgggtcaaagtccatgttgacgacaaggaggaaatggccgccgccgagggtgatgggcccgtcaacgcgatggacggggcgcttcgcagggcgctgaaacatttttaccccgagctgcaggaagtgcgccttattgattacaaagtcagagtaattaacggcaacgccgcgactgcggcaaaggtgcgcgtgcttatcacttcctccgacggcaaacaaaactggacaaccgtgggggtttccgaagacatcatcgacgcgagccgcgcggcgttagttgattctatcgagtataaactgattgacgacatagaacgccgattcaaggcgtatttgtag

SEQ ID NO: 68166 - protein, 548 aa, Unknown
  Obtained from environmental sample
  DOMAIN (22)...(300): HMGL-like
  misc_feature (1)..(548): Xaa is any amino acid
MSNNEQAPSNLIPLEILDTTLRDGAQGEGITFSVQDKLDVVRALDDLGISWIEAGNPGSNPKDMEFFRLAGDLKLEHAKLCAFGSTRKKGVKASEDSSLLSLLEAQTKAVVIFGKSWDLHVTEVLRVSHEENLAMIAETIAFLKEKGRQVFYDAEHFFDGWKANPEYALTTLKTAISAGADRIVLCDTNGGAFPDTIEKAVKEAMKIVDSAGRADGSPCILGIHAHNDMDMASANTVTAVLAGCRHVQGTLVGFGERCGNASLAAVMPSLELKLGFRCLVEGKMEMLSEITRIVAETANVAVPGNMPYVGSHAFTHKAGMHADGILKVSRSFEHIDPSLVGNDRHFIMSEVGGRSAIAERAKKIDASITREHPVTKTLAQKLKTLEAEGWQFEGADGSFDLMVRRELGRYKPLFKIEAYRVVSEHPTGETIACSHAWVKVHVDDKEEMAAAEGDGPVNAMDGALRRALKHFYPELQEVRLIDYKVRVINGNAATAAKVRVLITSSDGKQNWTTVGVSEDIIDASRAALVDSIEYKLIDDIERRFKAYL

SEQ ID NO: 68167 - DNA, 1146 bp, Unknown
  Obtained from environmental sample
  misc_feature (1)..(1146): n is a, c, g, or t
atgaaatttacaattgcggtaatacccggagacgggatcgggcctgaggtgacggcgccggctctcaaagtccttgacgcggtgggggtcaagtacggtcatactttcaagtatgtcgaacttgaagcgggcggccttgccatcgatcacactggcgagccgcttccaaaggaaactcttgaaagggcgaaacagtgcgacgcgcttcttttgggcgcggtcggcgggcccaaatgggatatgcttcccggccatctgcggcccgaaagggcgctgctgggccttcgcgcggggcttggcgttttcgcaaacctccggcccgccgctttgctcccccagttaaaatccgcctgcccggttaaagacgaagtccttatcgcaagcaacagcgaaggaaaagcggcttttgatttattgatcgtaagggaattaacaggcgggctttacttcggcaagcgcggaagactggacgaagcttcaaacgggcacagccccggttccgcttttgacactgaaacttattcatggatggaaattgagcgcgtgcttcgcgcgggctacgaagcggcggcggcgcggcgcaaaaaactctgcgtagtggacaaggccaacgtattggagtcgtcacgtttctggcgcgaagtcgccgccgtcgtttcaaaagactatcccgatatagaaacaagctacctctacgttgacaacgccgctatgcagttgatacgcgccccggggcaattcgacgttatagttacgtctaacttattcggggacatactttccgatgaggcgtcggtgcttactggttcaatcggaatgttagcctccgcgagtctgggcgcgcccgctcaaaccggcaaaacaaggccgggaatgtacgagcctattcacggctccgcgcccgacatcgccggaaaggacatcgcgaatccccttgcgacgattctttccgcggcgatgatgctccgctactccttcaggcttgagaaggaagcgcaagccattgaaaccgccgtcaacaatgtgctggatcaggggctgaggacgggagacatcgcgagccgtggcgcggcatctaacggcgaaaaaattgtgggtaccaaagcaatgggagacgcggtactcaaagagttggagagattatga

SEQ ID NO: 68168 - protein, 381 aa, Unknown
  Obtained from environmental sample
  DOMAIN (4)...(374): Isocitrate/isopropylmalate dehydrogenase
  misc_feature (1)..(381): Xaa is any amino acid
MKFTIAVIPGDGIGPEVTAPALKVLDAVGVKYGHTFKYVELEAGGLAIDHTGEPLPKETLERAKQCDALLLGAVGGPKWDMLPGHLRPERALLGLRAGLGVFANLRPAALLPQLKSACPVKDEVLIASNSEGKAAFDLLIVRELTGGLYFGKRGRLDEASNGHSPGSAFDTETYSWMEIERVLRAGYEAAAARRKKLCVVDKANVLESSRFWREVAAVVSKDYPDIETSYLYVDNAAMQLIRAPGQFDVIVTSNLFGDILSDEASVLTGSIGMLASASLGAPAQTGKTRPGMYEPIHGSAPDIAGKDIANPLATILSAAMMLRYSFRLEKEAQAIETAVNNVLDQGLRTGDIASRGAASNGEKIVGTKAMGDAVLKELERL

SEQ ID NO: 68169 - DNA, 528 bp, Unknown
  Obtained from environmental sample
  misc_feature (1)..(528): n is a, c, g, or t
gtggggactaacaccggaagtcaggctgatataaagaacagctataacacaggcagtattaccggacaagttacaacaagccaagaaatcggcggcatagtcgggaatcaaaacagccgtctggttgaatactgttacaacaccggagacgtatttggcagtacttcggtcggcggcatagccggaagcgtctccaacggatgcattgtgcgatactccgtatcgctcggcttaaaggtaaccagcactaacaacccgattggacgtgtggttggaggcgctaacggtactttgaataacaacaaagcccgtgaggacatgagaaccggagcaagcggctcggaggttttacaaacaggaacggcaaccgacagaaacggcgcagatgtcgctgtgggtacatatcagacctatgttttcagcgactttgatacaacaatctggactataacaacggggagtttgtcatccagcgcattgcccacgctcaaaacaaacacgcaaagccccgcccccacgcttccgtga

SEQ ID NO: 68170 - protein, 175 aa, Unknown
  Obtained from environmental sample
  misc_feature (1)..(175): Xaa is any amino acid
MGTNTGSQADIKNSYNTGSITGQVTTSQEIGGIVGNQNSRLVEYCYNTGDVFGSTSVGGIAGSVSNGCIVRYSVSLGLKVTSTNNPIGRVVGGANGTLNNNKAREDMRTGASGSEVLQTGTATDRNGADVAVGTYQTYVFSDFDTTIWTITTGSLSSSALPTLKTNTQSPAPTLP

SEQ ID NO: 68171 - DNA, 984 bp, Unknown
  Obtained from environmental sample
  misc_feature (1)..(984): n is a, c, g, or t
ttgggcgccgatctcgccatactcgcgattttcctgcaatacgcaggtggctttttcgatcctgttcaaaatatcgcgaacattcttacggaatttgtttccgcccaggcgaatgtcgagcgcgtatgcggcctgttggagcaaagcccgcatattaccgagaagccggaaataatcgaaaaatacggcgataccttcaaccccaaaaaagaaaactgggagcctctgacaggcgatgttgaatttaaaaacgtaacttttaaatacccagacggcactgaaaacgtactggagcattttaaccttcatgtgccccgtggaacctacgccgccattgtgggtgaaaccggagcgggcaagtctaccctggtgaacctggtctgccgtttctttgaaccaaacgacggggagatacttgttgacgggattgactatcgggaaaggagccagctctggctacacagcaatctgggctatgtcttgcagaccccccatcttttcaccggaaccatccgtgacaatatccgttacggacggcttgacgcgagcgatgaggaagttgaagccgccgcaaagagcgtccacgcggacaaggtaatcgccaaattggaaaaaggttttgataccgaagtcggcgaaggcggcgaccgcctgtccagcggcgagaaacagcttatctcatttgcccgcgccgtccttgctaacccccgtctctttatccttgacgaggcgaccagttctgtggacaccgaaacggaaatgcttttgcaggacgcgatacaccgcctgctggaaaacagaacaagttttgtcatcgcgcaccgcctgtcaactatcaggaacgccgatattatccttgtggttcaggacggcaagataatcgagcgtggaacccacaatgaacttatgttgcgccgcgggcaatattataatctctatacccgtcaatttgaggaagaggctgaagaaaaagccttgcggtga

SEQ ID NO: 68172 - protein, 327 aa, Unknown
  Obtained from environmental sample
  DOMAIN (107)...(291): ABC transporter
  misc_feature (1)..(327): Xaa is any amino acid
MGADLAILAIFLQYAGGFFDPVQNIANILTEFVSAQANVERVCGLLEQSPHITEKPEIIEKYGDTFNPKKENWEPLTGDVEFKNVTFKYPDGTENVLEHFNLHVPRGTYAAIVGETGAGKSTLVNLVCRFFEPNDGEILVDGIDYRERSQLWLHSNLGYVLQTPHLFTGTIRDNIRYGRLDASDEEVEAAAKSVHADKVIAKLEKGFDTEVGEGGDRLSSGEKQLISFARAVLANPRLFILDEATSSVDTETEMLLQDAIHRLLENRTSFVIAHRLSTIRNADIILVVQDGKIIERGTHNELMLRRGQYYNLYTRQFEEEAEEKALR

SEQ ID NO: 68173 - DNA, 867 bp, Unknown
  Obtained from environmental sample
  misc_feature (1)..(867): n is a, c, g, or t
atgaataaaatgataatcgcgggattggtttttggagtggtgaccagtatgaatagcggctgggcctcggaaagcgacgggattttttccttcaacctggggcagtttgaagtgtatatgctggtggaaagcgaacgtaccggaaacgcggatatactcgtgggcgcggacaaggccctgctggatcgttatatcccgaaaagcggttttaaacatacggccaacgcttttcttattaaggctccgggaaagaattatctttttgacacaggaaccggggcaggcggagtgatattcgacaaggttaaaaaactgggcgttgcgaatgacaaaattgacgcgattttgattactcatctgcatggggatcactttggcggcctccagaaagacggcgaagccctttacccaaacgcaaaactctatgtatccgcaaaagagcatgagttctttaccaaaaccaacgtgaaccagggggcggtggcggctctggctccctacaataaccggctgacaaccttcgagccgggcgcgcttggctcaagcctcaaggagctgcttccgggcattacccccgttgccaactacggacatacgcccggccatactgtttttatactggaaagcaacggggcaaagctcatcattgccggagactatctgcacattgcgctggtacagttccccaatccggatatttccgccagctacgacatggacaaacaacaagccgccgcttctcgcaagcagattctcgactatgcggcaaagaataaaatccccattggcggtatgcatgttgtgtatcctggcattggcgccgtagaagccgatggaaatggtttcaagttcacgcccgcgaagtaa

SEQ ID NO: 68174 - protein, 288 aa, Unknown
  Obtained from environmental sample
  SIGNAL (1)...(22)
  DOMAIN (73)...(266): Metallo-beta-lactamase superfamily
  misc_feature (1)..(288): Xaa is any amino acid
MNKMIIAGLVFGVVTSMNSGWASESDGIFSFNLGQFEVYMLVESERTGNADILVGADKALLDRYIPKSGFKHTANAFLIKAPGKNYLFDTGTGAGGVIFDKVKKLGVANDKIDAILITHLHGDHFGGLQKDGEALYPNAKLYVSAKEHEFFTKTNVNQGAVAALAPYNNRLTTFEPGALGSSLKELLPGITPVANYGHTPGHTVFILESNGAKLIIAGDYLHIALVQFPNPDISASYDMDKQQAAASRKQILDYAAKNKIPIGGMHVVYPGIGAVEADGNGFKFTPAK

SEQ ID NO: 68175 - DNA, 1041 bp, Unknown
  Obtained from environmental sample
  misc_feature (1)..(1041): n is a, c, g, or t
ttgataagctcgcttaaagaacttcctcctgcgttggcagtttcggttagcgccgaagaaaaattatttattacggagatgaagcggcgcggcttgctgccttttgccgtaacagagcattttgcgtcgcttgccggtcccgaaaaagacgatcccataaggcggcagttttttcccgatccccgcgaggcgttatgtgatccttttacgctggatgacccgctgggcgaataccgttaccgggcagcgcccgggtttatacaccagtaccgcgaccgggcgctgctgcttgccgcgaatacctgcgccggatactgccgccattgtttccggcgtttttggctttcagcgccgccgccaattgaggacttacaacccgcgcttgcatatcttgcggcgcatacagaaatccgcgaggtccttgtttcaggcggcgatcccttaacattggacaatgccgctctggaggaaatgtttcgccgtctgcgatccgcgcggcccgatcttatgcttcgtgtgtgtactagggttcccattacagaaccgttacgcctggacaataatactattgcgttgtttgcgaattttcatccattgcgcgtggtggtacagatcaaccatccgcgggaaatttccgatccaaccaggacagcccttgccgcttgcgtggatgccggtattcccatactcgtgcaaaccgtgctgttgtgcggcattaacgacgatcttgaactgttggcgcagttgttcaacatctgtcttgatcttggcttatcgccatattacctgtttcagcttgatcttgcgccgaacaccgcacatttcagagttccgcttagnaagggcattgaactataccgcgatcttggcaggttaatttcaggcccgtgcttacccgtttataccgtagaccttcccggcggaggcggaaagatccgcctgcatgaaaacgtgattaccggaaaaacacaaacacctaatggtgatgtttatatactaaaagatagtaaaggcaaggaatggtattatcctatggattaa

SEQ ID NO: 68176 - protein, 346 aa, Unknown
  Obtained from environmental sample
  DOMAIN (96)...(250): Radical SAM superfamily
  misc_feature (1)..(346): Xaa is any amino acid
MISSLKELPPALAVSVSAEEKLFITEMKRRGLLPFAVTEHFASLAGPEKDDPIRRQFFPDPREALCDPFTLDDPLGEYRYRAAPGFIHQYRDRALLLAANTCAGYCRHCFRRFWLSAPPPIEDLQPALAYLAAHTEIREVLVSGGDPLTLDNAALEEMFRRLRSARPDLMLRVCTRVPITEPLRLDNNTIALFANFHPLRVVVQINHPREISDPTRTALAACVDAGIPILVQTVLLCGINDDLELLAQLFNICLDLGLSPYYLFQLDLAPNTAHFRVPLXKGIELYRDLGRLISGPCLPVYTVDLPGGGGKIRLHENVITGKTQTPNGDVYILKDSKGKEWYYPMD

SEQ ID NO: 68177 - DNA, 1086 bp, Unknown
  Obtained from environmental sample
  misc_feature (1)..(1086): n is a, c, g, or t
gtgacgaatggaaccaactggaatccgcgcaattttaccaatattttctttcaaaacagctatgtactcattctggcaattggtatggttcaggtaataatcgtacaggggattgacctttcagtaggttcggtctgcgcctttgtaggcgcgctcagcgcgatgatttataataccggcgttggaatgcctgtcgcgttgttggccgctcttgccatgggtgttggcatcggcgcttttcaaggagcatgggttgcctacgcaaaaatgcccgcgtttatcgtaacccttgccggaatgttacttttccggggccttacctacattgttaccaaagttaatccaatcggcctcaaggataccggttattcccatctttccacaggaaccctggatgaaatgttccgtaccagcagaataggcccttattttcccatggctttggttatagcggtgctggtattgattgttttctttatcgctgaaatttttggccgccgtaaaaaaattgccaatgaatttgaagtttcttcaatgcccgtatttattggcaagctggtcataataagccttttggttcttggactcgccgatcgttttgcccgttatcgcgggcttccgattgtggtattggtattgggtattgccgtttttgcctttcactttattctgaacaataccgtgcttggccgctatatctacgcggtcggcggcaatcctcgctcagcaaaactttcaggtattaattcagaattggttacatttatcgtattttgtttcatgggcggtttgacaggccttgccgccgttgtaagcaccggttacatgaacagcgccctgccccaggccggcaacctctttgaacttgacgccattgccgcgtgttacatcggcggcgtttcagccggcggcggtatcgggacagtaattggtgtcatcgttggcggacttgtaatgagcgccattaacaacggaatgtccctgatgaacctgggcgcgcattaccagtatgtggtcaaggctttgattctgctttttgcggtcttctacgatgtgtacacccgccgcaaagccgggttgggttga

SEQ ID NO: 68178 - protein, 361 aa, Unknown
  Obtained from environmental sample
  DOMAIN (11)...(348): Branched-chain amino acid transport system / permease component
  misc_feature (1)..(361): Xaa is any amino acid
MTNGTNWNPRNFTNIFFQNSYVLILAIGMVQVIIVQGIDLSVGSVCAFVGALSAMIYNTGVGMPVALLAALAMGVGIGAFQGAWVAYAKMPAFIVTLAGMLLFRGLTYIVTKVNPIGLKDTGYSHLSTGTLDEMFRTSRIGPYFPMALVIAVLVLIVFFIAEIFGRRKKIANEFEVSSMPVFIGKLVIISLLVLGLADRFARYRGLPIVVLVLGIAVFAFHFILNNTVLGRYIYAVGGNPRSAKLSGINSELVTFIVFCFMGGLTGLAAVVSTGYMNSALPQAGNLFELDAIAACYIGGVSAGGGIGTVIGVIVGGLVMSAINNGMSLMNLGAHYQYVVKALILLFAVFYDVYTRRKAGLG

SEQ ID NO: 68179 - DNA, 744 bp, Unknown
  Obtained from environmental sample
  misc_feature (1)..(744): n is a, c, g, or t
atggaagtaaaaaactggagcgtgtaccatcccgagtaccacgatataaaagtggtggacaatgtttctttcttcntgcgcaaaggcgagatattggctttntgcggaccgatgggcgcggggcgcacggaattaatgatgagcatcttcggcaattcctacggaaaccgcagcgagggcgaattgataattaacggcaaacatcaaaagttcaacagtccccacgaagcgattagttcaaggcttggttatatttcggaagaccgcaaaagcctcgggcttgtgctgattcaggatattaaaacaaatataactcattccagcctgaataaaatttccaattttctcgggataattgacgaacaaaaagaaattacggaagcggaacgttaccgtaacgacttgaacataaggacgccgtcaattaaccagatcgtccgaaacctgtccggcggcaaccagcaaaaagttgttgttagcaaagctcttttggcggacccggaaatattaatagtagacgagccgacaaggggcatcgacgttggggcaaagacggaaatttacggcattatgaacaacatgattgcctccggaaagagcgtcatcatggttacgtccgagcttcccgaagcgctgggaatggcggacagaatttacgttatgaacgaaggtcatattaaaggggtgcttaataaatctgaagcaacccaggaaaaaataatgcatctggcgcttgtcggatga

SEQ ID NO: 68180 - protein, 247 aa, Unknown
  Obtained from environmental sample
  DOMAIN (29)...(224): ABC transporter
  misc_feature (1)..(247): Xaa is any amino acid
MEVKNWSVYHPEYHDIKVVDNVSFFXRKGEILAXCGPMGAGRTELMMSIFGNSYGNRSEGELIINGKHQKFNSPHEAISSRLGYISEDRKSLGLVLIQDIKTNITHSSLNKISNFLGIIDEQKEITEAERYRNDLNIRTPSINQIVRNLSGGNQQKVVVSKALLADPEILIVDEPTRGIDVGAKTEIYGIMNNMIASGKSVIMVTSELPEALGMADRIYVMNEGHIKGVLNKSEATQEKIMHLALVG

SEQ ID NO: 68181 - DNA, 1317 bp, Unknown
  Obtained from environmental sample
  misc_feature (1)..(1317): n is a, c, g, or t
gtgggcgaaaaaattgtaagcggacaggtaattgccgacggtcccgctacccaaaacggagaacttgcgcttggaagaaatattcttgtaggctttatgccgtggaacgggtacaactatgaggactcgatacttatctctcagcgtgttgtaaaagatgatatgtttacttccattcacatcaaagaatttgttgtcgaagtaagagaaacaaaactcggtcccgaaaaaattacccgtgatattcccaacacttccgaaaaaagtcttgataacatggacagcgagggcatcatccgcataggagcgaaagtgcgctccggcgatatattggttggcaaagttacgccgaaaagcgaaactgaaaccacgcctgaattcaaactgctcaattcaatcttcggcgagaaggcaaaggaagtgcgcgacacttcgcttaaagttccgcacggaattgatggaacagttatcgatattcagcggcttaaacgcacggatcatgactcattgagtcccggcgttgatgaagttgtaaaagtgcttatcgccacaaagcgcaaactgcgcgagggcgataaaatggctggacgccacggtaacaagggcgttgtcgctcgtattctgccggaagaagatatgccgtttatggaagacggaacgccgttggatatttgtttaacgccgctcggcgttccttcccgtatgaatatcggtcagctcttggagacggaacttggctgggcgggttccactcttaacgaatggtattccgctcccgtattccagtctccctcaactgagcaaatagaggagaaacttaaagaagccggattgcccgcaacaagcaagaccgttctgcacgacggcagaaccggagagccttttataaacccgattttctgcggaataatttactttcttaaattgcaccaccttgtcgacgacaaaatgcacgcgcgctcaacagggccgtactcgcttgttacgcagcagccgttgggcggtaaagcgcaattcggcggacagcgtctcggcgaaatggaagtttgggcgctggaagcatacggcgcggctaatacattgcaggaacttttaacaatcaagtcggacgatatgaccgggcgttcaaaaatttacgaggcaatcgtaaagggcgagccttccacaaccgcgggtattcccgaatcgttcaacgtgcttgtacaggaactgcgcggccttgcgcttgacctttcgatctttgacgttaaaggaaaacaaataccactcaccgaaaaagatgaggaattgataaccaagtcaggaagtaatttttaa

SEQ ID NO: 68182 - protein, 438 aa, Unknown
  Obtained from environmental sample
  DOMAIN (340)...(416): RNA polymerase Rpb2, domain 7
  misc_feature (1)..(438): Xaa is any amino acid
MGEKIVSGQVIADGPATQNGELALGRNILVGFMPWNGYNYEDSILISQRVVKDDMFTSIHIKEFVVEVRETKLGPEKITRDIPNTSEKSLDNMDSEGIIRIGAKVRSGDILVGKVTPKSETETTPEFKLLNSIFGEKAKEVRDTSLKVPHGIDGTVIDIQRLKRTDHDSLSPGVDEVVKVLIATKRKLREGDKMAGRHGNKGVVARILPEEDMPFMEDGTPLDICLTPLGVPSRMNIGQLLETELGWAGSTLNEWYSAPVFQSPSTEQIEEKLKEAGLPATSKTVLHDGRTGEPFINPIFCGIIYFLKLHHLVDDKMHARSTGPYSLVTQQPLGGKAQFGGQRLGEMEVWALEAYGAANTLQELLTIKSDDMTGRSKIYEAIVKGEPSTTAGIPESFNVLVQELRGLALDLSIFDVKGKQIPLTEKDEELITKSGSNF

SEQ ID NO: 68183 - DNA, 813 bp, Unknown
  Obtained from environmental sample
  misc_feature (1)..(813): n is a, c, g, or t
atgaaattctgctcttatgaactgntagcctgggtcaaggaacacgacgcggcgcttttcctcgttgcccatgtcaccaaggaagggatcatagccgggccgaaaatgatcgagcatcttgtggacacggttctgtactttgaggaaaacgacaaaacatcggggctctgcgggggcagggactgccgctttttgcgcgcttcaaaaaaccgcttcggctcggtcgacgagattggcatattcacaatgggcgagaaaggccttgtccctgtcgaggacacaggcgctctcttccttgtcaggcgcgaaggggaattcccagccggcgtggctaccgccgcggtgctggaaggcacaagaaccatactcgtcgagatacaggccctgaccattccagcaaaaggggcggtaagcagggttttttccgacaaaatcgattccggccgtgtttccagagtgtcggcggccctggaaaagcaccttggcttaaggctttccgaccaggatctctatgtaaacgtggccggaggcatacgaatcaccgaggtcggggtggaattggcccttgcctgcgccctttactcggccagaaccggccttgccctgcccaacaagctcgccattgccggggaattgtcccttacaggcgaactgcgccccgtaaacaagcttcccacgcggataaagaccgccgcaagcctgggttttagctcttttctctatccgaaaccagaaaataacggccagtccctgcctgaaggggctgggctaaagcccgccggggatataaagacggcgatacggcaaatatag

SEQ ID NO: 68184 - protein, 270 aa, Unknown
  Obtained from environmental sample
  misc_feature (1)..(270): Xaa is any amino acid
MKFCSYELXAWVKEHDAALFLVAHVTKEGIIAGPKMIEHLVDTVLYFEENDKTSGLCGGRDCRFLRASKNRFGSVDEIGIFTMGEKGLVPVEDTGALFLVRREGEFPAGVATAAVLEGTRTILVEIQALTIPAKGAVSRVFSDKIDSGRVSRVSAALEKHLGLRLSDQDLYVNVAGGIRITEVGVELALACALYSARTGLALPNKLAIAGELSLTGELRPVNKLPTRIKTAASLGFSSFLYPKPENNGQSLPEGAGLKPAGDIKTAIRQI

SEQ ID NO: 68185 - DNA, 726 bp, Unknown
  Obtained from environmental sample
  misc_feature (1)..(726): n is a, c, g, or t
ttggggctcccgcacagtcacatatcctataaacacggcttaacgccgtgccctcgttgcgccccattccctcttccccagtccctagtccctagtccccattccctatattatataccaatgaaatctcccaaatttatctaccggtgttcgggctgcgggcatgaagaacctaaatggctgggacgctgtcctgaatgcggcgaatggaacacctttgtagaggccgagtcaactccggctgtaataggcagccgcagggcggtgaagaaaatgccgcagactttcccgctcgcatcccttgaatgtaaggacgaaggccgcgtttcaagcgggatcgcggaactggacagggtgctgggcggcggaatcatgaaacgcagcgccattctcgtgggcggggaaccgggcatcggaaaatcaacactgctcttgcaaacggccgcggcggcgcagatcaaaggccgagttctgtacatctcgggcgaagagtcggcctcccaaatcaggctgcgggccgaaaggctcgggctgggggacgcttccggaggaagcgccgcttccggtaaaaacagccttgcacggatagaggtgatatgcacaggaaaccttgaggaaatagaaacagccctgaacgccgtaaagccctcgctggtcatggtcgattcggcgcagacactttttcggcggacgcgggtgccgcccccggaaccgtcagccagatga

SEQ ID NO: 68186 - protein, 241 aa, Unknown
  Obtained from environmental sample
  misc_feature (1)..(241): Xaa is any amino acid
MGLPHSHISYKHGLTPCPRCAPFPLPQSLVPSPHSLYYIPMKSPKFIYRCSGCGHEEPKWLGRCPECGEWNTFVEAESTPAVIGSRRAVKKMPQTFPLASLECKDEGRVSSGIAELDRVLGGGIMKRSAILVGGEPGIGKSTLLLQTAAAAQIKGRVLYISGEESASQIRLRAERLGLGDASGGSAASGKNSLARIEVICTGNLEEIETALNAVKPSLVMVDSAQTLFRRTRVPPPEPSAR

SEQ ID NO: 68187 - DNA, 1962 bp, Unknown
  Obtained from environmental sample
  misc_feature (1)..(1962): n is a, c, g, or t
ttggggtttgntgttttgaaagttatgcttgatagtagcacacaacngctttcggacaaaaaccccagtccccagtccctgatccccagtccctatattatgattaatgaaaacgcattggcagtatataaaaacaaaccggctctggtaaaggaaatttccaatgacaaaataaccatagctatttacggcggtgaaaaaatcaaggtcagggaaaaggatattgagataatccatccggggccggtaaagaattttaacgaaattaaagaaagcggtaacgcgaacttgcaggaaacctgggaactgctgcttgccgatgatggcgctatctccctgaaggaacttgcggaacttgcctttggcgaatacagccccgcttcggtctgggccgcatattgtctgctccttgacggcctctattttacgggaacaattgccgtcataagaccccggaagcagggcgaggttgaggcggataaaaagaagcgtgaggaaaaatccgcagcaatcaacgaaagagagctttttcttgagcgcatgagaaagcgcagcccgcaacaggaggacaggcgcttcatacaggatattgaggctcttgccctggggaagtcggctaaaagccgcactatgaaagaaatcggcctgggagaaactccggaagaagcccatgccctgctccttgaatgtggtttctggaacgagcaaaacaacccccaccctgccagattcggcgttgttctccagcctgcggaacacaagcctgaagctccgccgcccgaagagcgctgcgaccttagccatttagccgcctacgcaattgacagcccctggagcagcgatcctgatgacgccgtttccattgagcttgaagatggcaaacagattctctatgtccatgtggccgatcccgcctcttctatcgaggcggacagtgccgttgaaaaagaggcccgtgacaggggggcgacgctctatatccccgaaggcagtatccgtatgcttgccgatgatagtctgccgctttttgcccttggccttgccgaaacatcccctgccctgactttcaaaatgacgcttaacagcacaggcgaaattgagaaaactgaaattcttccttcaacagtaaaggttaagaggctaacctacaaagaagcggatgaatatttaaatgatacacacagcgaagcatctgaagccgttgttttgcgatcacttaacgcattggctgaacgcaacatcaagcggcgcgttgcgttaggggcaatcaatattgacatgccggaaacccatatcagcctgaacgaggggcgtgtggaaattgagcctataacgaggtacaagtcggcggatttggtacgggaatgtatgctccttgccggcgaaggcgcggggctatggtgtttgcaccgtaatctgcccgttccctacatcatgcaggaaattggggatttgcccgatgaaacgcttgagggcatggccggttattatcagcttcgccgctgcatgaggccccgcgccctttcaacaagacccggacaacattcaggccttggcctggatacctatattcaggcaaccagccccctgcgccgttataccgaccttcttgcccacttgcagatccgggcggttttacggggcggccaacccctgagcgccgatgaaatctccgccagaatgaacgcgggggaagcggctatatccgccgtcaatcaggcggaacgcgcttcccgcggccattggactatggtgtaccttgcagacaagaaggactctgtctgggacgcaatcgcccttgaaaaaaaaggaaaccgctgggtagcgataatcccctccctcgccctggaaacgctggttcccctgcggagagaactgtcgcctaacgatccgctgaagctggttttgaaatcggtgaatatcccgtggggggaagcggtgtttgccgctgttgaaaattag

SEQ ID NO: 68188 - protein, 653 aa, Unknown
  Obtained from environmental sample
  DOMAIN (264)...(480): RNB-like protein
  misc_feature (1)..(653): Xaa is any amino acid
MGFXVLKVMLDSSTQXLSDKNPSPQSLIPSPYIMINENALAVYKNKPALVKEISNDKITIAIYGGEKIKVREKDIEIIHPGPVKNFNEIKESGNANLQETWELLLADDGAISLKELAELAFGEYSPASVWAAYCLLLDGLYFTGTIAVIRPRKQGEVEADKKKREEKSAAINERELFLERMRKRSPQQEDRRFIQDIEALALGKSAKSRTMKEIGLGETPEEAHALLLECGFWNEQNNPHPARFGVVLQPAEHKPEAPPPEERCDLSHLAAYAIDSPWSSDPDDAVSIELEDGKQILYVHVADPASSIEADSAVEKEARDRGATLYIPEGSIRMLADDSLPLFALGLAETSPALTFKMTLNSTGEIEKTEILPSTVKVKRLTYKEADEYLNDTHSEASEAVVLRSLNALAERNIKRRVALGAINIDMPETHISLNEGRVEIEPITRYKSADLVRECMLLAGEGAGLWCLHRNLPVPYIMQEIGDLPDETLEGMAGYYQLRRCMRPRALSTRPGQHSGLGLDTYIQATSPLRRYTDLLAHLQIRAVLRGGQPLSADEISARMNAGEAAISAVNQAERASRGHWTMVYLADKKDSVWDAIALEKKGNRWVAIIPSLALETLVPLRRELSPNDPLKLVLKSVNIPWGEAVFAAVEN

SEQ ID NO: 68189 - DNA, 786 bp, Unknown
  Obtained from environmental sample
  misc_feature (1)..(786): n is a, c, g, or t
atgcttattctggaagcgcggaacatcgcgaaacggtttggttcaacctgtgttttgaacgatatcaattttacgctggaggagggcgaagtccttgccataatcggctcctcgggcagcggtaaaaccacgcttctacgctgcctgaattttcttgagcggctggattccggacgcattattctgcgcggcgaagccttgtatgacgcggcggaaaaaatccattatgacgaacagagcatcaggcaaaaacggctgcatttcgggcttgtgtttcaatccttcaacctgttcccccagtatacggcgtttgataacgtggtgcttgcgcgtaaactggcggcgcaaaaacagcctgattttaaaaaaaataaaaaggcgattcttgaagaaatagaccgggaaggcatacagcttttggaacagatcgggcttgccgccaaacgggattcctatccctaccagttgtccggcggccagcagcagcgtgttgccattgccagggctttggcgcttaaaccggatattctgtgttttgacgagccgacttccgcgcttgatcccgaactgacgggcgaagtgctgaaagttatccgcgctctggcggaaaagaacacgacgatgatcatcgtgacgcacgagatgcaattcgcccgccaggttgccgatactgtcctgttcatggacgagggcctggtagttgaatatggttcgccccaggacgtatttgataatccttcaagcgagcgtataaagcgtttccttgagcattacgcgtcagtgtag

SEQ ID NO: 68190 - protein, 261 aa, Unknown
  Obtained from environmental sample
  DOMAIN (18)...(234): RecF/RecN/SMC N terminal domain
  misc_feature (1)..(261): Xaa is any amino acid
MLILEARNIAKRFGSTCVLNDINFTLEEGEVLAIIGSSGSGKTTLLRCLNFLERLDSGRIILRGEALYDAAEKIHYDEQSIRQKRLHFGLVFQSFNLFPQYTAFDNVVLARKLAAQKQPDFKKNKKAILEEIDREGIQLLEQIGLAAKRDSYPYQLSGGQQQRVAIARALALKPDILCFDEPTSALDPELTGEVLKVIRALAEKNTTMIIVTHEMQFARQVADTVLFMDEGLVVEYGSPQDVFDNPSSERIKRFLEHYASV

SEQ ID NO: 68191 - DNA, 648 bp, Unknown
  Obtained from environmental sample
  misc_feature (1)..(648): n is a, c, g, or t
atgggtttttgggcggtaacgttaaggttattacagggcttccagaccacattttttatttttgggctgacactcctgttcgcgctgccgctcggacttataatctcattcggttccatgtcaaagatacttccgcttaaatatattgtcaaaatctttgtatggatgatccggggtgtgccgctcatgctccagatatttattgtgttttatgttcccggctttgtctttggcgcgccaatatcgtcgcggatcaacgcggcgattatcgccttttccataaattacgcctgttatttcagcgagatattccggggcggaatagaaagtatttcccacagccagtacgaagccgggcatgtactggggatgacaaagttccaggtgttttttcgcgtcgtgctgctccaggtgattaaacggatcactgctcctatgtcgaacgagatcatcaccctggtaaaggatactgcgcttgcccgtgtgattatggtagttgaggtaataaaggtcgctgaaacttttgccgcgaccagggccatgatatggcccttgttttatacgggcgcgttttatttgttgtttgtgggaatccttactctgttgtttggatatatagaaaaacgattgagctatttcagggcgtag

SEQ ID NO: 68192 - protein, 215 aa, Unknown
  Obtained from environmental sample
  DOMAIN (10)...(212): Binding-protein-dependent transport system inner membrane component
  misc_feature (1)..(215): Xaa is any amino acid
MGFWAVTLRLLQGFQTTFFIFGLTLLFALPLGLIISFGSMSKILPLKYIVKIFVWMIRGVPLMLQIFIVFYVPGFVFGAPISSRINAAIIAFSINYACYFSEIFRGGIESISHSQYEAGHVLGMTKFQVFFRVVLLQVIKRITAPMSNEIITLVKDTALARVIMVVEVIKVAETFAATRAMIWPLFYTGAFYLLFVGILTLLFGYIEKRLSYFRA

SEQ ID NO: 68193 - DNA, 525 bp, Unknown
  Obtained from environmental sample
  misc_feature (1)..(525): n is a, c, g, or t
atgaatgccccccacgacagaatggatgcacgcggtttcaggtctgtttcactcccatcgctgggttcttttcgcctttccctcacggtactgtgcgctatcggtcatcggctcgtatttagccttggagggtggtccccccgtcttcgcaccgggttcttcgtgccctgcgctactcttggcaagcctctcgcaaatccgcatcataaggggctctcacccgctcaggcgccgctttccagcggacttctgatgccaatccactcaattgcgcctgcctaccccgcgttgccgcggtttgggctactcccgcttcgctcgccgctactgagggaatctcggttgatttcttctcctccgggtaatgggatgtttcggttccccgggttcgcccccgcatcgctgcgggtctccgactctagtcggaggggttgccccattcggactcccaagggtcattggctggagcgcctcgccatggcgtttcgccgctgcccgcgtccttcttcgccggccgatgcctag

SEQ ID NO: 68194 - protein, 174 aa, Unknown
  Obtained from environmental sample
  misc_feature (1)..(174): Xaa is any amino acid
MNAPHDRMDARGFRSVSLPSLGSFRLSLTVLCAIGHRLVFSLGGWSPRLRTGFFVPCATLGKPLANPHHKGLSPAQAPLSSGLLMPIHSIAPAYPALPRFGLLPLRSPLLRESRLISSPPGNGMFRFPGFAPASLRVSDSSRRGCPIRTPKGHWLERLAMAFRRCPRPSSPADA

SEQ ID NO: 68195 - DNA, 789 bp, Unknown
  Obtained from environmental sample
  misc_feature (1)..(789): n is a, c, g, or t
ttggcgaacagccaaacccttgggaccttctccagccccaggatgcgacgagccgacatcgaggtgccaaacctccccgtcgctatggacgcttgggggagatcagcctgttatccccagagtaccttttatccattgagcaacggccgttccacgctgtgccgcgggatcactaagccctgctttcgcatctgctcgacccgtcggtctcgcagtcaagccaccttttgcctttgcgctcgcggggccggttgccgaccggcccgaggtgacctttggatgcctccgttactttttgggaggcgaccgccccagtcaaactggccaccaggcactgtcccggcatccttctcggatgcgcggttaggcctcaggcgacgcaggggcggtatttcaaggacggctccccccggcccagaagccggggatcatagcctcccgcctatcctacgcacgcggcgcctaaagccaacgccaagatgcagtgaaggttcatggggtctttccgtccaggcgcggggcgccggcatcttcaccggcactgcaatttcgctgagtctcgggaggagacagcgcaggagtcgttacacgattcgtgcaggtcggaacttacccgacaaggaatttcgctaccttaggaccgttatagttacggccgccgtttaccggggcttcggttcgccgcttcggggttgccccctgacgcctcccgttaaccttccggcaccgggcacgtgtcagaccatatacttcccattgctggttcgcatggccctgtgtttttggtaa

SEQ ID NO: 68196 - protein, 262 aa, Unknown
  Obtained from environmental sample
  misc_feature (1)..(262): Xaa is any amino acid
MANSQTLGTFSSPRMRRADIEVPNLPVAMDAWGRSACYPQSTFYPLSNGRSTLCRGITKPCFRICSTRRSRSQATFCLCARGAGCRPARGDLWMPPLLFGRRPPQSNWPPGTVPASFSDARLGLRRRRGGISRTAPPGPEAGDHSLPPILRTRRLKPTPRCSEGSWGLSVQARGAGIFTGTAISLSLGRRQRRSRYTIRAGRNLPDKEFRYLRTVIVTAAVYRGFGSPLRGCPLTPPVNLPAPGTCQTIYFPLLVRMALCFW

SEQ ID NO: 68197 - DNA, 369 bp, Unknown
  Obtained from environmental sample
  misc_feature (1)..(369): n is a, c, g, or t
atgcattcagcgcttctccgcagggcgcgcggctacccggccgtgccgctggcgcgacagccggtgcgccggaggcgcccccgtcccggtcctctcgtactaaggacggcgtccctcaagccttcaacgcccgcgccggatagggaccgaactgtctcacgacgttctgaacccagctcgcgtgccgctttaattggcgaacagccaaacccttgggaccttctccagccccaggatgcgacgagccgacatcgaggtgccaaacctccccgtcgctatggacgcttgggggagatcagcctgttatccccagagtaccttttatccattgagcaacggccgttccacgctgtgccgcgggatcactaa

SEQ ID NO: 68198 - protein, 122 aa, Unknown; identical to SEQ ID NO: 64034
  Obtained from environmental sample
  misc_feature (1)..(122): Xaa is any amino acid

SEQ ID NO: 68199 - DNA, 1719 bp, Unknown
  Obtained from environmental sample
  misc_feature (1)..(1719): n is a, c, g, or t
ttggtaagcaagagtatatacctgattggttcttttttcaagatagtttataaggtaaatatggaaaaaaaggaagagaaagggccggattcggaggctgttgacaactctgttcccggccgaggttcgtccctatcggcaggcgctctggttcggcaaggttcaactctgtccctgcttacattaatttcgcgaattctcggtcttttaagggaaatgaccaaagcgagttttcttggaacaaccgcattgtcagacgctttttctgtcgcctttttgctgccgaacctgtttcgccgcctttttgcggaaggttcaatctcggttgcctttattcccacgtttaaagagtatttactgggaaaagatcgggaaaaaacacgggaatttctttcatgtattttcacttttttaactttttttgtaacactaatggttttaattggaattctcgtgtctccctggcttatccgcctttttggaatagaagaatttgatgaaactgtccttttaacaagaattatgtttccctttcttgggtttatgtctttagcggccttatttcaggggatattgaatagttttcatgttttttccccttcgggacttgcgccgattttattgaatattgttacaattctttgtacttacgggcttagtccttttactcaaaatcctgcccgcgcaatggctataggtatttttatcggcggttttttaagcgctgcgatccagtttccttttgtgctaaaacagggacagagcctggtttttaccagcttgaaaaaggctgtaaataacccgggtacgcgaaaagttcttcgacttatcagcccgactataataggaatggccgcttatcagcttaacgacctggtttctacggctcttgccggaagagcgggcgagggcgttgtttcaagccttcagtattcgctcaggcttcaggagttgattctcggcgtttttgcggtttcgatagggacagtgctgcttccgaatcttgctgaatacgcaaaaacatcacagtgggatacttttaacaagcggcttatgtcggcaatgaacattatcgctttgattactattccaattactgttttttcgcttatggaaggaaagaacttaatacgcctcctttttcaaaaccgcagtttcgatgaaacttcggttaatttgactttatcggcctttaaataccacatgcccggtttgttttttatcgcccttaaccgtattttagctcccgctttttacgctcagagcgataccaaatctcctacttgggccggtattatttcttttgcggttaatatctgccttgcggctgtccttgtcgggccgtttcgcggtgcgggtattgctttagctctgtccctcgcaagcgctgttaataccattttgcttcttgtctttctcaaaagaaatccgaatattgcgcttggttccgcttttggttcctcaattatctatattgtaaaactattggttatttcaggattggctgttattcctgtttattttatttctccgttgttaattgattttttcgcgaatagagggcggtttatttcttatggtataccgtttttaattaatacggctatttatatcctgcttggaattgctatgcttgccgttgtcagggataagtatctttttactttggttaatatgattaaaaaaagcgataggagcaagaatggggacagagcataa

SEQ ID NO: 68200 - protein, 572 aa, Unknown
  Obtained from environmental sample
  DOMAIN (279)...(444): MatE
  misc_feature (1)..(572): Xaa is any amino acid
MVSKSIYLIGSFFKIVYKVNMEKKEEKGPDSEAVDNSVPGRGSSLSAGALVRQGSTLSLLTLISRILGLLREMTKASFLGTTALSDAFSVAFLLPNLFRRLFAEGSISVAFIPTFKEYLLGKDREKTREFLSCIFTFLTFFVTLMVLIGILVSPWLIRLFGIEEFDETVLLTRIMFPFLGFMSLAALFQGILNSFHVFSPSGLAPILLNIVTILCTYGLSPFTQNPARAMAIGIFIGGFLSAAIQFPFVLKQGQSLVFTSLKKAVNNPGTRKVLRLISPTIIGMAAYQLNDLVSTALAGRAGEGVVSSLQYSLRLQELILGVFAVSIGTVLLPNLAEYAKTSQWDTFNKRLMSAMNIIALITIPITVFSLMEGKNLIRLLFQNRSFDETSVNLTLSAFKYHMPGLFFIALNRILAPAFYAQSDTKSPTWAGIISFAVNICLAAVLVGPFRGAGIALALSLASAVNTILLLVFLKRNPNIALGSAFGSSIIYIVKLLVISGLAVIPVYFISPLLIDFFANRGRFISYGIPFLINTAIYILLGIAMLAVVRDKYLFTLVNMIKKSDRSKNGDRA

SEQ ID NO: 68201 - DNA, 459 bp, Unknown
  Obtained from environmental sample
  misc_feature (1)..(459): n is a, c, g, or t
atggggacagagcataaaaaaaaccgcaatcttcctactgtagtccttgccggccgccccaatgtggggaaatccacgctctttaaccggcttcttcacaaacgcagggcgattacagaccctacgcccggtgttacgcgcgatcctgtagaagcggaatgttttatcgccgggaaacctctcagattgatagataccggaggtttcaagttagccgattgcgaaggaatagacaaactggttgttaaaaaaacccttgaaacaataaagaaagccgatcttattgttttgttgcttgatgccggggacataaccagcgaagacgaggaatttatcggcctgctgcgccggtatcaaaagcggcttattgtcgcggtaaataaaaccgaggggggcaggaaggaagccgattcgtggagggggtggtcatacggctttgaaaaagtttttatgatttaa

SEQ ID NO: 68202 - protein, 152 aa, Unknown
  Obtained from environmental sample
  DOMAIN (12)...(130): GTPase of unknown function
  misc_feature (1)..(152): Xaa is any amino acid
MGTEHKKNRNLPTVVLAGRPNVGKSTLFNRLLHKRRAITDPTPGVTRDPVEAECFIAGKPLRLIDTGGFKLADCEGIDKLVVKKTLETIKKADLIVLLLDAGDITSEDEEFIGLLRRYQKRLIVAVNKTEGGRKEADSWRGWSYGFEKVFMI

SEQ ID NO: 68203 - DNA, 681 bp, Unknown
  Obtained from environmental sample
  misc_feature (1)..(681): n is a, c, g, or t
atgccgtcggtttacatcactgtgggcggttccatcgcgtcgacggtcgcggcgtttccgcccgcccgccttatgaacgcggcggcggtcgctaagaacgttatctttgtcaagagtcaggcgccggtgacggtgatttcgcagatcatagagttcgccgagcaggcgcgccgcgagggtattctggcgctggagtcacgggctttggagattaccgacgagttcatgaagcagggtatcggtctggcggtggacggcacggagcccgacctcatcagggagattctcgaaacggagatagggcacatggagagccgccacgaagacggcgcgaagatattcgactttctgggcgcggcggcgccgtcgttcggtatgataggaacgctggtcggactcgtgctgatgttgggcaacatgagcgacgtggcctctatcggccccaacatggctgtggcgctcatcaccacgctctacgggtctattctggcgaacatcctctgtatacccttcgcggagaagctgaaggcttattccgccaaggaggttatgataaaggagctgatgctggagggtataatggcactgcagtccggcgacaacccgcgtattgtggcgcagaaactaagcgtcttccttgaaccatcgctgcgcgctttggttttgaaagaaaagaagtag

SEQ ID NO: 68204 - protein, 226 aa, Unknown
  Obtained from environmental sample
  SIGNAL (1)...(25)
  DOMAIN (58)...(191): MotA/TolQ/ExbB proton channel family
  misc_feature (1)..(226): Xaa is any amino acid
MPSVYITVGGSIASTVAAFPPARLMNAAAVAKNVIFVKSQAPVTVISQIIEFAEQARREGILALESRALEITDEFMKQGIGLAVDGTEPDLIREILETEIGHMESRHEDGAKIFDFLGAAAPSFGMIGTLVGLVLMLGNMSDVASIGPNMAVALITTLYGSILANILCIPFAEKLKAYSAKEVMIKELMLEGIMALQSGDNPRIVAQKLSVFLEPSLRALVLKEKK

SEQ ID NO: 68205 - DNA, 774 bp, Unknown
  Obtained from environmental sample
  misc_feature (1)..(774): n is a, c, g, or t
gtggcgcgtaagaagaagccgaaggagggccccaagggggcgcccgcgtacatgaatacgtggggcgacatgtgtacgctactgctctgcttcttcgttatgctcttggccatgtcgaccatcgacccgaccaagttcatggttgcggcgagttcgttccagaacgctttcagcggcgtgcttgagtcgtttccgacgatactcatcacgaaggacgtcttaatcccgaggctgggcggccagcagcagaataagcgcatggccatagaagccgtgactaagatgcgcgagaaggtaaaagaggagaacttggaagacgcgataaaggtgcaggtgacggagacgggtatagcgatacagattagcgaccccataggcttcgagtcggggagcgccgacgtgaaccctaagctgtacggggtgctcaaggacctgtcaaacgtcatcaacgccgccccgtcgagcctgatacgggtggaggggcataccgacaacgtgccgatacacagcgccaagtacccgtcgaactgggagctctcgtcggcgcgggcgctgagcgtggtgcggtacatggcgaacaacggcgacgttgatccgtcgcgtatgagcgccataggctacggcgagtacaggccgatagcgccgaatacgacgccggagaataggaagacgaataggcgcatagagatatacgtagactacatacagaagaaagacggggagatgcccagaggatcggacgagaattacatggagcccggggcgggccaatga

SEQ ID NO: 68206 - protein, 257 aa, Unknown
  Obtained from environmental sample
  DOMAIN (126)...(226): OmpA family
  misc_feature (1)..(257): Xaa is any amino acid
MARKKKPKEGPKGAPAYMNTWGDMCTLLLCFFVMLLAMSTIDPTKFMVAASSFQNAFSGVLESFPTILITKDVLIPRLGGQQQNKRMAIEAVTKMREKVKEENLEDAIKVQVTETGIAIQISDPIGFESGSADVNPKLYGVLKDLSNVINAAPSSLIRVEGHTDNVPIHSAKYPSNWELSSARALSVVRYMANNGDVDPSRMSAIGYGEYRPIAPNTTPENRKTNRRIEIYVDYIQKKDGEMPRGSDENYMEPGAGQ

SEQ ID NO: 68207 - DNA, 1011 bp, Unknown
  Obtained from environmental sample
  misc_feature (1)..(1011): n is a, c, g, or t
gtgagcgacatactgtcacaagaagaggtcgatgccctgctcaacgcggtgtcgtccggggaccttgccgatcaatcgtttgacgaagtgaaggccgacgcccccatcgaagacgaaataccgttgtcgctctacgactttaagaggcccgaccgcgtgtccaaagatcagatgcgcacgttgcagaacctgcacgagggctacgcccgccagttctccaccacgctcacaaacttcctgcgtacctttatcgagacggagctcgtcagcgtcgaccagttgacctactcggagtttgtgatgtccatatccaacccgagttgcatctacgtattccgtatggagccattggagggtttggcgatcatagagataaacccgtctctggtgttttacatcatagacaggttgttcggggggcaggggcggccgtttgagggcaatcgcgagctgaccatgattgagcagaatgtgataaaccgcatagtgcagcgcggtctcggggatttgtgcaccgtgtgggagcatatcggttcgtttacctccaagattgaggcgtacgagacgaacccgcagtttgtgcagatcgcgccgcccagcgagacggtgattttgataagcttggaggtgcgcatgcagaacgcctccggtcttatgagcttatgtttcccatacatggtgcttgagagcgtcatcaacaacttgacggttgagaactggatgtcgctgcagggtcaggcgacgccggagacgcgcgagctgatggagcatgagcttagcgatgtgacgctcttcatttccacggtgatagggaagacgacgctgacgatgagagacctgctgcagctgcagcgcggcgatgtgatatgtttggataagcggcacgacagcgacctattggttcagataggcggtaagactaagcttgccgggcgtgccgggctcataggacgtaagaaagcggtgaagatcaccagtattattgaaaaggaggtgcctggttgtgagtga

SEQ ID NO: 68208 - protein, 336 aa, Unknown
  Obtained from environmental sample
  DOMAIN (255)...(331): Surface presentation of antigens (SPOA) protein
  misc_feature (1)..(336): Xaa is any amino acid
MSDILSQEEVDALLNAVSSGDLADQSFDEVKADAPIEDEIPLSLYDFKRPDRVSKDQMRTLQNLHEGYARQFSTTLTNFLRTFIETELVSVDQLTYSEFVMSISNPSCIYVFRMEPLEGLAIIEINPSLVFYIIDRLFGGQGRPFEGNRELTMIEQNVINRIVQRGLGDLCTVWEHIGSFTSKIEAYETNPQFVQIAPPSETVILISLEVRMQNASGLMSLCFPYMVLESVINNLTVENWMSLQGQATPETRELMEHELSDVTLFISTVIGKTTLTMRDLLQLQRGDVICLDKRHDSDLLVQIGGKTKLAGRAGLIGRKKAVKITSIIEKEVPGCE

SEQ ID NO: 68209 - DNA, 840 bp, Unknown
  Obtained from environmental sample
  misc_feature (1)..(840): n is a, c, g, or t
ttgaaaaggaggtgcctggttgtgagtgattatctatcccaggacgaaattgacagtctgctgaacggtttgggcgacgcggagggcggcgcgtcggacgaacgctacaaagccataggcccgatattcgagcttttttgcaagcaggcctcgtctgtgctggggaccgccgcggccaggtcggtggacgtcgtctccgagttttgcggcaaggcggacttaaacgccgccaagggaaaattgccggggaatttgcttgccctgacgctctcgctggtctccggtttagagggcgacatgtacctgattatagacaagaaggtcgtagggatattgacggatcttatgatgatgggcgacggttcggcgccctactcggacgactctaaagacgcggcgtcggagctgtttaaccaagtgatgggcgcgtacagtaccgcgctgggcggggatctgggcgagtccgtctccgccggaaatgtcgtcgtgtccgagttcaacttcgcgagcccgccgtttgacccgaccaccgcggacatgggtatcgctaagttcaccgtcgccggtttagtcaacggctacatagtggtggtgataccgaacgccttcggcgacaatatagtcgcgacgaaagtgtcaaagtcctccccagcgatggcggacctgaacgtcggcataagccagagcgagatggacgcgctgacgaacatgtcgatgtcgaacttcgacagcggcggcggcggctcgttcggcgcgcagcagttcgtccccccgcccccgccgcccagacagagcacatacgacggcccgcgggaaaatatcgacatgctgtggacgtag

SEQ ID NO: 68210 - protein, 279 aa, Unknown
  Obtained from environmental sample
  misc_feature (1)..(279): Xaa is any amino acid
MKRRCLVVSDYLSQDEIDSLLNGLGDAEGGASDERYKAIGPIFELFCKQASSVLGTAAARSVDVVSEFCGKADLNAAKGKLPGNLLALTLSLVSGLEGDMYLIIDKKVVGILTDLMMMGDGSAPYSDDSKDAASELFNQVMGAYSTALGGDLGESVSAGNVVVSEFNFASPPFDPTTADMGIAKFTVAGLVNGYIVVVIPNAFGDNIVATKVSKSSPAMADLNVGISQSEMDALTNMSMSNFDSGGGGSFGAQQFVPPPPPPRQSTYDGPRENIDMLWT

SEQ ID NO: 68211 - DNA, 1107 bp, Unknown
  Obtained from environmental sample
  misc_feature (1)..(1107): n is a, c, g, or t
atggcaggcgaccctattgtaattaagccaaaaactcaggacgctcttttttcttccggtacccgcatcagggattttaccattgaattctggctttatccccttaaccttgaaaacggcgagcatatactttcatgggccgcttccgaacttgtaaacaagaattattcaattcagcgtattatttgcagttcttccaaaaaccgcctccaatggtcttttgataacttttttatgtccccgaaaaattcattgcctatgaaaattgaattttcaggcgacacttatttggttccaaaaaaatggagccaccaccttgtccgttttgactcgacaaccggaatgattgaatacattgtagacggcaacagcgagaccatcgtgtacgcgacagctacggggcgcgaaaacagcgaggtatttacgccggttgtcggaacagcgggaatttttattcttggcgggcgttataagggaatgatggatgaatttaaaatccacggcgtttgcgccggacgctcttccgttcagaaatacgcgaccgccggcggcagggccgagacgacgcacattgatttgggcgacataaacagcgccgtactcagggttgaagttacgggcggaaggacaagccttaaagggacaaagattaacaatgaattccgcgaaaacggaaggttccgcttttccgatgattccgaaatgtgtttttttatccgctccggagaaaatccctggcgtttgaacgagaaaaaatggacggcttttattcccggcgctaatctaaaggaaacaatcagaggccgttatgtgcaaatagcggttgatttttatccttcaggcgacggggagacaactccctatcttgacgaggtgcgtattgtttatcagccgaacgagccgcccctgcctccgactaattttaccgccgtggcagttgacggcggagtaatgctgcgctggaaaaaaagcccggacgcttcagccgccggttatttgatctattacagcgctgtccgcggagaacttttcggcaatgacgcggcgttggggccttctcccatagacgcgggtaatgtaacaagcattttaattaccgggctttaa

SEQ ID NO: 68212 - protein, 368 aa, Unknown
  Obtained from environmental sample
  misc_feature (1)..(368): Xaa is any amino acid
MAGDPIVIKPKTQDALFSSGTRIRDFTIEFWLYPLNLENGEHILSWAASELVNKNYSIQRIICSSSKNRLQWSFDNFFMSPKNSLPMKIEFSGDTYLVPKKWSHHLVRFDSTTGMIEYIVDGNSETIVYATATGRENSEVFTPVVGTAGIFILGGRYKGMMDEFKIHGVCAGRSSVQKYATAGGRAETTHIDLGDINSAVLRVEVTGGRTSLKGTKINNEFRENGRFRFSDDSEMCFFIRSGENPWRLNEKKWTAFIPGANLKETIRGRYVQIAVDFYPSGDGETTPYLDEVRIVYQPNEPPLPPTNFTAVAVDGGVMLRWKKSPDASAAGYLIYYSAVRGELFGNDAALGPSPIDAGNVTSILITGL

SEQ ID NO: 68213 - DNA, 1986 bp, Unknown
  Obtained from environmental sample
  misc_feature (1)..(1986): n is a, c, g, or t
ttgatccttttttcatggttttcctctattttatcggcaaaaattgatatgaatattcagacaaattcggaaaatatacaggaaaagctgaaatctcaagtctcggacgcctcgacagagcccggagtctacattatgaagaacgattccggggaaattatctacataggcaaggcaaaatccctgaaaaaccgcctaaaatcatatttttcgggcgaaaaggacatcaaaacctctaccttaatgcgcaatgtccgcaatatcgagactattatcgtcccaagtgaattcgaggcttttcttctggagaacacccttatcaaacaacattcgcctaaatacaacatagacttaaaagacggaaaaacatatcccgttgtacgcattacaaatgaggaatacccaagggttttccgcaccagaaggataattaaggataacagcctttatttcgggccttttccgaattcgcaaagcatagccgtaatgctggaaattgtcgacaagctttttcctttgcgaaagtgcaaaaaaatgaaaaaagacgggccgtgcatgtactatcatattaaacgctgcatggcgccctgctgtaaaaagatcaatgtcgaggattaccgcctaaatgtgcaaaagattcaggaattgctgtccggtaaaattgattcgcttataatcgatcttacggcaaaaatgcacgaggcggcgaaggcgcttcaatttgaacaggcggcgaagatacggaattcgattagaactatcgaaaatattacgggagaggacagcgcggtagaggatttaaacccggaggacagggattatatcgcgtgggcaagcgagggagtgctcgcgacgtttacggttttttcaatgcggggcggaaaaatgacgggaagggatcttttccgcgcacgctccgcggcggatgagtgggagtctttggaaatttttattactacttattatgatagtacgcggcctcctccggttaaaatatttatccaaaaagacttcacacaaagatcacaaaggaacacatcgtaccttcggtacgcgatcacaaaggaagagggagagagagaagaaaacgaagagagagatgagaataattttgagaaaggggaattaattaggaattggtttagggagaaatttgggtacgagcctgaattgttattgggcgaagaaaagcaccatggcgcgattcttgctatggcgcggcagaacgcggcggaagatttgcgcaagcgattgaaagagagaggggcggggcccgccttggatgaattgctgagagtgttaaacctgcaaacaaaaccggaacggattgaagggtttgatatttctcatcttgacgggaaacatcctgtcgcttcgcttatttcttttaagaacggggttccggatcgcaaaaattacagatattttaagctgcgaacggttgtcggaatagtagacgactttgccgccatgcgcgaagcggtacagaggcgttattcacgccttttgcgcgaagaaaaagaaatgcccaatttaatacttgtagacggcggtattgggcaggtaaacgcggcgaaaaccgtgttagacgaaatgggaattaactgcgatattgccggtcttgccaagcgcgaagaggaattgtggctgcccggcgcgaaagagcctgttgtgctttcaaagcagtctgaagcgctgaaagttctacaatttgtccgcgacgagtgccaccgttttgcaacggggcttaacaagaagcttcgttcaaaggatttattttttccggtgctggaatcagtggaaggaatcgggccaaagcgcgcggcggcaattatgcgctcttatgaaacgctggaaaacatagctgcggcgtctctcgcggaaatggccgagcactgcaagataagcgaagacgccgccagagcggtccgcgccgtggcgaaactcgcgcttgaggagaagaatacgccgcgaaaacgggggtga

SEQ ID NO: 68214 - protein, 661 aa, Unknown
  Obtained from environmental sample
  DOMAIN (222)...(257): UvrB/uvrC motif
  misc_feature (1)..(661): Xaa is any amino acid
MILFSWFSSILSAKIDMNIQTNSENIQEKLKSQVSDASTEPGVYIMKNDSGEIIYIGKAKSLKNRLKSYFSGEKDIKTSTLMRNVRNIETIIVPSEFEAFLLENTLIKQHSPKYNIDLKDGKTYPVVRITNEEYPRVFRTRRIIKDNSLYFGPFPNSQSIAVMLEIVDKLFPLRKCKKMKKDGPCMYYHIKRCMAPCCKKINVEDYRLNVQKIQELLSGKIDSLIIDLTAKMHEAAKALQFEQAAKIRNSIRTIENITGEDSAVEDLNPEDRDYIAWASEGVLATFTVFSMRGGKMTGRDLFRARSAADEWESLEIFITTYYDSTRPPPVKIFIQKDFTQRSQRNTSYLRYAITKEEGEREENEERDENNFEKGELIRNWFREKFGYEPELLLGEEKHHGAILAMARQNAAEDLRKRLKERGAGPALDELLRVLNLQTKPERIEGFDISHLDGKHPVASLISFKNGVPDRKNYRYFKLRTVVGIVDDFAAMREAVQRRYSRLLREEKEMPNLILVDGGIGQVNAAKTVLDEMGINCDIAGLAKREEELWLPGAKEPVVLSKQSEALKVLQFVRDECHRFATGLNKKLRSKDLFFPVLESVEGIGPKRAAAIMRSYETLENIAAASLAEMAEHCKISEDAARAVRAVAKLALEEKNTPRKRG

SEQ ID NO: 68215 - DNA, 645 bp, Unknown
  Obtained from environmental sample
  misc_feature (1)..(645): n is a, c, g, or t
atgtacttccatgatttgggaagagtgttgttcatggcaaagcgttattcagaagccagagacagttttcagtcggcgacaaaaattaatccccgctttgaaccgtcgtggtacaatcttggcggtacgttacgcgcattaaaccgcactgacgacgcgcttgccgcgtacaggcaggctgttgagataaaggccgattattccgccgctcaccgcgagataggcaggcttctcctgacaaagggagatactcagggcgcgattaaatcatttacaagcgcgttacagtacaatcccaatgatgttaatacaatgtgcgaattgggcgccgcgtacagtcaggccaataattatgcggaagcggaaaatatttttactaaggcattaaaaataaacgcggcggatccccagacaaattacaatatggctgtagtcaaactggaacttaaaaaaaatactgaagcgcttaatttcgccaagttagctgtagacgcgagtccttccaacgctgtttatatttacactttgggacttgcgtgtgaagctatgggcgctactgagcaggccgttgcctcgtataaaaagccgcgtctatggacgcnaaatatctgcgccccagaaataatcttggcagtatatatctag

SEQ ID NO: 68216 - protein, 214 aa, Unknown
  Obtained from environmental sample
  DOMAIN (68)...(101): Tetratricopeptide repeat
  misc_feature (1)..(214): Xaa is any amino acid
MYFHDLGRVLFMAKRYSEARDSFQSATKINPRFEPSWYNLGGTLRALNRTDDALAAYRQAVEIKADYSAAHREIGRLLLTKGDTQGAIKSFTSALQYNPNDVNTMCELGAAYSQANNYAEAENIFTKALKINAADPQTNYNMAVVKLELKKNTEALNFAKLAVDASPSNAVYIYTLGLACEAMGATEQAVASYKKPRLWTXNICAPEIILAVYI

SEQ ID NO: 68217 - DNA, 465 bp, Unknown
  Obtained from environmental sample
  misc_feature (1)..(465): n is a, c, g, or t
atggacgcnaaatatctgcgccccagaaataatcttggcagtatatatctagcttccggaaaatacaacgaagctattcattatttgaatgaagcgtataaggttgaaccttccaactttgaggttaacaacaatttaggcgccgtgtacgcaaagcaggaaaactggacatacagtattattcattacgagcgcgcgctgaacacaaagcaaaacgatcctaccgtgctttttaaccttgcccgcgcttacgccggggcaaatgagcttgaaaaagcgacaaagacataccaatcattgcttcacttggtccccgacaactgggacgccatgtatgagcttggaatagcctgcgtgtctctgggaaagagcacggacgcgaaacgttacttgagtgatcttatcagccgtaatcccaattattcgggaaaagcggaagcggaaaggatattaaaaactttatga

SEQ ID NO: 68218 - protein, 154 aa, Unknown
  Obtained from environmental sample
  DOMAIN (6)...(39): Tetratricopeptide repeat
  misc_feature (1)..(154): Xaa is any amino acid
MDAKYLRPRNNLGSIYLASGKYNEAIHYLNEAYKVEPSNFEVNNNLGAVYAKQENWTYSIIHYERALNTKQNDPTVLFNLARAYAGANELEKATKTYQSLLHLVPDNWDAMYELGIACVSLGKSTDAKRYLSDLISRNPNYSGKAEAERILKTL

SEQ ID NO: 68219 - DNA, 1362 bp, Unknown
  Obtained from environmental sample
  misc_feature (1)..(1362): n is a, c, g, or t
atgttatttacgccgtttgaaattaaagaaactgttgatatgtttatgcggtataaattggacatacgcgcaataacattgggtatttctttgcttgattgtatttgttcaaccggtgaggctacccggaataaaatacgcgaaaaaatcttgcgtaccgctggttctcttgtaaaaacgggttgtgatattgagactgagtacggtattccgattattaataagcgcgtctccgtaactcctatcgctcttgtggcggcttcctgtgaggaagaggattttactccgtttgccaaaactcttgattctgccgcgaaagagttgggcgttgattttataggcgggttttccgctcttgttcaaaaaggtttaactacgggagataagaggctgattaactctttgcctgccgcgctttcgcaaactgacagggtgtgcgcttccgttaatgccgcgtcaagcaagagcgggattaacatggacgcggtaaggctgatgggggagataattaagaaaaccgccgaagctacggcggacagggacggaataggctgcgctaaactggtggttttttgcaacgctcctgaggataatccctttatggcgggcgcgtttcacgggccgggggaggccgagagcgttcttaatgtgggagtttcgggaccgggcgtaataaaggcggctttggaaaactgcagaggaaagaattttgacgaattggcggatactattaaaaagacggcgtttaaaattacgcgcatgggacagcttgtgggaatggaggcggctaagaggataggggttccgttcggcattttggatctgtctttagcgccgactccggctgtgggggattccgtggcgcgcatcttagaggagatggggcttgaagccgccggaacccacgggacgacggcggcgcttgcgatgttaaccgacatggtaaaaaagggcggtattatggcatcgacccatgtcggcggcttttccggcgcttttattcccgtctccgaggacgaaggaatggtagcggctgtaaaaagcggctcaatctcccttgataaactggaggctatgacctgcgtctgctccgtcgggctggacatgattcccctccccggagacacgtcggcggcaacaatcgccgcaatcatcgccgatgagatggctataggcatggtgaacaacaagacaaccgctgtgcgcgtaattcccgtacccggcaaaaaagcgggcgagtgggcggaattcggcggtcttttgggcggttctccgataatggcggttaacagcgctaagagcgacgcgtttgtaaaccgaggcgggcgtattccggcgccggtgcatagttttaggaattaa

SEQ ID NO: 68220 - protein, 453 aa, Unknown
  Obtained from environmental sample
  DOMAIN (1)...(453): Uncharacterized ACR (DUF711)
  misc_feature (1)..(453): Xaa is any amino acid
MLFTPFEIKETVDMFMRYKLDIRAITLGISLLDCICSTGEATRNKIREKILRTAGSLVKTGCDIETEYGIPIINKRVSVTPIALVAASCEEEDFTPFAKTLDSAAKELGVDFIGGFSALVQKGLTTGDKRLINSLPAALSQTDRVCASVNAASSKSGINMDAVRLMGEIIKKTAEATADRDGIGCAKLVVFCNAPEDNPFMAGAFHGPGEAESVLNVGVSGPGVIKAALENCRGKNFDELADTIKKTAFKITRMGQLVGMEAAKRIGVPFGILDLSLAPTPAVGDSVARILEEMGLEAAGTHGTTAALAMLTDMVKKGGIMASTHVGGFSGAFIPVSEDEGMVAAVKSGSISLDKLEAMTCVCSVGLDMIPLPGDTSAATIAAIIADEMAIGMVNNKTTAVRVIPVPGKKAGEWAEFGGLLGGSPIMAVNSAKSDAFVNRGGRIPAPVHSFRN

SEQ ID NO: 68221 - DNA, 612 bp, Unknown
  Obtained from environmental sample
  misc_feature (1)..(612): n is a, c, g, or t
ttgccgggtacgggaattacgcgcacagcggttgtcttgttgttcaccatgcctatagccatctcatcggcgatgattgcggcgattgttgccgccgacgtgtctccggggaggggaatcatgtccagcccgacggagcagacgcaggtcatagcctccagtttatcaagggagattgagccgctttttacagccgctaccattccttcgtcctcggagacgggaataaaagcgccggaaaagccgccgacatgggtcgatgccataataccgcccttttttaccatgtcggttaacatcgcaagcgccgccgtcgtcccgtgggttccggcggcttcaagccccatctcctctaagatgcgcgccacggaatcccccacagccggagtcggcgctaaagacagatccaaaatgccgaacggaacccctatcctcttagccgcctccattcccacaagctgtcccatgcgcgtaattttaaacgccgtctttttaatagtatccgccaattcgtcaaaattctttcctctgcagttttccaaagccgcctttattacgcccggtcccgaaactcccacattaagaacgctctcggcctcccccggcccgtga

SEQ ID NO: 68222 - protein, 203 aa, Unknown
  Obtained from environmental sample
  SIGNAL (1)...(24)
  misc_feature (1)..(203): Xaa is any amino acid
MPGTGITRTAVVLLFTMPIAISSAMIAAIVAADVSPGRGIMSSPTEQTQVIASSLSREIEPLFTAATIPSSSETGIKAPEKPPTWVDAIIPPFFTMSVNIASAAVVPWVPAASSPISSKMRATESPTAGVGAKDRSKMPNGTPILLAASIPTSCPMRVILNAVFLIVSANSSKFFPLQFSKAAFITPGPETPTLRTLSASPGP

SEQ ID NO: 68223 - DNA, 468 bp, Unknown
  Obtained from environmental sample
  misc_feature (1)..(468): n is a, c, g, or t
ttgaaagctgtagtacagagagttattgacgcgtccgtcagcgttgacggggtggtgaaggggagcgttggcagggggctgcttgtttacttaggcgttgcgcataatgacactgaatccgacgcggattggctttctgagaaaattgcgtatcttaggatttttaacgatgaggacgggaagatgaatctttcccttaaagatatagccgcaaatgataataaggcggggcttttggctgtttcgcagtttactttgttggcggacgcgcggaaggggagacggccgtcgtggaacggagcggcggcgcctgaaaaggcgaaacagctttatgagtatttcatcggcgcggtaaggaagacggggcttgtatgcgagtgcggggaatttcaggcgcacatgatggttaagtatattaatgacgggcctgttactattgttttggatactgaagaattatcaaagtaa

SEQ ID NO: 68224 - protein, 155 aa, Unknown
  Obtained from environmental sample
  DOMAIN (28)...(150): D-Tyr-tRNA(Tyr) deacylase
  misc_feature (1)..(155): Xaa is any amino acid
MKAVVQRVIDASVSVDGVVKGSVGRGLLVYLGVAHNDTESDADWLSEKIAYLRIFNDEDGKMNLSLKDIAANDNKAGLLAVSQFTLLADARKGRRPSWNGAAAPEKAKQLYEYFIGAVRKTGLVCECGEFQAHMMVKYINDGPVTIVLDTEELSK

SEQ ID NO: 68225 - DNA, 387 bp, Unknown
  Obtained from environmental sample
  misc_feature (1)..(387): n is a, c, g, or t
atgaacgaaaaagacaaagacaggctttgctttaataaaaaaacattctcagacggtaatgtttacgaaggcaatttcaaagacgacaaaccgcacggcaaaggtaaaatgatctacacagacggcagagtctacgaaggcgattttgttgacggaaaacgctgcggcaaaggcaaacttaaatggccggacggcaatgtatatgaaggtgattgggctaatgacaatctaaacggcaaaggcaaacatacatggtcagacggtgtagtatacgaaggcgattttgttgaaggcaaaagacacggtaagagaaaaacgacttgccctgacggtaaagttgaagaaggagactgggaagacgatatattgattaaaattttactttga

SEQ ID NO: 68226 - protein, 128 aa, Unknown
  Obtained from environmental sample
  DOMAIN (91)...(113): MORN repeat
  misc_feature (1)..(128): Xaa is any amino acid
MNEKDKDRLCFNKKTFSDGNVYEGNFKDDKPHGKGKMIYTDGRVYEGDFVDGKRCGKGKLKWPDGNVYEGDWANDNLNGKGKHTWSDGVVYEGDFVEGKRHGKRKTTCPDGKVEEGDWEDDILIKILL

SEQ ID NO: 68227 - DNA, 339 bp, Unknown
  Obtained from environmental sample
  misc_feature (1)..(339): n is a, c, g, or t
atggtgaagggcttatattatttgtatgataaaatattggaaaatttcgggaacttaaaatcattgcccgacaacataggtaaattaaagaatcttgcaaaactcactataaaatatacaggactagaaagattacccgatagtataggcaatttatattcattaaaagagttaacgctatacgagaagagcataacatcattacctgacactatatcaaattgttcatttctggaatatgttgatataagcaatacaagcattatcagctttaacgatgatatcaggaagacctgcctcgcggatttagatgaaattttagtccaaattatttattaa

SEQ ID NO: 68228 - protein, 112 aa, Unknown
  Obtained from environmental sample
  misc_feature (1)..(112): Xaa is any amino acid
MVKGLYYLYDKILENFGNLKSLPDNIGKLKNLAKLTIKYTGLERLPDSIGNLYSLKELTLYEKSITSLPDTISNCSFLEYVDISNTSIISFNDDIRKTCLADLDEILVQIIY

SEQ ID NO: 68229 - DNA, 423 bp, Unknown
  Obtained from environmental sample
  misc_feature (1)..(423): n is a, c, g, or t
atgatgaaagtcgttgcttttaacggaagcccgcactacgacggcgtagtcgccaaaggaatttccataatccagcgagaattggaaaaatcagccaccgtctccgtcgagataatccacgtcggcagcaaacacatccgaggttgtatagattgccgcaaatgcggcgaaacccaccgttgcataatcgaagacggcgttgtaaacgaagccatcgacctattgcgctccgcggacggaatcatcctcggaagcccggtctactacggcgggatcgccggaacgttcaagagctttctcgaccgcctcttttgcgccggcccgaccatgcctttcaaagtcggcgcgaccgtcgtctccctcagacggtccggcggcatagccgcgttcagccagctcaacaactacctcggccgattctga

SEQ ID NO: 68230 - protein, 140 aa, Unknown
  Obtained from environmental sample
  misc_feature (1)..(140): Xaa is any amino acid
MMKVVAFNGSPHYDGVVAKGISIIQRELEKSATVSVEIIHVGSKHIRGCIDCRKCGETHRCIIEDGVVNEAIDLLRSADGIILGSPVYYGGIAGTFKSFLDRLFCAGPTMPFKVGATVVSLRRSGGIAAFSQLNNYLGRF

SEQ ID NO: 68231 - DNA, 1044 bp, Unknown
  Obtained from environmental sample
  misc_feature (1)..(1044): n is a, c, g, or t
gtggttgggcgatactttgaggataatggagcggataatatgcgtgcgttagttacgattcagcgggtaaaaaagataagccccataccggattcggatttccttgagaccgcgcacgtcatgggctggcagtgcgtcgtcaaaaagggcgagtttcgggaaggggacttgggcgtctactttgaggtagacagcttcctcccggtggaggaacgctatgagtttttacggaaatcctcatacaaggagaatcccgacaacggcgagggtttcaggatccgcacggctaaaatgcggggtcagctctcccagggactgctgataccctactcggccttcaccgagcttcaaggttttggcgagggggacgacgttacggagaagcttcgggtcaagaagtggttcgtccccgaaacatccaccgccggcggagtggtcatcggcgagcgtccgcacggaataccgacctccgacgaaacacggatccagtcggcgccggaaatgcttgacgaattgaatggcaagccctactacataaccacaaagatggacggcacctccggtacggtctactacatagacggaaaaatcgggtgctgcagccggaacaaagaaatcaaagacgaaacaacctcgctctactggacgccaacctataaacacggccttaaggaaaaattggccgcgctggggaaggacatcgtactcaccggagagatatgcggcccgggcatccagaggaacaaactcaagttacaaaacgtcgagtggtatgtattcgacgcgatagacgtgaacaccggcaagtaccttccatatgatgcaatgtgcaagctttgcaacgacttaggcgtctccaccgtacccctggaagaacgtggagactgctttgcgtactcattggaaacgctcctcgaaaaagccaaaggcaagtatccgagcgggcaagagaaagaaggcatcgtcgtacgggacgtaaacagccctaaggcggtgtcatttaaagttttaaacaacgacgccttgctcaaagaaaaggattaa

SEQ ID NO: 68232 - protein, 347 aa, Unknown
  Obtained from environmental sample
  DOMAIN (160)...(335): ATP dependent DNA ligase domain
  misc_feature (1)..(347): Xaa is any amino acid
MVGRYFEDNGADNMRALVTIQRVKKISPIPDSDFLETAHVMGWQCVVKKGEFREGDLGVYFEVDSFLPVEERYEFLRKSSYKENPDNGEGFRIRTAKMRGQLSQGLLIPYSAFTELQGFGEGDDVTEKLRVKKWFVPETSTAGGVVIGERPHGIPTSDETRIQSAPEMLDELNGKPYYITTKMDGTSGTVYYIDGKIGCCSRNKEIKDETTSLYWTPTYKHGLKEKLAALGKDIVLTGEICGPGIQRNKLKLQNVEWYVFDAIDVNTGKYLPYDAMCKLCNDLGVSTVPLEERGDCFAYSLETLLEKAKGKYPSGQEKEGIVVRDVNSPKAVSFKVLNNDALLKEKD

SEQ ID NO: 68233 - DNA, 2400 bp, Unknown
  Obtained from environmental sample
  misc_feature (1)..(2400): n is a, c, g, or t
ttgatggccgagaaagcgacttttgacggcggcacggatttttcaagaattaacttagacgctatcgccggaaacgaaatcctgtttttctccgatggaatttcaacgctcagcgacgccgattttataagaaacgccgccgtaaagcatcctatacactgcattgtatcttccgcgaaagccgattacagcgcgatgaaactgattgccggcaaaacaaagggtaagtttgtgaatatcaacgcgctgtcagccgaaaacttgaagaacgaattgttgaacgaaacgctgcaatttttgggagcggagcgcggggaggcgttgcgcgaggtatatccgagcctcgcaacccctgttcagggcaacttttcattagccggtatctccgaagcggataacgccgagattactttgcttttcggtttcggcaataaggttgaaaaacgcttcaaagtaaaattggaggcgaaaaaagccgacaaacaaggaaacgtgtacaggctttgggcgcaaaagaagatcgccgagcttgatttaaattacgaaacaaaccgcgacgagcttacggaactcgggcaacaattcggcattatcacgcgaaacacatcgctcattgtgcttgaaacgctcgacgactacatccgctacaatatcacgccgcccgccgaactgcacgatgaatacagccgttggcagaaaggacgccaagagcaacagcgtacctcggagcgcaatatgatcaaaaacgcgctgtcggcggttgaaaagatcagaaattggtggaataccgatttcacgcctaagaagcctaaatatccgacgccggacagcgaagccggtaccccgcgcggaggcgacatgggtcaggcggcctctcccgccacggctcccgccgcgagaaccgaacaacgcgcttctgagaggaatgaacgagcaactcagaagaacgtgcgagcgtcagaaagaagcgaacacgccgtacagatgcaacctaagaagcgcgatacgaaaatttacgccaacgagatacgcgaagcttacgaggcgcccatcgccaccgtagggccggacgacatccttactatcctagaaaccaaaagatactactatagggtgcgcacatacaatggcacagatggctacgtccaaaagaacgaactaacgaaggtaaacgcgaagagcgccggctccaagtcaatggcgtttgaggcggcggaggtaatgggctatttggacaatcccacgccggtttacatcgtagatatcgacgaccccaacgccgaccctataacgctgggaggcggcttctccggtggcaggcatcggtcaagcggcggctcgagcagcaggagcgggtcgtcaagtagcgcatcaagtagcgccccgagccccggtaaagcttacgaaaacgcgagcgcggacggcggttccacgtcgtccgccgccggcacggctaagaggagggaagaaactccgccggcgccgaccattaccgtcaagtctattcggaaggataacgactatttgaaaaatctaaccggaaatgccgcggaagattataaaatatacctaaaactaagaaatgattacaccgcttcgccgacattctattttgatatggcggattggttctatacgcacaacgataagaaaatcgcgcttcgcgtactcacgtctattgccgatttggacctcgaaaacgcgttgctttaccggttgctcggctataggctgaaagagtacggcgaatacgcgattgaggcgttcgtttgccgaaaggtggttcagtggcgcccgatggagccgcagagctttcgcgactacgccttagcccttgccgacaacggaaatccgcagacggcgctcgactcgctcaacagcttgctgacgaagcctttctcggataatgccaattggcgcggccgcgggatagaggagattgtggtcacggagataaatcatcttatcgccaaaaacgcaaatctgaacacatcaaaaatcgatacgagcgtaataacaaacattcccgttgatatccgcgtggttataaactggaatatgaacaacacggacattgacttgcacgtggtggacccgaacaacgaagagtgttattacagccaccgcgcaacgaggataggcgggcgtataagcggagacgtcacaagcggttacggtccggaacaattcatcttgaaaagcgccgtaaagggaaaatatcgggtttttgtcaattattacagcgatacccaagtcaccttggccggaccatcgaccgttatggtggaaattttcacaaagtacgccgacaaaaccgaacaacgtagggtcgtctgtttgcaaatgtcgagtgtaaagaaaaagggcggtaacgtggaggtggccgagttcgagttttga

SEQ ID NO: 68234 - protein, 799 aa, Unknown
  Obtained from environmental sample
  misc_feature (1)..(799): Xaa is any amino acid
MMAEKATFDGGTDFSRINLDAIAGNEILFFSDGISTLSDADFIRNAAVKHPIHCIVSSAKADYSAMKLIAGKTKGKFVNINALSAENLKNELLNETLQFLGAERGEALREVYPSLATPVQGNFSLAGISEADNAEITLLFGFGNKVEKRFKVKLEAKKADKQGNVYRLWAQKKIAELDLNYETNRDELTELGQQFGIITRNTSLIVLETLDDYIRYNITPPAELHDEYSRWQKGRQEQQRTSERNMIKNALSAVEKIRNWWNTDFTPKKPKYPTPDSEAGTPRGGDMGQAASPATAPAARTEQRASERNERATQKNVRASERSEHAVQMQPKKRDTKIYANEIREAYEAPIATVGPDDILTILETKRYYYRVRTYNGTDGYVQKNELTKVNAKSAGSKSMAFEAAEVMGYLDNPTPVYIVDIDDPNADPITLGGGFSGGRHRSSGGSSSRSGSSSSASSSAPSPGKAYENASADGGSTSSAAGTAKRREETPPAPTITVKSIRKDNDYLKNLTGNAAEDYKIYLKLRNDYTASPTFYFDMADWFYTHNDKKIALRVLTSIADLDLENALLYRLLGYRLKEYGEYAIEAFVCRKVVQWRPMEPQSFRDYALALADNGNPQTALDSLNSLLTKPFSDNANWRGRGIEEIVVTEINHLIAKNANLNTSKIDTSVITNIPVDIRVVINWNMNNTDIDLHVVDPNNEECYYSHRATRIGGRISGDVTSGYGPEQFILKSAVKGKYRVFVNYYSDTQVTLAGPSTVMVEIFTKYADKTEQRRVVCLQMSSVKKKGGNVEVAEFEF

SEQ ID NO: 68235 - DNA, 1338 bp, Unknown
  Obtained from environmental sample
  misc_feature (1)..(1338): n is a, c, g, or t
ttgttaggtgaaaaccaatacaacaattccgcgcttccccacattatgcttcctcagggagcggggtccctcaatgtgctttggccttcttcaggccctcttactatagtgtcttcgcttaaaaaagaacttactgtctggcgttttgaaattacgggaaaaaccgtaaggactttaacgccctcaagtatccccctgtcttcaaacggcgccctgtctccggacgggacaaaggcggttttctggggggacaagggattagagctttgggactattcgagctggcggcttgttcaaaaaataagcgataacaaaacgctctcctgcgtgtggctgaacaacagggaatttattacaggaaactcaaggtttatagaagcggttaatacaagcagcgcggagtttacgcgcagaaggatctgtctttcgggcgcggatgaattcggctttgaggaaaacggcagaaaccagcggatattcgccagaaccggaagcgaatggttcgcgaacacgggaaggggcgcgtggacgcccgccccggagcctgtaatgcgcaatgtctcgctttcttccgaccgcttcagaattttcctggaaccccaggccgcggggccgtttacaaatatccctatgatacgcaataccctctccgtcggcactacgtctcttgtgtcgggttatacagccagcggcgcttacaaacagggacgcaatatacgcgtcgccgtctgctttgacctttacgacgatgaaaccggtttgtcccaagtgcttaatgccctgtgccgttttaacataaaagccactttctttatgaacggcgattttatccgcagaagcccgaacgcggcggctgcaattatcgcggccggtcatgaagcagcttccctcttttacgcgcctattgatctttcggatgcccgttacacggtaacgccgcagtttatcgcgcgtgggcttgcgcgtaacgaagatgaattcttccgcgctactggaaaagaactttccatgctttggcatccgccgttttaccgaggctccggcatgataaacgccgccgcagccgccgcgggatacgctaccgccgtaagggatattgatcacagtgattggctctctagggatgaagcgttaaggttgggtattcgccagctttcttcttcgcaattaattgaacaaataactgataaaagaaaaaacggctctataattccggtaaggcttggaataaaccctggaggcagggacgattatctttatcagcgaattgacgtactgcttgacgcgcttatccgttcgggctgtgatattgttccggtttctgcaatcatcaggtaa

SEQ ID NO: 68236 - protein, 445 aa, Unknown
  Obtained from environmental sample
  DOMAIN (234)...(362): Polysaccharide deacetylase
  misc_feature (1)..(445): Xaa is any amino acid
MLGENQYNNSALPHIMLPQGAGSLNVLWPSSGPLTIVSSLKKELTVWRFEITGKTVRTLTPSSIPLSSNGALSPDGTKAVFWGDKGLELWDYSSWRLVQKISDNKTLSCVWLNNREFITGNSRFIEAVNTSSAEFTRRRICLSGADEFGFEENGRNQRIFARTGSEWFANTGRGAWTPAPEPVMRNVSLSSDRFRIFLEPQAAGPFTNIPMIRNTLSVGTTSLVSGYTASGAYKQGRNIRVAVCFDLYDDETGLSQVLNALCRFNIKATFFMNGDFIRRSPNAAAAIIAAGHEAASLFYAPIDLSDARYTVTPQFIARGLARNEDEFFRATGKELSMLWHPPFYRGSGMINAAAAAAGYATAVRDIDHSDWLSRDEALRLGIRQLSSSQLIEQITDKRKNGSIIPVRLGINPGGRDDYLYQRIDVLLDALIRSGCDIVPVSAIIR

SEQ ID NO: 68237 - DNA, 1221 bp, Unknown
  Obtained from environmental sample
  misc_feature (1)..(1221): n is a, c, g, or t
atgcgtaatacagaaataaaaaaaacatccggctctctttactcgctaatagacaggacctttcccatgccagggcgttttcattccgccctgccatctcaggttgcagagctttcccgtttgcttacaggagccaggggggatcgttctctttcttatttaagccgcccgaatttcctttccgcctacctgcgttattttttaccttggaacattatccgtctttgccgccttctgccctctcttaacattccttttcgcgccggaaatgtaatcttagatctaggcagcggtccacttacctttgtttcggcgctttggatctcccgacccgatctgcgctccattccgcttgaattctactgcatagaccactgcgccccagctcttaccgctggaaggaaattctttgccgccgtcagcgccgcagaagactgcgcatggaaggtgaacacgatacgggataaaataaactttaaaacaaaaacggctcttgcgcgtaaaaaagccgcccttgtctgcgccgtaaatttatttaacgaagtatacgaaaatttgcctcatactcacagcgaggctcttgggcgcacggcatctgacatcgcgctgttaatgcataatcaggcaaagcctgaggcttgtatactgacggtggagccgggagtgcctcaatcggggcattttatcagtcttttgcgctccgcttttttggaactgaaccgcccgcctttgtcgccctgtacgcattcggaagcgtgccccatgccgggcggtaaaaccacctgcggcaagtccgccaataaaaaaggacgctggtgtcactttgcctttgccacgacggacgctccgaaagagcttcaccgtctttccgccgcagccggtattcccaaagagcggcttgtgttaagttatttactggcaggcgctcaaaaacaggagcaaacagcggcgcaaaagcaaacacagaaagcggaaaaagtacgggtaatctccgacgcgtttgcgcttccaaataacaagtttggcagatacggctgctgctctgacggccttgttcttctgacaggtgacaagctccgcatagaaaaaattgcttcgggagatttgatttcttccggcacaacaagtgttgccaacagcgccgctaacagcgatgctaacagcgccgccgcaggcgaccgcgactcaaaaagcggcgctttgataatggagataaaatga

SEQ ID NO: 68238 - protein, 406 aa, Unknown
  Obtained from environmental sample
  misc_feature (1)..(406): Xaa is any amino acid
MRNTEIKKTSGSLYSLIDRTFPMPGRFHSALPSQVAELSRLLTGARGDRSLSYLSRPNFLSAYLRYFLPWNIIRLCRLLPSLNIPFRAGNVILDLGSGPLTFVSALWISRPDLRSIPLEFYCIDHCAPALTAGRKFFAAVSAAEDCAWKVNTIRDKINFKTKTALARKKAALVCAVNLFNEVYENLPHTHSEALGRTASDIALLMHNQAKPEACILTVEPGVPQSGHFISLLRSAFLELNRPPLSPCTHSEACPMPGGKTTCGKSANKKGRWCHFAFATTDAPKELHRLSAAAGIPKERLVLSYLLAGAQKQEQTAAQKQTQKAEKVRVISDAFALPNNKFGRYGCCSDGLVLLTGDKLRIEKIASGDLISSGTTSVANSAANSDANSAAAGDRDSKSGALIMEIK

SEQ ID NO: 68239 - DNA, 894 bp, Unknown
  Obtained from environmental sample
  misc_feature (1)..(894): n is a, c, g, or t
atgaaaagaactaaacaattttccagcctgcacaaccatactattttatgcgatggcaaggacgatattgaaaccatgtgccgcgccgcttatgaaaaaaaactttgtgcgctggggttcagcgcccacgcaccaattacaaaaaaaacaggcattgaaagcgactggaacttaaaagacgataaatttaacgaatatgttgagcaggtacttgcggcaaaaaaacgctggcatagaaaactggaagtcttgcttggttttgaaattgattatatcaagggattgcgttcagctctggacaacgacataacggaagtgaatcctgattatttaatcggcagcgttcattatctaatcccggcaaacggcgcaaaaccgtttacggtagacggcccgcaggaagaattttctcatggacttaacgaaggttttggcggagacgcgcaggcgctgatgaatagttattacgacgcggttgcagaaatgattgcgctcggcggttttgaaattctcggtcacgcggaccttgtcaaaaaaaattgtttaggaaaaaatttatggccgcaggaaattgagaattgccgtcagagagaaattgcgcacgccgctgcgaaagcgggcgttattgcagaggcaaacacaggaggaatcaaccggaaaaaaataaacgagatttatccttctgaaacttttttaagatttttccgtgaatctaatgtacccgtaatcattacggcagacgctcattccgccgccgacattgccggaaattatgatattgcagtacaaactcttttatccgccggttnttcggatcatgtaattatcttccgaaaaaacggcaataaaataaaatatataaaagaaaaacttttaaatttccttgccgattaa

SEQ ID NO: 68240 - protein, 297 aa, Unknown
  Obtained from environmental sample
  DOMAIN (8)...(252): PHP domain
  misc_feature (1)..(297): Xaa is any amino acid
MKRTKQFSSLHNHTILCDGKDDIETMCRAAYEKKLCALGFSAHAPITKKTGIESDWNLKDDKFNEYVEQVLAAKKRWHRKLEVLLGFEIDYIKGLRSALDNDITEVNPDYLIGSVHYLIPANGAKPFTVDGPQEEFSHGLNEGFGGDAQALMNSYYDAVAEMIALGGFEILGHADLVKKNCLGKNLWPQEIENCRQREIAHAAAKAGVIAEANTGGINRKKINEIYPSETFLRFFRESNVPVIITADAHSAADIAGNYDIAVQTLLSAGXSDHVIIFRKNGNKIKYIKEKLLNFLAD

SEQ ID NO: 68241 - DNA, 1590 bp, Unknown
  Obtained from environmental sample
  misc_feature (1)..(1590): n is a, c, g, or t
atgattttaagtgtatttcttgaattttatatatgtttatataataattatagtatggcagaaaccgcacaggcacaggcacagccagctgctaattatattgatactctgcaacaagcccttgcttcccgaaaggactatatggaaagggaagaaatgggaaaacttaaggaagaactcaggaattttcactcctcttatgcttctttatacaatatttatttaaagaaaaaattaatagatgaagacccttacaagcaggaaacaaaaattaccgagttggaagtaccggattcaacgccgttcgtcgaagcaaaacggatagaacaactgtcaataaggctgtctaattatgataaccaacttgactttttagttaatttttaccaactgggcatagattttcttaatctcgaccggataaagcggattgtcggccttgtacgctatgtagactgggtaaacctgtcaactgacaaccagaatcttatgaccaaagcagttgcggaaatatcaatcagttcaaaggccggcgttgatgtaataacactcagtataatcggcgaaagcctttcaaggctgtctaagacaaccgcagcgtctatggctatattgaagaatttgaatatctactacagggaatgttataaactggatgtccgcaaaaaaataacacagaatatgtccgcaagcgacgctactcttgagaatataaagaaaaagatgccttcggcaatgccgggaatgccgttttataaagaattgattgatgaaattattaaggaagattattccaaaagcggccaggacatgagagatgtggtacttaactctctaaaagttcccggagcaaaacaaaaggcggtaaaagctcccgtaaatttcaagaacatcctgttggatggtattcaggtaatcggcggagcctcaacctcgctcaatgaaatcctgaataaacttgatgaaaatcaaaccataatggaaagctataaaaaaggcttaatgcatatgataaaggagcttatcaggcagattacaaacgccgaaccggaagaagttatctacactgtagaatatctggatcaaaccaaaggcacaacttcaaaagaaaagatatatttttatcagcttagggaagaattggaaaaaaagataaaattcttggccagtttaatgaaaggagcggcttatcagaaactgtccgcaatgacagaagaacagatcatcggctatctggaaaaaaatatcagtgaagtgcaaaattatcacaaagttctgggtgcgcttgatgattttttcaaaacaaaagtagaaactgaaaacagggataaaataaagggaataaaaccggaattgtcagcgttaaaaaactcttatgtaaaagccaaccagttacgctatgaatacagcgctcaaaaagaagaagaagagcaattaagacgactcggcgtcaaccccaccggagacgcgccgccgccgcccactaatgcaagtcctcccaatgcaaagccttctgacgcaaaaccttctaatgcaaagcctaataagccttccgatacaaagccttccggaaaggcaaaggtttcctga

SEQ ID NO: 68242 - protein, 529 aa, Unknown
  Obtained from environmental sample
  misc_feature (1)..(529): Xaa is any amino acid
MILSVFLEFYICLYNNYSMAETAQAQAQPAANYIDTLQQALASRKDYMEREEMGKLKEELRNFHSSYASLYNIYLKKKLIDEDPYKQETKITELEVPDSTPFVEAKRIEQLSIRLSNYDNQLDFLVNFYQLGIDFLNLDRIKRIVGLVRYVDWVNLSTDNQNLMTKAVAEISISSKAGVDVITLSIIGESLSRLSKTTAASMAILKNLNIYYRECYKLDVRKKITQNMSASDATLENIKKKMPSAMPGMPFYKELIDEIIKEDYSKSGQDMRDVVLNSLKVPGAKQKAVKAPVNFKNILLDGIQVIGGASTSLNEILNKLDENQTIMESYKKGLMHMIKELIRQITNAEPEEVIYTVEYLDQTKGTTSKEKIYFYQLREELEKKIKFLASLMKGAAYQKLSAMTEEQIIGYLEKNISEVQNYHKVLGALDDFFKTKVETENRDKIKGIKPELSALKNSYVKANQLRYEYSAQKEEEEQLRRLGVNPTGDAPPPPTNASPPNAKPSDAKPSNAKPNKPSDTKPSGKAKVS

SEQ ID NO: 68243 - DNA, 645 bp, Unknown
  Obtained from environmental sample
  misc_feature (1)..(645): n is a, c, g, or t
ttgtctatatataaaaaatcggctctggcgctgattatctcaagttttctttttgccggaatagtccttttaccggatattgaaccgctggaatatgtacggacacatttcttttttattcccgattcaatgaaatttatttttcatttttcaatattccttacattattctttattttgtttttaattctttattttaaaccctatcctgtaataactaaaaaaggttcagaaactctagttacagaaacggaatttcccgatgaaacagaagaatttgaagaaacttcattttttgaaattgaagagatagaagaagacgaagaaataacatatattgatgaaatcgaagaaatcaatgaagcggaagaaattgaagaagatgaagaaattaatacctacgcggaaattcaaccgtcaaaaggcctgttaaaagccgcaaatgaattccttgcaaaggaaaaaaaagaagaaacaaaagctttcgcgcctggccgcaccaggaagggattgtttaaacttgcaaatgaattcataaaatcaatagaaacaacttccgcaccttccggtatcaggaagggactgcttaaacgcgcaagtgaattccaaaaaccaatggaagctatttctacattctcatcataa

SEQ ID NO: 68244 - protein, 214 aa, Unknown
  Obtained from environmental sample
  SIGNAL (1)...(19)
  misc_feature (1)..(214): Xaa is any amino acid
MSIYKKSALALIISSFLFAGIVLLPDIEPLEYVRTHFFFIPDSMKFIFHFSIFLTLFFILFLILYFKPYPVITKKGSETLVTETEFPDETEEFEETSFFEIEEIEEDEEITYIDEIEEINEAEEIEEDEEINTYAEIQPSKGLLKAANEFLAKEKKEETKAFAPGRTRKGLFKLANEFIKSIETTSAPSGIRKGLLKRASEFQKPMEAISTFSS

SEQ ID NO: 68245 - DNA, 723 bp, Unknown
  Obtained from environmental sample
  misc_feature (1)..(723): n is a, c, g, or t
gtgtcaacggatatcccgccggctgggaaaagcgttgtacttataaacggcggaaccatacctacgaaggaacatataacggttagcagtttttacatgtggaaatatgagatatcgcagaaagaatataaggaagtgatgaagaagaatcccagtgataaaaaaggagataaactgccggtggaacgggttagctggtatgacgcaatagagttctgcaataaattaagtactagtgtaggattagacccggcatatatcataaacggcgaagatgtaacatggaaccggagcgccaacggataccgactgccgacggaagcggaatgggaatacgcttgccgtgccggaacaaacacagaattcaatacaggagccgatattactttaaaacaagcgaatttttataataaaaatttagattactcagcgcaaagggcaaagcctgtaggaagttataaacctaacgcgtggggattatacgatatgcatggaaatgtaagcgagtggtgctgggactggtatgatgaaaaattaccaagcggagcgcaggttgatccgatcggtcctattaccggttccgggcgggtggtacgcggcggagcctttttgagcagtgatgataaaaaaggattggtgtcgagcgctcggaaagaatcttccccgagagctctctacaacataacaggcttccgtgttgtgcgaaatgctcaactgagatag

SEQ ID NO: 68246 - protein, 240 aa, Unknown
  Obtained from environmental sample
  DOMAIN (8)...(235): Domain of unknown function (DUF323)
  misc_feature (1)..(240): Xaa is any amino acid
MSTDIPPAGKSVVLINGGTIPTKEHITVSSFYMWKYEISQKEYKEVMKKNPSDKKGDKLPVERVSWYDAIEFCNKLSTSVGLDPAYIINGEDVTWNRSANGYRLPTEAEWEYACRAGTNTEFNTGADITLKQANFYNKNLDYSAQRAKPVGSYKPNAWGLYDMHGNVSEWCWDWYDEKLPSGAQVDPIGPITGSGRVVRGGAFLSSDDKKGLVSSARKESSPRALYNITGFRVVRNAQLR

SEQ ID NO: 68247 - DNA, 1128 bp, Unknown
  Obtained from environmental sample
  misc_feature (1)..(1128): n is a, c, g, or t
atggatatttcatttaaatttaatcctgaagtattgataggagcggaaactataagcatggcgggaactatcgccgggcgttacggttcccgcatcatgatagccgcggatcataaattggattcgcaaattgtaaaccgcttaaaagaaatcttaacggattccggtcttgaagcgattgtttttgacggaatagaagacgattcttccgcggaaatggcggataacattgtttcgctcttaagcgcggcgcattgtgacgcgatcatcgggttgggcggcgcaaaaacgcaagccatttcccgcatggcggcgataatggctcccatgaaaattacatcgctggaactgcttgacggcagggattgtcagggaaaatttttacccttgctttctataccgacggagggaacggatgtttttaccgcgtcggagttttttcttgtcgcagacccgcgcaacaaattgataaattccatttcgtcgccgaatcatctttacgcgtcgataattatcgactgtaatttaataactgtactttcagataacgcttcatcggcgtttgtttttgagggtattttttccgctgtagaagcgtattgttccgcaaaggcaaattttctttccgacactttgctggaaaaagctatttcctcttttgcgaaattatttaaaaagagctcaggcggcgcaagcgcggaaactttcgcgcaggcgggtatgctcttgtctatcggttcctcagtaagctcgccgggcgtcggttccgcgctttccgcggcaattaacgcgcgctgtaatgttccaaaagcgcaatgttccgcggcgcttttccccgttattgcggagcggcttgtaagcgcgcgccccgaaaaaatggcgcgagttgccgcaatgctcggagcggcaaaagccgctaccccaaccgacgcggcgaattccgcggtagacgccatacgcaaatccatgacggctttgaatgtgccggtcgatttaaaagaacacaatatttcgctggatcgagtgacagccgccgctgaagccgcgcgtaaattagacttaacggcaaattctccgtggactgtatctgaagatgaagtttttaaaattttaaagcaagttttataa

SEQ ID NO: 68248 - protein, 375 aa, Unknown
  Obtained from environmental sample
  DOMAIN (8)...(367): Iron-containing alcohol dehydrogenase
  misc_feature (1)..(375): Xaa is any amino acid
MDISFKFNPEVLIGAETISMAGTIAGRYGSRIMIAADHKLDSQIVNRLKEILTDSGLEAIVFDGIEDDSSAEMADNIVSLLSAAHCDAIIGLGGAKTQAISRMAAIMAPMKITSLELLDGRDCQGKFLPLLSIPTEGTDVFTASEFFLVADPRNKLINSISSPNHLYASIIIDCNLITVLSDNASSAFVFEGIFSAVEAYCSAKANFLSDTLLEKAISSFAKLFKKSSGGASAETFAQAGMLLSIGSSVSSPGVGSALSAAINARCNVPKAQCSAALFPVIAERLVSARPEKMARVAAMLGAAKAATPTDAANSAVDAIRKSMTALNVPVDLKEHNISLDRVTAAAEAARKLDLTANSPWTVSEDEVFKILKQVL

SEQ ID NO: 68249 - DNA, 762 bp, Unknown
  Obtained from environmental sample
  misc_feature (1)..(762): n is a, c, g, or t
ttgtatttttgcggcgaaattgacgcgattaatccgcgaagcagggacgaagtaaccgccgaagaatcaaagagagccgccgtgcgcatggaaacaggcgagcgaatgcagtttttggagaggctaaaggcgtgtttaaaaaatcccgatcaaaataaacttttaccggaagacgcgcgctatcttcaggacgttgaagctcttgcatttggaaaatcggcaaagagcagaacaatgagggatttaactctaggcgaaacacccgaagacgctcattcattactattaaaaacaggcttttggagcggaatgatcaaccctcaccccgtccgctacggcgtatcgctttcaagcgcctcaatttgtccgtccgcgccgcccgaagaaaagcggcaagacctttgtcatttgcccgccttcgccattgacagcccgtggagccacgatcccgacgacgccgtttccgcagaaatcgaagcgggcaaaaacattttatacgttcatatcgccgaccccgccgcctccatttcttttgacagtcccgaagaaaaagaagcccgcgacagaggcgttactctttatcttcccgaaggcgctgtccgtatgctggcgcaggaggcaattcccatgtttgcgcttggtctttccgaaaaatcgcttgcgttaacatttaaaattataatcgacgataacggcatggttttggataccgagatatatttcgcctctagttgtaaaagtcgcggcgtcatgaccttatga

SEQ ID NO: 68250 - protein, 253 aa, Unknown
  Obtained from environmental sample
  DOMAIN (132)...(253): RNB-like protein
  misc_feature (1)..(253): Xaa is any amino acid
MYFCGEIDAINPRSRDEVTAEESKRAAVRMETGERMQFLERLKACLKNPDQNKLLPEDARYLQDVEALAFGKSAKSRTMRDLTLGETPEDAHSLLLKTGFWSGMINPHPVRYGVSLSSASICPSAPPEEKRQDLCHLPAFAIDSPWSHDPDDAVSAEIEAGKNILYVHIADPAASISFDSPEEKEARDRGVTLYLPEGAVRMLAQEAIPMFALGLSEKSLALTFKIIIDDNGMVLDTEIYFASSCKSRGVMTL

SEQ ID NO: 68251 - DNA, 570 bp, Unknown
  Obtained from environmental sample
  misc_feature (1)..(570): n is a, c, g, or t
gtgcgtttctgcacatacgcaagtttgtggataaagcagtttataagccgttatatttccagcaaacgcagtattgtccgcctgcctcagggtaaggaagaaactctgcgtaagattcaaaccatgtataatgttgtgtgtcaaagtatgatgcgtcaacccggaaattccgacatcgcgaaagagcttggcatttccgttcaggtggtggatgcgttcgctaatattgccattgattattcgtctttggaacaaattattaatgacgatgaaaccatcaacgcggtggatattcatgaagattatacctacaatcccgagcgaaattttatgaaaaaagcgtccagcgatgacactctgcgtatattaaacaaattaaaagataacgaaaaacacattatcagtcataggtatcagttaggcggctgtgaacgcaaaacattaagagaaataggggataaccttgatatttcaccggagtctgttcgtcagattgaacaaagggcgttaagaaaaataagaaaccacgcaaaagaattaaaagagtgcttatatgtcgaggcaatttag

SEQ ID NO: 68252 - protein, 189 aa, Unknown
  Obtained from environmental sample
  DOMAIN (29)...(110): Sigma-70 region 3
  misc_feature (1)..(189): Xaa is any amino acid
MRFCTYASLWIKQFISRYISSKRSIVRLPQGKEETLRKIQTMYNVVCQSMMRQPGNSDIAKELGISVQVVDAFANIAIDYSSLEQIINDDETINAVDIHEDYTYNPERNFMKKASSDDTLRILNKLKDNEKHIISHRYQLGGCERKTLREIGDNLDISPESVRQIEQRALRKIRNHAKELKECLYVEAI

SEQ ID NO: 68253 - DNA, 486 bp, Unknown
  Obtained from environmental sample
  misc_feature (1)..(486): n is a, c, g, or t
ttgtatagaaaatgttatctcgatatggtaaagtgggttatgaattacggcattacatttgctgaaaagggcgatgctatttactattttgttcaatggtctcccctttcaaaagccgaccgctatgatattatcaccaaagttccggctcttgcaggtatttttgaaatatactggatggacgaaaaaaaccgcctaaggctgtttttcgtgggaaagacggattacggcggactcaggagcgaaataaggcggcttacagatccggaattgtgcaaggacaacccaaaaacgcaaaaaatacttgaagaaagagaaatttggtatcgttacgccccgacagattcctcaaatattatggctgatgtactttggttttttatgcaaaattattttccggaaaaaacctcattaaaacattcaggacgttatgaagatatttttttaaaggaatccgcgccggacaaactaatgtgggtcccgtaa

SEQ ID NO: 68254 - protein, 161 aa, Unknown
  Obtained from environmental sample
  misc_feature (1)..(161): Xaa is any amino acid
MYRKCYLDMVKWVMNYGITFAEKGDAIYYFVQWSPLSKADRYDIITKVPALAGIFEIYWMDEKNRLRLFFVGKTDYGGLRSEIRRLTDPELCKDNPKTQKILEEREIWYRYAPTDSSNIMADVLWFFMQNYFPEKTSLKHSGRYEDIFLKESAPDKLMWVP

SEQ ID NO: 68255 - DNA, 669 bp, Unknown
  Obtained from environmental sample
  misc_feature (1)..(669): n is a, c, g, or t
atgattgaatatattaccccctccaatattgacgacagaatactgaaccgcgcggcgcggacgctggaagacggcggacttgtcgcgctgccgacagacacaagctggagtattgtctgctcgattaaatctccgcaggcaataaaaaaattaagaaaactttccggagaaagagacgagcggcactttacccttctgtgttcaagcatttcccaatttgtggaagttgtaaaaatggacaatacccgtttcaggttgattaaccgtctttcccccggaccttatgtatttattttggaaactttgtcgggaacggagaaatttctcgatattcgccgccatgagcttggcgtgcgtatccccgactaccctgttccgataaaattgattgagacgcttaaatcgccgctttattcaattacggcgaaaaaaagcatggcagggggcaatgatacggaagcccgtcacgcggaggcgtcggataccgaattgccgccaatccccgaagaagaactttttgaaagcggctgggagcttgacgacattgaaggtttggatattattttggacagcggagaggaacgagaacatattttttccactattcttaatttatgcgaggacgaggtgaaagttctgcgttacggcgctggtaaatggcctatttaa

SEQ ID NO: 68256 - protein, 222 aa, Unknown
  Obtained from environmental sample
  DOMAIN (19)...(216): yrdC domain
  misc_feature (1)..(222): Xaa is any amino acid
MIEYITPSNIDDRILNRAARTLEDGGLVALPTDTSWSIVCSIKSPQAIKKLRKLSGERDERHFTLLCSSISQFVEVVKMDNTRFRLINRLSPGPYVFILETLSGTEKFLDIRRHELGVRIPDYPVPIKLIETLKSPLYSITAKKSMAGGNDTEARHAEASDTELPPIPEEELFESGWELDDIEGLDIILDSGEEREHIFSTILNLCEDEVKVLRYGAGKWPI

SEQ ID NO: 68257 - DNA, 1182 bp, Unknown
  Obtained from environmental sample
  misc_feature (1)..(1182): n is a, c, g, or t
atgaataaacatgaaaaagcgggctttaaacttacatggatttttatgattctgctggttcctctttttgggggaattctttatattgttttaaatatttggtctaacccgaaaaaattaagaagagcgctttttggaaacatctcgaacagccgcgagtctttttatctttacggcaatcgtcttgacgagcttattaaaaattaccccgactttagctctcaggctcattatttgcaggaatacgcgggctttcccgtgtacggaaatacaaaacaggaatattttccgtcaggcgaaactttctttaacagagtccttgaagaccttgaaaaagcgcagaaatatatttttatggaattttttatcttgaaagaagggcaaatgttcaattcgatattgaatattctggaaagaaaagcgtccgaagggcttgatgtgcgcataatgtacgacgacatgggttgtttttttactttgccgtccaacttcccgaaagtacttaaacaaaaaggaattaaatgttttgtttttaacaagttcagaccgattgtttcgtctttgcagaataaccgcgaccaccgcaaaattatttcgatagacggcaaaatagcgttcacaggcgggcttaatcttgccgacgaatacattaacgctgttgagcgtttcggtcattggaaagacgccgcaataaaaattgaaggggatgcggcttggtctttaacgataatttttttacaaatgtggaatctcggttttaaagaaaaagacgattatgcgtcattctttccggggaaagacaatgaaagcaaggaaagcggctcttccgtaaattataaaaaatggggttatgtacagccgtatgccgacagtcctatcgataaagaaaatgtaggggaacatgtatatattcaaattataaaccacgcaaaaaaatatgtttatataaacactccgtacctgattgtagacgacaaccttctttccgctttggtacttgcggcaaaaagcggcgttgacgtgcgcataataactccgcaccgctgggataaaaaaattgtagctattgcttcccgttcatattaccgcagactgattaaagcgggcgtaaaagtttatgaatacacgtcgggttttaatcacggaaagacttttgtttccgacgacaaaatagcgacgtag

SEQ ID NO: 68258 - protein, 393 aa, Unknown
  Obtained from environmental sample
  DOMAIN (189)...(216): Phospholipase D Active site motif
  misc_feature (1)..(393): Xaa is any amino acid
MNKHEKAGFKLTWIFMILLVPLFGGILYIVLNIWSNPKKLRRALFGNISNSRESFYLYGNRLDELIKNYPDFSSQAHYLQEYAGFPVYGNTKQEYFPSGETFFNRVLEDLEKAQKYIFMEFFILKEGQMFNSILNILERKASEGLDVRIMYDDMGCFFTLPSNFPKVLKQKGIKCFVFNKFRPIVSSLQNNRDHRKIISIDGKIAFTGGLNLADEYINAVERFGHWKDAAIKIEGDAAWSLTIIFLQMWNLGFKEKDDYASFFPGKDNESKESGSSVNYKKWGYVQPYADSPIDKENVGEHVYIQIINHAKKYVYINTPYLIVDDNLLSALVLAAKSGVDVRIITPHRWDKKIVAIASRSYYRRLIKAGVKVYEYTSGFNHGKTFVSDDKIAT

SEQ ID NO: 68259 - DNA, 540 bp, Unknown
  Obtained from environmental sample
  misc_feature (1)..(540): n is a, c, g, or t
atggaaggaaaaataagaagcactaccgtaatagcggtaagaaaagacggcaaggtcgccatggccggagacggtcaggtaacaatgggcgataccgttatgaaaaataacgcgcgtaaagtccgccgtcttatggacggaaaagtgctttgcggttttgcgggcgctactgcggacgcgtttacgctctttgatcgttttgaagaaaagttaaaagaatattcgggcgacttggcaagagccgctgtggaattggctaaagaatggcgcatggatcgaaatttaagacggcttgaggcgcttctgctggtagccgatttatcaaaaacattgttaatttccggcacgggagacgtgatagagccggcggaaaacgcgcttgcgattggctccggcggaaattacgcgtacgccgcggcgttggcgttccttgagggaagtaagtttacggcggcggagatagcggagaaaagtttaaagattgcaggtaacatctgcatttatacaaatatgcaaataacattagaggaattaagctga

SEQ ID NO: 68260 - protein, 179 aa, Unknown
  Obtained from environmental sample
  DOMAIN (5)...(178): Proteasome A-type and B-type
  misc_feature (1)..(179): Xaa is any amino acid
MEGKIRSTTVIAVRKDGKVAMAGDGQVTMGDTVMKNNARKVRRLMDGKVLCGFAGATADAFTLFDRFEEKLKEYSGDLARAAVELAKEWRMDRNLRRLEALLLVADLSKTLLISGTGDVIEPAENALAIGSGGNYAYAAALAFLEGSKFTAAEIAEKSLKIAGNICIYTNMQITLEELS

SEQ ID NO: 68261 - DNA, 1263 bp, Unknown
  Obtained from environmental sample
  misc_feature (1)..(1263): n is a, c, g, or t
gtggaagcgacaaaatataccgaagtgggttatgtaggcagggatgtcgaatccatgatccgcgatcttatggccgccggttttcagatggtaaaacaggaaatgcaggaaaccgttttacaggaagcgaaaaaacgggcggaagaagatctgcttgatttactgcttccgtcaaacaacaagaaaccgaaagagaaaaaaatgaaacctgtcgtaaggcctatgggcgctttttcgataaacccggaaaattcaaacggaagcattataggaactactttacaggtgggaattccttttatgaacaacaaagaagaaaatgaggaagagaagaacgacgaagcaaaagaagagccggtaaatgacggcgaagatgaaaagtttaaggtaacaagagaaaaattcagggtaatgctgcacgaaggcaaacttgaggacaggccggtggaactcatggtaaatcaaaacccgcagtttccaatggtggaaatgatgggagcgggcatggaagaacttgaaaacagcctttcggggatcgccggtttcttcggcggcggcaagaagaaaaaagttgtcaccgtcgctagggcgagggaaatacttgaggctgaggaagctgaaaaacttgtagaccgcgaccgcgtaagcgacgaagcccgccagagggtggaagaaacgggaatcatctttatcgacgagattgacaaaatagccgtaaagggcgacagggggggcggccccgacgtttcccgcgaaggcgtacagcgcgacatccttcccattgtcgaaggcgctacggttaatacaaaatgggggccagtcaatacagaccacattctctttatcgcggcgggagccttcaacgtaagcaagccttcggatttaatccccgaacttcaggggcgtttccccctgcgggtggaattggattccctgggcaaagacgattttttgcgtatccttaccgagcctaaaaacgcgctgataaagcagtacacagagcttcttgccacggaggacgtaaagataaactttacgccggaagccgtggaacatcttgccgctctcgcggccgatgttaacactaagctggaaaatataggggcgcgccgccttcataccatcatggaagctctgctggaagagctgtcctttgaggcgtccgatatagctcccgctaatattgacataaccgtcgattatgtcaacgaaaaactggctgaaatagtcaaggatcaggatcttggcagatatattctataa

SEQ ID NO: 68262 - protein, 420 aa, Unknown
  Obtained from environmental sample
  DOMAIN (156)...(306): ATPase family associated with various cellular activities (AAA)
  misc_feature (1)..(420): Xaa is any amino acid
MEATKYTEVGYVGRDVESMIRDLMAAGFQMVKQEMQETVLQEAKKRAEEDLLDLLLPSNNKKPKEKKMKPVVRPMGAFSINPENSNGSIIGTTLQVGIPFMNNKEENEEEKNDEAKEEPVNDGEDEKFKVTREKFRVMLHEGKLEDRPVELMVNQNPQFPMVEMMGAGMEELENSLSGIAGFFGGGKKKKVVTVARAREILEAEEAEKLVDRDRVSDEARQRVEETGIIFIDEIDKIAVKGDRGGGPDVSREGVQRDILPIVEGATVNTKWGPVNTDHILFIAAGAFNVSKPSDLIPELQGRFPLRVELDSLGKDDFLRILTEPKNALIKQYTELLATEDVKINFTPEAVEHLAALAADVNTKLENIGARRLHTIMEALLEELSFEASDIAPANIDITVDYVNEKLAEIVKDQDLGRYIL

SEQ ID NO: 68263 - DNA, 414 bp, Unknown
  Obtained from environmental sample
  misc_feature (1)..(414): n is a, c, g, or t
atgaatacttttgccaaaacagtagatttgttacaccgcgcaatggacgcgaataccgtgcgccgcagcgtaattgccaacaatatagccaacgccacggttccaaactttaaaagatcgaacgtaaattttgaaagcgaacttaaaagggcgcttgattcggaaaaagaaagaccggctttggaactgaaagtgaccgatccaagacatattcccaactggaaggaaagggattacagggatgtgcaggtgcgacgggtgcttgattacacaagcacatataacaacaacgggaacaatgttgatccggaacaggaattaatgctcgcgaaccggaaccagatgacatacacgcttttggcccagtctgcggcgtttgaattcagccaaatcaatcaggtattaagagggtaa

SEQ ID NO: 68264 - protein, 137 aa, Unknown
  Obtained from environmental sample
  DOMAIN (8)...(38): Flagella basal body rod protein
  misc_feature (1)..(137): Xaa is any amino acid
MNTFAKTVDLLHRAMDANTVRRSVIANNIANATVPNFKRSNVNFESELKRALDSEKERPALELKVTDPRHIPNWKERDYRDVQVRRVLDYTSTYNNNGNNVDPEQELMLANRNQMTYTLLAQSAAFEFSQINQVLRG

SEQ ID NO: 68265 - DNA, 309 bp, Unknown
  Obtained from environmental sample
  misc_feature (1)..(309): n is a, c, g, or t
gtgtgggacagtccctactggcgctctccgtttcttcccgaatctatggataacggaatagggcgcggagtgcgggtctcggaaattcaaaaggattattcaacggaaaaccgcctggtttgggatcctactcaccctgacgcgataaaatccggcgaaaggcaaggttatgttgaaatgccgaacgtggacgtggttaccgagatggtggacatgatttccgcctcgcgctcttacgaggcgaacgcggcgataatagaaggttcaaaggcgatgtttttgcgtgctttggacataggttcaagatag

SEQ ID NO: 68266 - protein, 102 aa, Unknown
  Obtained from environmental sample
  DOMAIN (61)...(99): Domain of unknown function (DUF1078)
  misc_feature (1)..(102): Xaa is any amino acid
MWDSPYWRSPFLPESMDNGIGRGVRVSEIQKDYSTENRLVWDPTHPDAIKSGERQGYVEMPNVDVVTEMVDMISASRSYEANAAIIEGSKAMFLRALDIGSR

SEQ ID NO: 68267 - DNA, 396 bp, Unknown
  Obtained from environmental sample
  misc_feature (1)..(396): n is a, c, g, or t
atggaaatattcagtaacaacgcttatatcagcgcggcgggagccaaaaattatgcgacgcagatgaaccgtactcatcagaagcacatgctgccgcctaacagcccgtatttcggaagcggcaaaaaagtactcgcgcttgaggaaaaaatagacgcggggcatgtgacaagagcgggcacttttgaacaggctatgctgcaggcgctggacaaagtttcaggagcggaccagtttacaaaacagcttgaaaaacaggcgattatcgacccggattcggttgatattcatgatataacaatcgcgcaggccgaagccggtatggcgcttaacattacacgaaatgttttaagccgtctggttcagggctggagagatttaattaatacaagataa

SEQ ID NO: 68268 - protein, 131 aa, Unknown
  Obtained from environmental sample
  misc_feature (1)..(131): Xaa is any amino acid
MEIFSNNAYISAAGAKNYATQMNRTHQKHMLPPNSPYFGSGKKVLALEEKIDAGHVTRAGTFEQAMLQALDKVSGADQFTKQLEKQAIIDPDSVDIHDITIAQAEAGMALNITRNVLSRLVQGWRDLINTR

SEQ ID NO: 68269 - DNA, 4290 bp, Unknown
  Obtained from environmental sample
  misc_feature (1)..(4290): n is a, c, g, or t
atgtccggctcttttttcttttcaaggctggggccctacggcctcatcattgtcatcatcgcggcgctgctcattgtcatgctggtaataatcccccttgcgatgaagatcaggcgcaaacggattaagaccaaagaaacaagagaaataatgaaggatcttttcacatggcggcaccttgcccggctggtgaaggggggggaagatcatgacaaggccaagctggaactgtcggataatattgtcaggatcaacgaacttttcaagcaaggcgccgcccatgtgtcgcataacattcaaaatccttccaaaatcccctggtatgtgatgctgggagagccgagggcggggaaatcctcccttcttgcggcaagcgagcttgaattgactccctccaccgaagaagaaaacccccaggaggatccacggcagagcctgccgctgcgtttttgggttggggccaaagctgctgtttatgacatcagcggaaaagttttttttgaccgctggcttgaagaatcaggcgctgagtggaattacattatccgacaaatgtgccgcagaaaagggccgcgcgttctggacggggtaataatcaccgtcccggcggacgcgctccttgcggatgatgaaaatctttcctcgaaaaaagccatactcatcgccagcgaattgggcaaactcctgcgtcaaagcggcatgaggctgccctgttatgtggttgtcaccaagctggatatggtaagcggttttcaggaatatgtcaggaatttaagcggggatttaaggcatcagatactgggctttgagagcgacgcgaaattatttcacaatgaaacatttgaaaatttctggggcggtcttgtcaaccggttccggtccggcgccaaacagcttctcttcccgcttgcgacggacaaagaaaacggcggggttttccgtatggacaaggcgggaaagatatggctttttcccgataatttcaatgccttatataaaaacttatatatttatcttgacgccatttttggggaaaataattttcacggcacaaaagacacgttttttgagggggtttatttcacttcttccatggatcagagcttcgctttaagtcccgacatcgcgtccctggccggaaaacatactgaagatatgttaatccccgtgttcagcccaaacacggcgccttccgtagtggcggttcaagaatcaggcccgccggaactcacggtttcttcgacatcccttatggctgtaaacgccggccgtaccatgctcacgccctatctgcgaaagaagaaccgcctgcacggttactttatcagggaattcctgcaccagcgggtcttcgttccctctgttcacgcggaatatgtcagagcggaagcgatacgccgccatattcccctgtatatcctctgcgccgccatgattttcttaggtctaatatggttttccggcgcgcttttcaagacaaacgaattacaggtgtccatgatccaggcggaatcctactacagttggcttggcggcgttatgcgaaaaggagggccttttaattccccgttgataaccgaagaggctggccgggggtttatcctgaacaacgaaccggtggcgggtgaaagcttttcatcgcgggtgcagttctattataacgcccttcttanccgtgatcttaagattgccgtccccgcgcttttccgcgtttccgaggctgttgttttccgctttgaccggaacatgggttaccgcgacaaggccttcattgccaaccaactccataaagcaatggtcagaatgccggtgataaaaaacacgggggcaaggcttattgaacaggttgacacccggacgctggacatggaaaccagaaatattatcacttcatttatttcactggacgcgatagaaggagtgaatttttataaatactttaaaggcccgtatttcaaactggattccatgatccgttatctgattccggacatatccgatgacgctatggagttccttaccggctacctgccgcgctatgatcatgcgtggacgcctcaactggacgtggattacatttattccggggattaccgtgacgcaaagaggaacggcatagaaaccattttatccgcatggcggcgccggatggtttatcccgattcgatctattggaaaatccggacccttgcttccatatccgaggagattatcgccaattatgaaaacgtcaccgccgcccttaaccggataaaccttgtttccaatccggaaggggtggaacgggccgttcttgaatggaaagagcttactgagcggcacaagaacttgaccgcaaggggcagggccgtcttcgaggaagtaagaatcctcatgcgggccgcccatatccccctggcatttgagaacaggctgcctgaaataagtatctccggcaaaggcatgccttcgatggcaaaaaggccggctcctgacgccttcggcgataacctgataaacgattatctttttaacgatcttgtaataaattacgcccttaatgaatataccaaactttttgacgcggacatggcgctggtcaggcgggaaatgggcgtttccggatccacagaggttatgggagaagttatatcgttacagaataacttcagaggcgatcttaacatggagcttgaagaactgcgccgcagggcaggaacattgcaaaacaacaggctgctgtcagaaaaaaccggcgacaagcctgaggatttatctctctttatggttattgaaagaatactgaccctgagttccggcatacccctgccgcggcgggagcaaaaccggaatttcgcttctaacatggaacagggccagatcggcattaaaaacgcccgggacgcgtttgaagagtatgttaagccttacgcggagaataaaaaactttcggcttttattgccaacgcgcgggtaatgatgctggccgaagcgtattacaatcggtatattatctttaccggttcccttgcttttctcaatactttcgaaggcaatatagcttcagttgttgaatcagaagcaaagggcggcgagctatttcccttctccggcagcgctattgaggagcttttcggcgggttttattttcaccagcgctacgatccttacgttgttaaagcgattgcggatgacgtcgcttcatttatttccatctttaaagaagcgggcggggagaacctgcccctctttctgcggaatgttgataaaaacatttaccagcccccggcctttatggaatacctggcaaattattttaattattggggaaactttccggaaaatgtctatgtctccgctggaacctgggaacggttcatgacccgatcaagacgctacaaatccttccagatcaattcggtgctgctttcgatctatgccggaagcatggaagcaatagcccggattgacgattcgctattaaccaatacgcttgtgaatttaaaaagcaaaacaaccgccgccatgggaaaccgtttggccctgttgaaccaggttttaagcgccgatgccgaacgtatgttttccgcctgggccagcctgccggaagaccctttaattgcatataacatgctgcggcgcctttccggggaagatttgaattcttcttatctggttgtttatacgtccccggttcaaaaaccagaagcggaagagcggcctcaagccttgtctctcggctggtggaacagttttgttctggacggccttaacattctcgcgcgggaggctgacacggcaaacatggcgaggcttttggagaacatggagcgttatcgggcctggcctctggcaagcgacgccgcccggcctttatcaacggaaacaatggaagaattggccgttctgttacgcgacatgggagtggaatttgacgcgcgggaagagcctgatcccgctgccgccgctttacgccacaacctgtttcagggctccttggcccgcaaatgggcccaaacaatgtaccggataagcgccgcggcagcggatacgaaaaaaccgctggcctggacattatatcaggcgccggcggaaattcaacatcggcttggaggcagggggcggctccttgccatanacagattcangaatgtggagacaagcgccgcgggcggcgtcccaaaaatgagcggcacctacatgaatgaaaattatcccctcttcaataataacgcggcggacgggaaccttaacctgcatttttatttaacttccccgggaacggagtcccggtgcctttttggcgattaa

SEQ ID NO: 68270 - protein, 1429 aa, Unknown
  Obtained from environmental sample
  misc_feature (1)..(1429): Xaa is any amino acid
MSGSFFFSRLGPYGLIIVIIAALLIVMLVIIPLAMKIRRKRIKTKETREIMKDLFTWRHLARLVKGGEDHDKAKLELSDNIVRINELFKQGAAHVSHNIQNPSKIPWYVMLGEPRAGKSSLLAASELELTPSTEEENPQEDPRQSLPLRFWVGAKAAVYDISGKVFFDRWLEESGAEWNYIIRQMCRRKGPRVLDGVIITVPADALLADDENLSSKKAILIASELGKLLRQSGMRLPCYVVVTKLDMVSGFQEYVRNLSGDLRHQILGFESDAKLFHNETFENFWGGLVNRFRSGAKQLLFPLATDKENGGVFRMDKAGKIWLFPDNFNALYKNLYIYLDAIFGENNFHGTKDTFFEGVYFTSSMDQSFALSPDIASLAGKHTEDMLIPVFSPNTAPSVVAVQESGPPELTVSSTSLMAVNAGRTMLTPYLRKKNRLHGYFIREFLHQRVFVPSVHAEYVRAEAIRRHIPLYILCAAMIFLGLIWFSGALFKTNELQVSMIQAESYYSWLGGVMRKGGPFNSPLITEEAGRGFILNNEPVAGESFSSRVQFYYNALLXRDLKIAVPALFRVSEAVVFRFDRNMGYRDKAFIANQLHKAMVRMPVIKNTGARLIEQVDTRTLDMETRNIITSFISLDAIEGVNFYKYFKGPYFKLDSMIRYLIPDISDDAMEFLTGYLPRYDHAWTPQLDVDYIYSGDYRDAKRNGIETILSAWRRRMVYPDSIYWKIRTLASISEEIIANYENVTAALNRINLVSNPEGVERAVLEWKELTERHKNLTARGRAVFEEVRILMRAAHIPLAFENRLPEISISGKGMPSMAKRPAPDAFGDNLINDYLFNDLVINYALNEYTKLFDADMALVRREMGVSGSTEVMGEVISLQNNFRGDLNMELEELRRRAGTLQNNRLLSEKTGDKPEDLSLFMVIERILTLSSGIPLPRREQNRNFASNMEQGQIGIKNARDAFEEYVKPYAENKKLSAFIANARVMMLAEAYYNRYIIFTGSLAFLNTFEGNIASVVESEAKGGELFPFSGSAIEELFGGFYFHQRYDPYVVKAIADDVASFISIFKEAGGENLPLFLRNVDKNIYQPPAFMEYLANYFNYWGNFPENVYVSAGTWERFMTRSRRYKSFQINSVLLSIYAGSMEAIARIDDSLLTNTLVNLKSKTTAAMGNRLALLNQVLSADAERMFSAWASLPEDPLIAYNMLRRLSGEDLNSSYLVVYTSPVQKPEAEERPQALSLGWWNSFVLDGLNILAREADTANMARLLENMERYRAWPLASDAARPLSTETMEELAVLLRDMGVEFDAREEPDPAAAALRHNLFQGSLARKWAQTMYRISAAAADTKKPLAWTLYQAPAEIQHRLGGRGRLLAIXRFXNVETSAAGGVPKMSGTYMNENYPLFNNNAADGNLNLHFYLTSPGTESRCLFGD

SEQ ID NO: 68271 - DNA, 546 bp, Unknown
  Obtained from environmental sample
  misc_feature (1)..(546): n is a, c, g, or t
atgtcagttgccgagaatatagcaaagctggaagagcggatacaaaaggcttgcgattccgcacgcagaaaaagggacgaagttacgctgatgggcgtatcaaaatttgtgcccattgagcggatagatgaggcgtaccgctgcggtattcgctgtttcggagagagcagggtaaaggacgcggaggaaaaacttaactcttttaagagcgaacattccgacgcgcggtttcatttaatcggttccttacagcgcaacaaggcaaagaccgccgcccttttttttgactgcgttcaatcggcggacagggacgagattattgttgagcttgcaaaacattccgccgggcggacggaaccgcttgaggttcttcttgaactgcatacgggcgaggaaacaaagagcggctatcaaagcatagaggcgctctttaacgcggcggagttggttttaaaaagccctaagttaaaacttacgggacttatgacaatggctccttttacaacggataccgcattgattcgttcttcttttaaacagctttaa

SEQ ID NO: 68272 - protein, 181 aa, Unknown
  Obtained from environmental sample
  DOMAIN (1)...(177): Alanine racemase, N-terminal domain
  misc_feature (1)..(181): Xaa is any amino acid
MSVAENIAKLEERIQKACDSARRKRDEVTLMGVSKFVPIERIDEAYRCGIRCFGESRVKDAEEKLNSFKSEHSDARFHLIGSLQRNKAKTAALFFDCVQSADRDEIIVELAKHSAGRTEPLEVLLELHTGEETKSGYQSIEALFNAAELVLKSPKLKLTGLMTMAPFTTDTALIRSSFKQL

SEQ ID NO: 68273 - DNA, 393 bp, Unknown
  Obtained from environmental sample
  misc_feature (1)..(393): n is a, c, g, or t
ttgttaccgtgcaaaaagaagtcgcccggcgcatggcggcctccgcggggaagtctgactattcatcgttttccgtcttgtggcgcgtcggcttacaaagttaagccgttaaagaggattcgcccatcgtctttttatccccagccgaatgtggacagcatggcggttcttcttgaaaaaaaagacgctcaaaaacgccccgccgctttttatccgttggtgcgggcattgttcgcgtccagacgcaagacaataaaaaacaaccttttaaattttctttcctctcgttttggagattccctgcaaaataaacaggcggtgcaggaactatgcgcctctgttttgcaaagcaactcgcttaacggcacagaacgcgcggaaaatcttgaatag

SEQ ID NO: 68274 - protein, 130 aa, Unknown
  Obtained from environmental sample
  misc_feature (1)..(130): Xaa is any amino acid
MLPCKKKSPGAWRPPRGSLTIHRFPSCGASAYKVKPLKRIRPSSFYPQPNVDSMAVLLEKKDAQKRPAAFYPLVRALFASRRKTIKNNLLNFLSSRFGDSLQNKQAVQELCASVLQSNSLNGTERAENLE

SEQ ID NO: 68275 - DNA, 486 bp, Unknown
  Obtained from environmental sample
  misc_feature (1)..(486): n is a, c, g, or t
atgacgctcaattataactccgcgtccgccttgcgcgcctttcttgatcaggaagggcttggaatgcagaaaaaattcgggcagaattttttgattaaccccgaaacaaggaaggcgcttgtgcaggctctcggcgctcaaagcggagacgtggtctgggagattggtcccagtctaggcgcgatgacggctccgcttcttgaaaaagggttaagagtaaaagcgttcgaactcgatcttggttttatccgcgtactaaaaaatattttttcagaggataaaacttttactcttgttgaaggcgacgtaacgaaaacatggcaaacccaccaagccgcgccgtttctttttgggaatcttccgtacaatgtcgcggcggcgctgttggcgcactctaatcgagaacgaccgtattttttcgcgcatggttgttaccgtgcaaaaagaagtcgcccggcgcatggcggcctccgcggggaagtctga

SEQ ID NO: 68276 - protein, 161 aa, Unknown
  Obtained from environmental sample
  misc_feature (1)..(161): Xaa is any amino acid
MTLNYNSASALRAFLDQEGLGMQKKFGQNFLINPETRKALVQALGAQSGDVVWEIGPSLGAMTAPLLEKGLRVKAFELDLGFIRVLKNIFSEDKTFTLVEGDVTKTWQTHQAAPFLFGNLPYNVAAALLAHSNRERPYFFAHGCYRAKRSRPAHGGLRGEV

SEQ ID NO: 68277 - DNA, 1473 bp, Unknown
  Obtained from environmental sample
  misc_feature (1)..(1473): n is a, c, g, or t
atggtaactcagtttcttaaacgtcttcatattactcctgttctatgcgccgctcttggaacggctgtcggtttttatattttatttcgctgtgcaaaaccggtaaccgccgccgtttttctgctctcccttgcgctgttcaatttcttaatggttatgtcttctcttaacgagcaatcgcgcgcgttcaaattgtactccgtctgcacagccgcgttaatcatcgggtttgctctcggcgtatgcgcggcggactcagggcaaaataaagttgcgttcggtcttccggaaaataaaataaccgccattgaaggcgtattaacggaagacccgcgtattatttccggcggaaaagcgattgtcaccgtaacgcttcgcaaatgcgccgcgggaaatacattgcgcgcaagcggcaggggagagattgccgtttttatctctcaggaaaatgcggaaagactaagacaattcgggcgggggactgtagtttttgccgaaggttcattgcgttccaacgaaaaggggaattggtctttaagcgcgaagtcgttgcatattgtaaaacagccgccgccggtagagcggatgcgtacaaacatcagattaaatttgataaaacgctttggcggcaaacaatggggcgggcttgctcttgctctgcttctgggaataaaagacaatcttgatacagagttggctgtaatgtacagaaactcaggactgtcttacatactggctttgtcgggtatgcatcttgccatacttgccgcgcttataactttcctgttaaaaaaaccgctcggcttaaaagcgtccgctatttgcggcgcggctattattttactttattgttttctggtaggttcaatgccgagccttaaccgcgccgcaatgatgtaccttcttggagtgttaacgctgcttggggctttgcctaaaaagccgctgtcgattttatcgctttcatttattattcagattattgtaaccccgtccgcgggaaacagtatctcttttattctttcgtatctggcattgataggcattttaataatcggcaaagatctttactctctgtttgccggcaaagcccccgactttttgttacagcctcttgccatgtcctgcggcgcgttccttgccacagccggcgtctgcggttccgcattcggaattcttgcgcccgttggaataataacagggcttgtgatggttccgcttacaaccgtctttatgatcggttctataatctggctcgttttggatttcctttcgctctccgccttgcttaacctgccgttatccgtcttgtacaaattaatggaagtaatcgcttccgtctccggaaaagttcccggcatttcaacgggcgcgttatcaatgatcatcctctctcttgccctctcggtgttaatcatcgcctttgaatacaaacggcgtttgtccctgctaaaattggaaccgtttttatga

SEQ ID NO: 68278 - protein, 490 aa, Unknown
  Obtained from environmental sample
  DOMAIN (220)...(478): Competence protein
  misc_feature (1)..(490): Xaa is any amino acid
MVTQFLKRLHITPVLCAALGTAVGFYILFRCAKPVTAAVFLLSLALFNFLMVMSSLNEQSRAFKLYSVCTAALIIGFALGVCAADSGQNKVAFGLPENKITAIEGVLTEDPRIISGGKAIVTVTLRKCAAGNTLRASGRGEIAVFISQENAERLRQFGRGTVVFAEGSLRSNEKGNWSLSAKSLHIVKQPPPVERMRTNIRLNLIKRFGGKQWGGLALALLLGIKDNLDTELAVMYRNSGLSYILALSGMHLAILAALITFLLKKPLGLKASAICGAAIILLYCFLVGSMPSLNRAAMMYLLGVLTLLGALPKKPLSILSLSFIIQIIVTPSAGNSISFILSYLALIGILIIGKDLYSLFAGKAPDFLLQPLAMSCGAFLATAGVCGSAFGILAPVGIITGLVMVPLTTVFMIGSIIWLVLDFLSLSALLNLPLSVLYKLMEVIASVSGKVPGISTGALSMIILSLALSVLIIAFEYKRRLSLLKLEPFL

SEQ ID NO: 68279 - DNA, 1179 bp, Unknown
  Obtained from environmental sample
  misc_feature (1)..(1179): n is a, c, g, or t
ttgtacacatggaagccgataatcttcccatcggaaccagaaattatcttttatgcgaagtttttaatttacttcccgaagatgatgaagatgaacttccgttccgcgtgctggaagatgaagccaatgttatcacggagcaggcggctcaaaaagccgcagaacaagcggctcagcaaacgacagagcagcaggaggctgtcaatgcgtaaaaaaataatattaatttctttgttggtattatccgcttcgattgcttacagcgatccgcaagacggaaagatcgatatttccaatattagcgacgcagtttctctttggcggctttttctggaaaatcccgattcaaaaacaggaaccgatattcttatcaaacttggttctgtgggaaagggaaacagaatgatcattgataatatcaataattatctgatgggaaaaaatctattattccgctcgggagagaatgtcgattatacgataatatccgtatgtatttccacgcttatggaattgggagacagttcgtcttatcccgctcttttttccgttctctacgccgggtatcctgaagtaattacttccgaagcgcaaggcgcgttagagttaattcccggaaacctgcagcaatttcttgtaaatgtaataacgaataatccgcccgaagaaaaatttgccgcttttgtaatgggaataaacagcgacaggttaaatgtgtctcagcgcggacagcttgcggaacttgcgcttgaacagggattagcttctccggatgataatatcgatcttaccgctatgcgctattcatcgattttactgcttacacggcttaggtggacgcgctccaacgctcttgcgatacggcactattaccgcgtacaaaccgattatcttttgaatcccgcgcagaaagaaagatttgttgaggcgattgcatgtctcggcgcggttggaaattcagacgccgcgcttgtactttgtttacaacttggacttattaacgccagaacggaaagtacgggagcttatgattctgaaataacattggcgattgtacaggctcttggaaaaataggctataatgccgcctttgatcatttattaaatgtcagtaatttatcgtaccccgaggagattcaagccgcggcaagggaggcggttgctcgccttaaatggtaa

SEQ ID NO: 68280 - protein, 392 aa, Unknown
  Obtained from environmental sample
  misc_feature (1)..(392): Xaa is any amino acid
MYTWKPIIFPSEPEIIFYAKFLIYFPKMMKMNFRSACWKMKPMLSRSRRLKKPQNKRLSKRQSSRRLSMRKKIILISLLVLSASIAYSDPQDGKIDISNISDAVSLWRLFLENPDSKTGTDILIKLGSVGKGNRMIIDNINNYLMGKNLLFRSGENVDYTIISVCISTLMELGDSSSYPALFSVLYAGYPEVITSEAQGALELIPGNLQQFLVNVITNNPPEEKFAAFVMGINSDRLNVSQRGQLAELALEQGLASPDDNIDLTAMRYSSILLLTRLRWTRSNALAIRHYYRVQTDYLLNPAQKERFVEAIACLGAVGNSDAALVLCLQLGLINARTESTGAYDSEITLAIVQALGKIGYNAAFDHLLNVSNLSYPEEIQAAAREAVARLKW

SEQ ID NO: 68281 - DNA, 723 bp, Unknown
  Obtained from environmental sample
  misc_feature (1)..(723): n is a, c, g, or t
gtggctggaaccggcgtttataaatcagaagttgtaaaaaattcaggcaattatcttgccattgcgcgtcctgcaaacgccagtacgccgaattccatggaatggtacgggcttaaaatatccgtttatttctggcgcgaagacgacgccggatatgtttttgattccgaagtaatagacgaagttttttccaaaggtatttcctcattaaagatagatcataacgattcgcttttcagaacacaaaaaagaaaatccatgcgagttaaatttcaaaaacccgcgtacttgtatcttgtcagtgaatctgataatccgcacaggcttgagaaatcggcgggattaagagtgatgatggaagatatttccgattcaggatgcgcctttaaagtattggggcaggttaccgtaggactgcgttttaaagcgcaatttttattggacaagatacccgtctgcataccgggtactgtgcgttccgtagactactaccgcgataccaatacgacgattgtacacatggaagccgataatcttcccatcggaaccagaaattatcttttatgcgaagtttttaatttacttcccgaagatgatgaagatgaacttccgttccgcgtgctggaagatgaagccaatgttatcacggagcaggcggctcaaaaagccgcagaacaagcggctcagcaaacgacagagcagcaggaggctgtcaatgcgtaa

SEQ ID NO: 68282 - protein, 240 aa, Unknown
  Obtained from environmental sample
  DOMAIN (82)...(193): PilZ domain
  misc_feature (1)..(240): Xaa is any amino acid
MAGTGVYKSEVVKNSGNYLAIARPANASTPNSMEWYGLKISVYFWREDDAGYVFDSEVIDEVFSKGISSLKIDHNDSLFRTQKRKSMRVKFQKPAYLYLVSESDNPHRLEKSAGLRVMMEDISDSGCAFKVLGQVTVGLRFKAQFLLDKIPVCIPGTVRSVDYYRDTNTTIVHMEADNLPIGTRNYLLCEVFNLLPEDDEDELPFRVLEDEANVITEQAAQKAAEQAAQQTTEQQEAVNA

SEQ ID NO: 68283 - DNA, 534 bp, Unknown
  Obtained from environmental sample
  misc_feature (1)..(534): n is a, c, g, or t
ttgactttacgcattcaacctctccctaaccgtatgcgtctcccccaaaaacaccctcttcaaaattcccgtaatccaatgcgcgaccccgtccactatgctgtagaaaaccggaacaacaaacaacgtcaacagcgtagacgacgccagcccgaacgccaccgccgtccccagcgggctttgcatttccgaaccttgccccttggcgagcgccataggcaatatcccgaaaatcgtggtcagcgacgttatcaaaataggccgcagccttatcccggaagcctttatcagcgaatccttaaggctgtgcccctccgccctaagctggtttataaaggtgatcatcacgataccgttgttgaccacgatgcccaccaatattataatccctatgaacgcggccaccgacagcggatgccccatcacaagcaatccgaaggccacgcctatgaaagccagcggcacggtgaacataacgatgaacggctgggtgaagctctcgaactgcgccgccatcaccatgtatatcaatag

SEQ ID NO: 68284 - protein, 177 aa, Unknown
  Obtained from environmental sample
  misc_feature (1)..(177): Xaa is any amino acid
MTLRIQPLPNRMRLPQKHPLQNSRNPMRDPVHYAVENRNNKQRQQRRRRQPERHRRPQRALHFRTLPLGERHRQYPENRGQRRYQNRPQPYPGSLYQRILKAVPLRPKLVYKGDHHDTVVDHDAHQYYNPYERGHRQRMPHHKQSEGHAYESQRHGEHNDERLGEALELRRHHHVYQ

SEQ ID NO: 68285 - DNA, 3258 bp, Unknown
  Obtained from environmental sample
  misc_feature (1)..(3258): n is a, c, g, or t
atgaacctaccaaaactatcggtaacacgccgggtaaccgtaaccatgctgatactgatcatggttctcttcggcgcgatgtcctttatcaagctcgggctcgacatgatgcccgaccttgagttccccaacctcaccgtcgtcaccgcctactcgggcgcggcggccgaagacgtggagcagcttgtcacacgccccatcgaggccgccgtggcaagcctcaagggaatcgacaagctgacctcaacctccgccgaggggctatctacggtcagcgtcaacttcaagtgggggacgaacctcgacatcgccagccaggacatccgggagagcataagccgcataaagacctacctcccgtcgggcataaacgacccgatggtgatgaagttcgatatgtcgcagatgccgatcctgctctacggcgtgtccggcatgaacaacacgctggaactgcagaagtacttcgaggacgccattgtgccgcgtgtggagcgcctcgagggcgtggcctccatggccgtgttcggcgggccggaacgcgagataaacgtgttcctgagcaaaacgcgcctcgaccagtacaagatcgggccggacgccgtgatgggggcgctcatggcctccaacatgaacgtgtcgagcggccacgtcagcgccgggcaccaagagtacctcgtgcgcaccatgggcgagttcgggaacatcaacactatcgcgaacaccatcattacaaccgtgaacggatcgcccatacgcataggcgacgtggcgcgggtggaggacacgcagaaggagcaacgcaactacgtgcgcatgaacggcagggacggcgtggtcttcatgataaccaagcagagcggctccaacacgctgaaaacggtgaacgaggtgaaagcgctgcttgaggaactcaggccctccatgccgcccgacgtgcaatatgtgacaatcttcgaccaaggcgagatggtggaacgcgtgacgggcaacgccacggagtcggcggtgcagggtaccatactcgccatcatcatcctgtggttcttcctgcgcaactggaggccgaccttcgttatcgcgctcgccatacccatatcgatcatcaccacgttcataggaatgtacgctttgggctacacgctcaacgtgataacgataggaggtttcgcgcttgccgtgggtatgcttgtagacaacgccgtcgttgtgatagagaacatctaccggcatttggagggcggcaagcaccgcaacgtggccgcagtcgacggcgcggcggaggtggggctggccatcactgcctccacgctgaccacggtggcggtcttcgtcccgctggcgcttgccggaggcttcgccggaaagatcgctcaacccttggcgctgaccgtctgcgccggtctgggcgcttcgctactcgtggcgataaccatcgtccccatgctcgcctccgtcttcttcaagcgcaagacgaagaaggccaagaagggctctaaaaccggcgtggttaccgacgaggtcttgcccgtaggcacaccgcttgtcgcccccgaaaatcaggtcttgggcgaattcagcgacaacgccgccgccgcggggcaagtcgtcgaccacaccttcgacgccgaggctcacggcggacgcttctaccaagccttccaacacggttacgaggcgatgctcggctgggtgctgcgccaccgcttcatcgtggtcttcgtcaccctcgccctcttcgccgcctccatcttgacgatggcgaaagtgggcggcgagttcatggccgactccgaccgcggcatgggcaccatctccataaaactgccggtgggcacgaacttagaggagaccaaccgcctcgtcaagacgatagaggaccgcatactcgccatcccggagacccgtatagtctgcgccatgataggacgcctgagcgacgagggtgccgccggcatggacggcgacgtcaacgaggcgacggtattcttcaaactcaaaaagttcaaggagcgcacacgctccacaaaggaggtcgtcaacgaaatccgcacctccatccccgaactttacgacgtggtgatagacttcgcctccggcggaatgatgggcggctcgaacaatcccatagaactcaaattcttcggcagcgaccttaacgcgctgaaagcgtacgccgacagcgccaaagcggtaatggacaaaatgcccgggctgaacgacgtgatagtctctatgcgcgagggcaaaccggagctacgcatcatcccagaccgcgacaaaacggctatgatgggccttacgatgtccgatatcggcaacggcataaagtacgccaacctcggccaagtggtcacacgctaccgcgaggccggcgaggagtacgacgtgcgcatcaggctcgacgaggccgaccgctccacacgcgacaaggtgaccgccatacccgtaatatcacgctccggcgtggtaacgcaggtggtgaacctaggcgacatcaggtacgaacgcggccccatatcgatatacagagagaaccgcgtacgctgcatcaccgtaaccgccaaaaccgacagccgcgacatacagggcgagatgaacaaggtgcaggaggcgctcaaagatatgcaggcgtcgctccccaacggctacttcattgagtacggcggctcatacgaggacatgcaggacacgttcaaagacctgctcttggcgctgggcatagccatactattgatatacatggtgatggcggcgcagttcgagagcttcacccagccgttcatcgttatgttcaccgtgccgctggctttcataggcgtggccttcggattgcttgtgatggggcatccgctgtcggtggccgcgttcatagggattataatattggtgggcatcgtggtcaacaacggtatcgtgatgatcacctttataaaccagcttagggcggaggggcacagccttaaggattcgctgataaaggcttccgggataaggctgcggcctattttgataacgtcgctgaccacgattttcgggatattgcctatggcgctcgccaaggggcaaggttcggaaatgcaaagcccgctggggacggcggtggcgttcgggctggcgtcgtctacgctgttgacgttgtttgttgttccggttttctacagcatagtggacggggtcgcgcattggattacgggaattttgaagagggtgtttttgggggagacgcatacggttagggagaggttgaatgcgtaa

SEQ ID NO: 68286 - protein, 1085 aa, Unknown
  Obtained from environmental sample
  SIGNAL (1)...(28)
  DOMAIN (3)...(1058): AcrB/AcrD/AcrF family
  misc_feature (1)..(1085): Xaa is any amino acid
MNLPKLSVTRRVTVTMLILIMVLFGAMSFIKLGLDMMPDLEFPNLTVVTAYSGAAAEDVEQLVTRPIEAAVASLKGIDKLTSTSAEGLSTVSVNFKWGTNLDIASQDIRESISRIKTYLPSGINDPMVMKFDMSQMPILLYGVSGMNNTLELQKYFEDAIVPRVERLEGVASMAVFGGPEREINVFLSKTRLDQYKIGPDAVMGALMASNMNVSSGHVSAGHQEYLVRTMGEFGNINTIANTIITTVNGSPIRIGDVARVEDTQKEQRNYVRMNGRDGVVFMITKQSGSNTLKTVNEVKALLEELRPSMPPDVQYVTIFDQGEMVERVTGNATESAVQGTILAIIILWFFLRNWRPTFVIALAIPISIITTFIGMYALGYTLNVITIGGFALAVGMLVDNAVVVIENIYRHLEGGKHRNVAAVDGAAEVGLAITASTLTTVAVFVPLALAGGFAGKIAQPLALTVCAGLGASLLVAITIVPMLASVFFKRKTKKAKKGSKTGVVTDEVLPVGTPLVAPENQVLGEFSDNAAAAGQVVDHTFDAEAHGGRFYQAFQHGYEAMLGWVLRHRFIVVFVTLALFAASILTMAKVGGEFMADSDRGMGTISIKLPVGTNLEETNRLVKTIEDRILAIPETRIVCAMIGRLSDEGAAGMDGDVNEATVFFKLKKFKERTRSTKEVVNEIRTSIPELYDVVIDFASGGMMGGSNNPIELKFFGSDLNALKAYADSAKAVMDKMPGLNDVIVSMREGKPELRIIPDRDKTAMMGLTMSDIGNGIKYANLGQVVTRYREAGEEYDVRIRLDEADRSTRDKVTAIPVISRSGVVTQVVNLGDIRYERGPISIYRENRVRCITVTAKTDSRDIQGEMNKVQEALKDMQASLPNGYFIEYGGSYEDMQDTFKDLLLALGIAILLIYMVMAAQFESFTQPFIVMFTVPLAFIGVAFGLLVMGHPLSVAAFIGIIILVGIVVNNGIVMITFINQLRAEGHSLKDSLIKASGIRLRPILITSLTTIFGILPMALAKGQGSEMQSPLGTAVAFGLASSTLLTLFVVPVFYSIVDGVAHWITGILKRVFLGETHTVRERLNA

SEQ ID NO: 68287 - DNA, 621 bp, Unknown
  Obtained from environmental sample
  misc_feature (1)..(621): n is a, c, g, or t
gtgggggacgaacctcgacatcgccagccaggacatccgggagagcataagccgcataaagacctacctcccgtcgggcataaacgacccgatggtgatgaagttcgatatgtcgcagatgccgatcctgctctacggcgtgtccggcatgaacaacacgctggaactgcagaagtacttcgaggacgccattgtgccgcgtgtggagcgcctcgagggcgtggcctccatggccgtgttcggcgggccggaacgcgagataaacgtgttcctgagcaaaacgcgcctcgaccagtacaagatcgggccggacgccgtgatgggggcgctcatggcctccaacatgaacgtgtcgagcggccacgtcagcgccgggcaccaagagtacctcgtgcgcaccatgggcgagttcgggaacatcaacactatcgcgaacaccatcattacaaccgtgaacggatcgcccatacgcataggcgacgtggcgcgggtggaggacacgcagaaggagcaacgcaactacgtgcgcatgaacggcagggacggcgtggtcttcatgataaccaagcagagcggctccaacacgctgaaaacggtgaacgaggtgaaagcgctgcttga

SEQ ID NO: 68288 - protein, 206 aa, Unknown
  Obtained from environmental sample
  misc_feature (1)..(206): Xaa is any amino acid
MGDEPRHRQPGHPGEHKPHKDLPPVGHKRPDGDEVRYVADADPALRRVRHEQHAGTAEVLRGRHCAACGAPRGRGLHGRVRRAGTRDKRVPEQNAPRPVQDRAGRRDGGAHGLQHERVERPRQRRAPRVPRAHHGRVREHQHYREHHHYNRERIAHTHRRRGAGGGHAEGATQLRAHERQGRRGLHDNQAERLQHAENGERGESAA

SEQ ID NO: 68289 - DNA, 1035 bp, Unknown
  Obtained from environmental sample
  misc_feature (1)..(1035): n is a, c, g, or t
ttggcgaccgggtttcagaaggacaagaagaaggacgacgcggccgtgcaggcggcggagatcgagatgatttaccttcccgtcaaggccgcggtcgcggcccgccgcgacgttacgcaggcgctcaacttctcaggaagcatagacgccttccgacgcgccgccatcgcgcccgccgtaatgggcagccgcgtgaagcatatctacgtcgatgagggaagcgcggtgaaggaggggcagctgcttgtcaaaatggaagacttccagctccgccaatccgcggcgcagctgtcgcagcttgagtcggattacaagcgcatgtcggcgctgtacagcaagggcagcgttacggcgcagcagtacgagcagataagctcgggcttcaacgccgcggtggcggggtacgacctgcttaaaaactcggtggatctgcgggcgcccttcgccggcaccgtcatcggcaagtacgtgaacgagggcgaggtctacaccggcacgccgggctacgacggcatctccggcgtgctctcgatagcgcagctcggccggatgaagatagagataatggttcccgaacaggacttcgtgctgcttcgccccggacaaacggcgcaggtgaaaaccgacgcatatcccgacattgacttcgaggggaaaatcttcacggtaaatccggccctgaacagaatgagccgcacctcgcgggtagccgttgagataaacaacgacaagcagctgctgaaacccggcatgttcgcgaaagtggagatagtgacaaacagcctgcaagacgtgctcgccgtccccgccacggcggtggtaatgagaaacggcgaggcgaacgtcttcacggtggaccgccaacctaagctgccgtacgagacgcatccgaaaatagtaaaggtaaaaacaggcctcgtgacggacgcttacgcgcagatactggaaggtataaccgagggggctattgtgttgacggataataacgtcagtcttgttaacgggacaaacattcgcgttacggagataaaataa

SEQ ID NO: 68290 - protein, 344 aa, Unknown
  Obtained from environmental sample
  misc_feature (1)..(344): Xaa is any amino acid
MATGFQKDKKKDDAAVQAAEIEMIYLPVKAAVAARRDVTQALNFSGSIDAFRRAAIAPAVMGSRVKHIYVDEGSAVKEGQLLVKMEDFQLRQSAAQLSQLESDYKRMSALYSKGSVTAQQYEQISSGFNAAVAGYDLLKNSVDLRAPFAGTVIGKYVNEGEVYTGTPGYDGISGVLSIAQLGRMKIEIMVPEQDFVLLRPGQTAQVKTDAYPDIDFEGKIFTVNPALNRMSRTSRVAVEINNDKQLLKPGMFAKVEIVTNSLQDVLAVPATAVVMRNGEANVFTVDRQPKLPYETHPKIVKVKTGLVTDAYAQILEGITEGAIVLTDNNVSLVNGTNIRVTEIK

SEQ ID NO: 68291 - DNA, 540 bp, Unknown
  Obtained from environmental sample
  misc_feature (1)..(540): n is a, c, g, or t
ttgtcttccgcttttacaacttctttttcttcttctttttgtttttttctgccgaataagcctttcttttccaccggctttggcgcgcttacttttgttttatttaaaatgtcgtcaagaccggtaagcgagaaatcatcgccgccgaaaacatcgccgccggaaaaaccggaatcgctgtccatcccttcaacttccgctccggcttcggctccggttccggtgtccaactcgattgaatcggacgcaaagtctgcgcctaaatcgccgaactcatgcactgcgcctgcgtcggttccggcatcaggggcagcgccgctcgcggcggaaaaatccatgtcggaggcgggtatgtcaaaatttgtatctaaagcggaagcatctgcgccggatgtatcaaatgaatcggcgggagcgcctaaatcgtctcctcccgataaattaaagtccggtaaagagtccgaagaaaaatcatcgcttgccgcttccggcgtaaagtcgatagattcgccgccaagatcaatgccgcctaaatcttga

SEQ ID NO: 68292 - protein, 179 aa, Unknown
  Obtained from environmental sample
  misc_feature (1)..(179): Xaa is any amino acid
MSSAFTTSFSSSFCFFLPNKPFFSTGFGALTFVLFKMSSRPVSEKSSPPKTSPPEKPESLSIPSTSAPASAPVPVSNSIESDAKSAPKSPNSCTAPASVPASGAAPLAAEKSMSEAGMSKFVSKAEASAPDVSNESAGAPKSSPPDKLKSGKESEEKSSLAASGVKSIDSPPRSMPPKS

SEQ ID NO: 68293 - DNA, 2979 bp, Unknown
  Obtained from environmental sample
  misc_feature (1)..(2979): n is a, c, g, or t
atgaaggctttggtttcgtggcttaaaagaaaaaaatccgctttttgcatattgacgggaattatttccgtatcgttatttgttatcagtacctcaaaagaaagaataaaacaaactacaggaggttcttatgttgtaaagattatgcattacggcatcgactcggcggaaatggaaaggacggttaccattccgctcgaggatgccctttccgcgatttccggcgttatgagcgtgcaaagttccaccgaaaacaaccagtcaagagtgtttgtgcgtttcaaacccggcgtgaaaggacggtacgaggccgtccgcgacggggcgcaaagagtttacgaaacattgccgccgtcggctcaaagaccggagattctaagctcaaataattcaagagttccggtatggtcggcggcggtttttagtaaagcaaacttcggcgaagttaacttaggcgaagaaaatctttttacggcgcaaatgctggaaaaaattgtaaagccgcgctttgaaagccttgaaggagcgggagaagttttaatttccggcgcgggcttaaaagaaattgttataagccttgatcaggaaaaactttttaccatagggcttcacccgtccgccgtcgccgaggcgcttgcgatgaacgattcaattttttcgggcggaacggcggttcttggaaacagggaaataattatcacggtggacgggcgttacgggcaatctttggacaaggcgcttgtcccgcttggaaacggaaaatttatagagcttgcagacatagccgtaattacggagcaggaaagagagccggacactctttcgcgcttgaacggcagaaaaacggcgggaatcgcgattatgggacggcacgacgccgacctgcgaaaactttcttccgatattaaaaaagagttggccgcccttgccctgcctctggaattcaccgttttaacggatgccggcgcggaagaaaccgccgctttccgttccgtctttaacgccgcgctgtcaggcgcaatcatggttgcggttgtcagttttttattaggagggaaaaactcggcaaacttgtccggcttcttctgcgcgctctcgatcccgttaatctgcgtcctttcaatcgccgttctttcaatactcggcttcaccccggggcggctgatgctggcgggtattgccgctggagtgggaaccgcggttgacgcagtcattctctgttcggagaaactccgcaaacatataagctatgaaggcgcggcggcggccttgtccgaacttgcgggaccgttaatcgcgggggcggctactactgtcgcggcccttcttccgctttcaagaatgcaggacgtaagcgtaaaaacaatagcagcgtccatagccgtaatttgcacagccgctctcgttttcagcctttcgctcctgccgcctctgcttctttggaaagtgaagtccggcgcggcaaattttttcgttaaaatgccggttttgttcaaacaaatacaaaggcggctttcaaggttactgtgcaaatttctcgccgcggacgtaaagctctgtttccgttacccgattttaattccggcaatcagcctcgctattaccgcggcggcggcgctcgctctttttgcgaaaggggtggacgcttcaagttacggttcggaggattccgtctacgcgcaggttgaatttgagggaggcctgctcgcgcaggaggcggatcgccttctcgcggcttacggcgaacagctttcagcttacgccggaattacaaatgtcgagaccggcgcgaggacgggatcaggttccctgcttgtttcctttgatccgaaacagacaaatgcgcataacgtaaaaaatttggcgaagagcgtatacattcccggcggttttgtgttttttcacgaaagctcaaaccgcgagcgctattgggagataagaatctgcggcgacgaagataaaaaatgcagggaacttgccgaaaaattggcgtacctgtgcgcgaaccatcctttgattacggagcgtgtgttgaatttcaaacaggggagtaaaaaactgattttgcggccggacagggaattgtttgccggaacgggagttggtttcgcggtcgccgccgccggacttaggtatggggtgtacgggcccgtctcgtacaaaagaatggacgcaaagggcgaaacagacgtgcgtatcagaaccggcggcaatgttacgcgtcaatcaagagagggggctttgggtttgcttgtttccggcgtacgggcagactcgctcttacaaacaagcgaagaaattgaaagcgccggcttaaggaggatagacaggcgcaggacggcttccattaccgttgttaccggccccatggacgcgcgccgcgtaaagcggcagttggaaggaattttcaggaaaatcgatctgccggcgggatattcaatcgaatttgatccggacgccatcagtcaggcggaagctctatcggcaaccgtgctttcgcttgtgatggccgtcatcttctgttatatgatcatcgcctgtattaacgaatcttttaccattccgctccttgtgctctcggcgattccggcctctcttgcggttcctgccctctgccttgcgctgtcgggaagcgcgtataattccgcctcggcgtgcgcttttatcgcggtaagcggaatgacggtaaatgccgcagtgctttgtgtcgacagcttgtacgcgaagacgcggaagataaacaaaatatcaactttgggaatttacagcgcgctgcgtcgcaaaatgcccgcccttttgtcaacaaccggcaccaccgtcgccggggcgctgcctttcctcttcctttcggaaggggcaaatttgcttatacggacgctttctcttacaggagctcttggagtcgcgtgttcgtgtattggttcaataactttaattccatcgctatttataattaaaaatcatttaacaaaaaaataa

SEQ ID NO: 68294 - protein, 992 aa, Unknown
  Obtained from environmental sample
  DOMAIN (13)...(987): AcrB/AcrD/AcrF family
  misc_feature (1)..(992): Xaa is any amino acid
MKALVSWLKRKKSAFCILTGIISVSLFVISTSKERIKQTTGGSYVVKIMHYGIDSAEMERTVTIPLEDALSAISGVMSVQSSTENNQSRVFVRFKPGVKGRYEAVRDGAQRVYETLPPSAQRPEILSSNNSRVPVWSAAVFSKANFGEVNLGEENLFTAQMLEKIVKPRFESLEGAGEVLISGAGLKEIVISLDQEKLFTIGLHPSAVAEALAMNDSIFSGGTAVLGNREIIITVDGRYGQSLDKALVPLGNGKFIELADIAVITEQEREPDTLSRLNGRKTAGIAIMGRHDADLRKLSSDIKKELAALALPLEFTVLTDAGAEETAAFRSVFNAALSGAIMVAVVSFLLGGKNSANLSGFFCALSIPLICVLSIAVLSILGFTPGRLMLAGIAAGVGTAVDAVILCSEKLRKHISYEGAAAALSELAGPLIAGAATTVAALLPLSRMQDVSVKTIAASIAVICTAALVFSLSLLPPLLLWKVKSGAANFFVKMPVLFKQIQRRLSRLLCKFLAADVKLCFRYPILIPAISLAITAAAALALFAKGVDASSYGSEDSVYAQVEFEGGLLAQEADRLLAAYGEQLSAYAGITNVETGARTGSGSLLVSFDPKQTNAHNVKNLAKSVYIPGGFVFFHESSNRERYWEIRICGDEDKKCRELAEKLAYLCANHPLITERVLNFKQGSKKLILRPDRELFAGTGVGFAVAAAGLRYGVYGPVSYKRMDAKGETDVRIRTGGNVTRQSREGALGLLVSGVRADSLLQTSEEIESAGLRRIDRRRTASITVVTGPMDARRVKRQLEGIFRKIDLPAGYSIEFDPDAISQAEALSATVLSLVMAVIFCYMIIACINESFTIPLLVLSAIPASLAVPALCLALSGSAYNSASACAFIAVSGMTVNAAVLCVDSLYAKTRKINKISTLGIYSALRRKMPALLSTTGTTVAGALPFLFLSEGANLLIRTLSLTGALGVACSCIGSITLIPSLFIIKNHLTKK

SEQ ID NO: 68295 - DNA, 2169 bp, Unknown
  Obtained from environmental sample
  misc_feature (1)..(2169): n is a, c, g, or t
atggcggatcgcttggctgtcgaggagattcaaaaaacggtaaaagaggcggcgtcccttttctcgcgtgacgcgcaaattgaaattgtaagcgacgcttccccttctttgttaagccggataaacggacttttaatttccgccgctttgggcgtgctggcggtgttttgcgtcctcttgttttttatccggcgtcttaaatacagcctgcttgcggcgctttccattcctgtttcggccgcggcgggaatttgcctgctttcgataacgggaagatcgcttaacagcatgagcttaagcgggcttgcaatgggtattggccttgtttccgatattagcgttattattctggacttacttaaccgcacctttgaaaagaaagatactgtccccacttacactcccccggaaagtgaggaaatcggaaacaaggttttttctatcgccggctcaagcgccgcgtctacgcttacgacggctctggtttttctgcctgttatcattctgcccggccctttggggagccttttcggcgatacagccgccgcaattaccgcctccgtcgccgccgggtgggtttacgctcaattttgccttccttcgctgtacagattgttttttaaacttaacgcaaaaaacacagttatcagggacggcagccttgaaaaaaaatattcgaagtttcttttacatctgctgaaatttccggtaaaagttttcaccggcgcggcccttgtggttattataggattactcctgatctttacgcggccggttgttttcataagcccggatgaggcggaagaagtttgggtttcagtgaattacccctccggaaccctgcttgaggcggcgagtattaccgggaaagaaatttcccgtattgtttcagggctgccttccgtaaaaactgtttacggaagagcgggcgccgaggaggaagacgccgcgtgcagggccgatattgattacagaaaagaagattttaccttgcgctgcattcttaaaaaaagttcaaaacccgaaaaagcgttagctgaaatccgcttcgctttggaagaatttgaccaacagccgttttcggtttacttccccaaagacaagacagagaatttactcggtctttcctcactgcgcacttttgtaattaacggcaaggacagggaggaactgctcgaaagggttgataccgcgcatgaagcgtttaagtccgagcggacggaggtaaatttcaggccgagaggggaaaggcccgaactgcggctgtacccgaacagggaagccgccgcgtatcttgcggttgcagccgcgcaaatggcggaaacgctttacacgctgaacgaaggcgttgtagcgagcaggcttgaaattgaaggcaggccgcttgatgtgcgcgtaacaggggaaaccgcttccgacggcgacattatcagccgccttgagaagattcccctgaagaccgcgcagggtaaaaccgtgtatcttggctcgctgggcagaattgagcgcagggaagcggaggcgtctctcgcgcggctggaccgcagcgacgttatctacgcggacattgcccagggcaaaaaaatgaccgaagctgcaaataaaaccgccgctcgtttttcatggtttaagggagccgatgagtcggtttttgtacgttaccgcaatttgctttttctctatgttttccttgtaataattcttctgtatatggtaatcggcgcgcaatttgaatctttcatgcttccgctgattctcatgttgagcattcccttttctctggcgggggcgggacctctgttgttggttacaggttcatttatcgattcgggcgctgttttcgggcttgccgcgctgttcgggcttgttgtgaataacagcctcattctttttgaggtaagcagcgaaaaaatagacgcgggtttttccgtcgcggcggctgtttacaggggagcgtccgaacgcctgcaggcaattttaattacgacggcgaccacggttttcgctcttctgcctttggtattaagccccatgggaaattcgcaaaaatcaatggcggctgtaatgctgggagggcttgcctcgtcgacgctcttgagcctttttgtaattcccccggttctaatcatgtttttcaaatggaaattgcgcaaagagggagttaaatga

SEQ ID NO: 68296 - protein, 722 aa, Unknown
  Obtained from environmental sample
  DOMAIN (524)...(714): Protein export membrane protein
  misc_feature (1)..(722): Xaa is any amino acid
MADRLAVEEIQKTVKEAASLFSRDAQIEIVSDASPSLLSRINGLLISAALGVLAVFCVLLFFIRRLKYSLLAALSIPVSAAAGICLLSITGRSLNSMSLSGLAMGIGLVSDISVIILDLLNRTFEKKDTVPTYTPPESEEIGNKVFSIAGSSAASTLTTALVFLPVIILPGPLGSLFGDTAAAITASVAAGWVYAQFCLPSLYRLFFKLNAKNTVIRDGSLEKKYSKFLLHLLKFPVKVFTGAALVVIIGLLLIFTRPVVFISPDEAEEVWVSVNYPSGTLLEAASITGKEISRIVSGLPSVKTVYGRAGAEEEDAACRADIDYRKEDFTLRCILKKSSKPEKALAEIRFALEEFDQQPFSVYFPKDKTENLLGLSSLRTFVINGKDREELLERVDTAHEAFKSERTEVNFRPRGERPELRLYPNREAAAYLAVAAAQMAETLYTLNEGVVASRLEIEGRPLDVRVTGETASDGDIISRLEKIPLKTAQGKTVYLGSLGRIERREAEASLARLDRSDVIYADIAQGKKMTEAANKTAARFSWFKGADESVFVRYRNLLFLYVFLVIILLYMVIGAQFESFMLPLILMLSIPFSLAGAGPLLLVTGSFIDSGAVFGLAALFGLVVNNSLILFEVSSEKIDAGFSVAAAVYRGASERLQAILITTATTVFALLPLVLSPMGNSQKSMAAVMLGGLASSTLLSLFVIPPVLIMFFKWKLRKEGVK

SEQ ID NO: 68297 - DNA, 699 bp, Unknown
  Obtained from environmental sample
  misc_feature (1)..(699): n is a, c, g, or t
atggctccggacgatacggctgacggcgtcgacgcttttgtcttttggacgcgggagccgaagaatattcttgccaaaacggaagaattggaagaacgcgggtttcgcttctatgtgatggtttcgattacagggtatcccgccgaactggagcctaatatgcctgttttatcgaaggttttggctaatatgaaaaagctttcgcaaaaaatagggcaggatagggtaatttggcgttacgatcctgtcatcttaacaagcgtaacagacgaggattttcattgcaggaattttgattttttggcaagggaactttcggactatgtccggcgggttattatcagtatttatgatgaatatccggcggcgaagaaacggcttgaattaagagaaaagctgggcttgctgcgtatgcttgaaattaacgacagccttccacggctgcttggcagttttgcgaaaagcgcgcaggatgccgggatggaaattcaaagctgcgcggaaaaagaagatttttcttcctttggaattaagggcggcgcgtgtatagacgcggcgttaatcaataaattgtggggaattgaaaccggcggcaaagataaaaaccagcggccccattgcctgtgctgcaagagcgtagacatcggcgcttacggaatctgcgccgcgcattgcgtttactgttactctatccgctga

SEQ ID NO: 68298 - protein, 232 aa, Unknown
  Obtained from environmental sample
  misc_feature (1)..(232): Xaa is any amino acid
MAPDDTADGVDAFVFWTREPKNILAKTEELEERGFRFYVMVSITGYPAELEPNMPVLSKVLANMKKLSQKIGQDRVIWRYDPVILTSVTDEDFHCRNFDFLARELSDYVRRVIISIYDEYPAAKKRLELREKLGLLRMLEINDSLPRLLGSFAKSAQDAGMEIQSCAEKEDFSSFGIKGGACIDAALINKLWGIETGGKDKNQRPHCLCCKSVDIGAYGICAAHCVYCYSIR

SEQ ID NO: 68299 - DNA, 780 bp, Unknown
  Obtained from environmental sample
  misc_feature (1)..(780): n is a, c, g, or t
atggataatgaaaagaaaacaatatttatagaaagacaattattatcaataaacaaaattttcccggtttttgataaaataaaaaaacttaataaatctttggaacaactttacccaatagcaattgttgaggataatgaattttttatttttgacttaaatttgaccggaaatcaatatgaatataaaatgaaatttccctctcaaattaatattccgaatgaagttttagcggctttcccgttggaaggttatgagggaaaaatggcggcagtagttacgcataaagtttttgataatatagaaggaataatttttatttttcatgagtttgttcattgttatcaatattataattatgaaacaaatatcaggaaaacattaacgatagctcaggaagccgaaaaaaagcaggattatatgtgggaattaaattatccgtttccgtataataatgaagaatttataaaaaaaacaattgaaataaataacggttatgatataagaaaataccatatagaaatgaaggccattttaaatgaaaaagaatttgaatacatgatttggcaggaatggaaagaaggctttgcaagatatatagaaaatataatcagggaaaaaaccggtattaaaaggaacagtaaaatattagcgcctccgtttgacagagtttgcttttatgagattgggagtaaatatatagagactttaataaataaagatattgatttaaggaataatttagaaaagattttttatatgataaagaattgcgagtaa

SEQ ID NO: 68300 - protein, 259 aa, Unknown
  Obtained from environmental sample
  misc_feature (1)..(259): Xaa is any amino acid
MDNEKKTIFIERQLLSINKIFPVFDKIKKLNKSLEQLYPIAIVEDNEFFIFDLNLTGNQYEYKMKFPSQINIPNEVLAAFPLEGYEGKMAAVVTHKVFDNIEGIIFIFHEFVHCYQYYNYETNIRKTLTIAQEAEKKQDYMWELNYPFPYNNEEFIKKTIEINNGYDIRKYHIEMKAILNEKEFEYMIWQEWKEGFARYIENIIREKTGIKRNSKILAPPFDRVCFYEIGSKYIETLINKDIDLRNNLEKIFYMIKNCE

SEQ ID NO: 68301 - DNA, 720 bp, Unknown
  Obtained from environmental sample
  misc_feature (1)..(720): n is a, c, g, or t
atgacatatttaacaagttttcacgctatagaagaaaggataaaatcgggaagcgcctgcggtcctttgcttgtcgcaaaatccggcccccgcgccagggaaattgtttcgcttgcgacagatcacaggatacgccttgaacgcgtcggcactttcgacctggacgggctggctcccaaccaccgcggcatcgcacttcaggtagaagacgaaggcggcggcgcggatatcactcttgaggactttatcgccaacctcggcggccgccgtgacgcgcttgttctcatccttgacgaaattaccgaccctcacaactacggcgccatcctgcgctgctgcgatcaattcgcggtggatttggttgtaagcagaaaccgccgcagcgcaaaacacgcaccggtaatttcccaaacatcggcaggcgccgtttcctgggtcgctcaggcggagacacccaaccttgtccgcgccgcggatgatttaaaggaagccggtttctggatttacggcgcggacatggacggcgaccccatttatggaaaagacctaagcggcagaacggcgcttgtcctgggcagcgaaggaagcggcatctcccggctcttgcgcgaacgctgcgacgccatggtagggataccctccctcggcagaattgattcgctcaatgtgtcggtagccgcgggagtgctgttatacgaagtaaggaggcagagggcataa

SEQ ID NO: 68302 - protein, 239 aa, Unknown
  Obtained from environmental sample
  DOMAIN (92)...(232): SpoU rRNA Methylase family
  misc_feature (1)..(239): Xaa is any amino acid
MTYLTSFHAIEERIKSGSACGPLLVAKSGPRAREIVSLATDHRIRLERVGTFDLDGLAPNHRGIALQVEDEGGGADITLEDFIANLGGRRDALVLILDEITDPHNYGAILRCCDQFAVDLVVSRNRRSAKHAPVISQTSAGAVSWVAQAETPNLVRAADDLKEAGFWIYGADMDGDPIYGKDLSGRTALVLGSEGSGISRLLRERCDAMVGIPSLGRIDSLNVSVAAGVLLYEVRRQRA

SEQ ID NO: 68303 - DNA, 1050 bp, Unknown
  Obtained from environmental sample
  misc_feature (1)..(1050): n is a, c, g, or t
ttggagctggctgtggggctttgccggaatggttcttgcggttcccatgacggttattatcagaattatatgcgagaacattccgctcctggagccgatttcaattatgataggttcgcgaaaatccgtacttgcgaaaaaagccgaagaagaacaatgacagttccctgttatcccgattttgttccgttaagcatagcgttaaaggacgccatgcatccgcgcctttcccttaccgcggacggcgtttcggaatttaccttttccggcctttatcttttcagaggcaaatacgattaccgtatttcgcgtaatatttctcatccggatggagaagaaggcggctttattatttccggcagacaaaacggcaaaacttttttttcgactccctgcgagccgccgaatgatgacatactggactctctctttgaaacccacgattactggaaaaatatttcaccttccgtactgagtcccgtcaaagaaaagtttgaaaagaagggcattgtctttgccgaagacagggacaattttgattatctgtactatcgaaacgatttggcggaacttgccggaaagaaatatcacaaaaagaaaaaccatgttaacaattttttagccgcctatcccgatcatgaactgcgccagatgaataaagattatgttccggcggctattgaaattctggatcgatggcggcaagacaaaaacgaagacggcgattacaaagccgcaagggaagcgcttgatttatttgacacgcttacgctgaggggcgcgatttttttcataggcggaaaacccgccgcctattgtcttggagagagcatcgcgcggggcaaaatgtttgccgttcattttgaaaaagcgattgaggaatacaagggcatttaccagtttgtaaatcaggcgttcgcagcgtctttgccgcgttttttcactcttataaaccgcgaacaggacttgggaaacgaaggattaagacaggcaaagatgacttaccgcccctgcggttatgtgcaaaaatacacggggaaaaaatcatga

SEQ ID NO: 68304 - protein, 349 aa, Unknown
  Obtained from environmental sample
  misc_feature (1)..(349): Xaa is any amino acid
MELAVGLCRNGSCGSHDGYYQNYMREHSAPGADFNYDRFAKIRTCEKSRRRTMTVPCYPDFVPLSIALKDAMHPRLSLTADGVSEFTFSGLYLFRGKYDYRISRNISHPDGEEGGFIISGRQNGKTFFSTPCEPPNDDILDSLFETHDYWKNISPSVLSPVKEKFEKKGIVFAEDRDNFDYLYYRNDLAELAGKKYHKKKNHVNNFLAAYPDHELRQMNKDYVPAAIEILDRWRQDKNEDGDYKAAREALDLFDTLTLRGAIFFIGGKPAAYCLGESIARGKMFAVHFEKAIEEYKGIYQFVNQAFAASLPRFFTLINREQDLGNEGLRQAKMTYRPCGYVQKYTGKKS

SEQ ID NO: 68305 - DNA, 1086 bp, Unknown
  Obtained from environmental sample
  misc_feature (1)..(1086): n is a, c, g, or t
atgaaaaaaatagccaatacctttcattcaggccgcgcaatcttttcattattgctgttaatttgctgtattcttgtcggcgctgtgttaaaactcggctcaaaagtgtttttacccttcacaatggctattttattggcttttatcatgtatcctttgataaaattctttgataaaaaacgaattccgcgcattatttcgattttattgatagtaataatgataatttccggtttttacatcttcggagtagtactttatcagaccggaagcaatataaaattcaaatattacttctatgagtcacgaatttttgaaatttataaaaatattgcccatcttgtagggcttcctatcaatgaaagccagagtttttggcaaaatgtctggggtcagcagggaattaagacatgggttcagcaattttccctttctttttcaaaaatctttataggtttcctgtccagcgccggactggtgattcttttcatgatatttattttactggaagcaagttattttaaggaaaaactggatgccgcctttaaaaaccattcagataggattaacagaatggggcacgacttgatgtcccaggttacccgttatcttacggcaaaattcttcttttctctggcaaacggcatcgtgtttttcattgccttcagactgatcgggcttgattttgccctcggctggagtgttatccagtttgttatgaattttatccccactttgggcagtattgttacagccgtgngaatttccctttttgcccttatacagttctggcccaacccggctcccataattctggtcatcgccgtaattttggccgtaaatattatcggaactattcttgatcccaaagtcataggcgaacatgtggggatttcgccctttgtggttctggtttctttgggggtttggagctggctgtggggctttgccggaatggttcttgcggttcccatgacggttattatcagaattatatgcgagaacattccgctcctggagccgatttcaattatgataggttcgcgaaaatccgtacttgcgaaaaaagccgaagaagaacaatga

SEQ ID NO: 68306 - protein, 361 aa, Unknown
  Obtained from environmental sample
  DOMAIN (16)...(337): Domain of unknown function DUF20
  misc_feature (1)..(361): Xaa is any amino acid
MKKIANTFHSGRAIFSLLLLICCILVGAVLKLGSKVFLPFTMAILLAFIMYPLIKFFDKKRIPRIISILLIVIMIISGFYIFGVVLYQTGSNIKFKYYFYESRIFEIYKNIAHLVGLPINESQSFWQNVWGQQGIKTWVQQFSLSFSKIFIGFLSSAGLVILFMIFILLEASYFKEKLDAAFKNHSDRINRMGHDLMSQVTRYLTAKFFFSLANGIVFFIAFRLIGLDFALGWSVIQFVMNFIPTLGSIVTAVXISLFALIQFWPNPAPIILVIAVILAVNIIGTILDPKVIGEHVGISPFVVLVSLGVWSWLWGFAGMVLAVPMTVIIRIICENIPLLEPISIMIGSRKSVLAKKAEEEQ

SEQ ID NO: 68307 - DNA, 828 bp, Unknown
  Obtained from environmental sample
  misc_feature (1)..(828): n is a, c, g, or t
atgggcggccttaaagagaagctgtataattacttcaaccagaattaccagaatatgttcaaccgttacatggtaacgagcgaagatgaaatggtaaaaaaggtcaggaatttcattgataaggaagaaaccaaagtcctttcaaggtatacgccgaaagaaattgccgaccttttggatgccgttggcggcgccgacaagttcaacacaggtgaaattgaaaagtccattgtcaacatgtacggccacctccagggccatgtacagcgcggcgtaaacgagctggaaactcacacaaacagcattttaaggcaaaagaccgataccggcgcttttgtccggggtgaaaacgcgtattcaattgttaagtgcgccttccaggacaattcattgaaacccaagacagttacggatgttaaactttcggtaaacatcctggattcagaacttatcagcccgattttccattatcaggtagctgttgaatacctcttaaaggaccttctaagcaagcaccttatcgattccatcgatcatgccattgagaagctcaaggatgacagggtcgatcagggactggaagagcttacagacagcgaaataatcttcaacaaaatagggcaggttcagaactttaccgatgatgatgttgaaaatccgaagtccaagcgctattccgttatttccaagctcattatggagaagatcgccaatctccggtccgaaatcgatcctgagacctttgatcagctgaatatgagggaaaatatcaagaagatcatcgatattgagaacatccgtaacagggggcttcaataccgccattaa

SEQ ID NO: 68308 - protein, 275 aa, Unknown
  Obtained from environmental sample
  misc_feature (1)..(275): Xaa is any amino acid
MGGLKEKLYNYFNQNYQNMFNRYMVTSEDEMVKKVRNFIDKEETKVLSRYTPKEIADLLDAVGGADKFNTGEIEKSIVNMYGHLQGHVQRGVNELETHTNSILRQKTDTGAFVRGENAYSIVKCAFQDNSLKPKTVTDVKLSVNILDSELISPIFHYQVAVEYLLKDLLSKHLIDSIDHAIEKLKDDRVDQGLEELTDSEIIFNKIGQVQNFTDDDVENPKSKRYSVISKLIMEKIANLRSEIDPETFDQLNMRENIKKIIDIENIRNRGLQYRH

SEQ ID NO: 68309 - DNA, 1053 bp, Unknown
  Obtained from environmental sample
  misc_feature (1)..(1053): n is a, c, g, or t
ttgagaacatccgtaacagggggcttcaataccgccattaactcgatcacttcgattcttgacacctcaaagatgggctatcagtacatcgaaaacctcaagaacgccagggaagtttacattcgggaatacgaagataccgatttggcgaatttgccggatgaaaggtatcagattaagctcaggtattttgacaattcccagcttgttgaagaccgcaaagcctacgaagtacagttaaagagcatcgagaccgaaattcagcatctttgggataccctcgatgttatttacgaagattccaagtccggctttaaagtcaccgatttcaacgatttggcaaagaaaaagaagcccagtatcaagaagaggattaaggacaagaccggcgagcccatgtacgaagacatcgccaaggtatgggatgaaatttcctttgtcggcgttggcgaaaccgaagttgaacgttccaacaggaccttcctcttcgagaaggacaggatcaggacgcgcatcatccttatgcggaacaaaatgaaggaaatgtacgattacctttacccgattgaaaggcgggttatggaagacaggctttccttcttggagaaggaatactatcggtttgactatgcgatcaacccctatcacctgcagcctggaattcttttggatgtggatatcacttccataaagagaaagaaggctacgcttgacgcaatggccaacgtgcttaacgaattcctgtcaggagtttccaaaggcttctcggatgccgctttcgcgtcctttagccgccggcgctccactgtacgggaagaccttgcacagtccttctctgcgagcgaggacgagaaaccggccgctgcggcaaaagcggctccgggtggttccgcctatctggacctcataaatactgatgccccggcctctgtttcaagccccgagccaaaagcgattgcggcgccaaagcgcggcagggcagctaaacccaaggatgcagcgaagagccgcggtcgtccaaaggctactgattcaggattgaaggaagtttaa

SEQ ID NO: 68310 - protein, 350 aa, Unknown
  Obtained from environmental sample
  misc_feature (1)..(350): Xaa is any amino acid
MRTSVTGGFNTAINSITSILDTSKMGYQYIENLKNAREVYIREYEDTDLANLPDERYQIKLRYFDNSQLVEDRKAYEVQLKSIETEIQHLWDTLDVIYEDSKSGFKVTDFNDLAKKKKPSIKKRIKDKTGEPMYEDIAKVWDEISFVGVGETEVERSNRTFLFEKDRIRTRIILMRNKMKEMYDYLYPIERRVMEDRLSFLEKEYYRFDYAINPYHLQPGILLDVDITSIKRKKATLDAMANVLNEFLSGVSKGFSDAAFASFSRRRSTVREDLAQSFSASEDEKPAAAAKAAPGGSAYLDLINTDAPASVSSPEPKAIAAPKRGRAAKPKDAAKSRGRPKATDSGLKEV

SEQ ID NO: 68311 - DNA, 477 bp, Unknown
  Obtained from environmental sample
  misc_feature (1)..(477): n is a, c, g, or t
atgagcaaagaatcgacaaatcttgaggtgctttcaacccgttccggattcaatacggctgtaaggcacatgaataagacaatggaaatatcgggggctttggggtcaagcaaccttggcgatttattgtatgaacggggagacgaaaatctctcgggtgaaaggggcgcgctgctgctccgtatgcttttgatcgataaacttggatataagtcagtttccgtaaacctggaatctgttgcttccgatctccctgccctggcttctgaattcagcaagtggaagggagtggacctaatcgccgcgtattaccaccccgatctggggctactaatagccaatcccaaagtggcggaagagctggcaaattttggtatgctccgcaaaagggagctttgggtttatatgccggaaagggctccagccccgctgacgaaagttgcaaaaagcggcggaactggcggcaaaattctttga

SEQ ID NO: 68312 - protein, 158 aa, Unknown
  Obtained from environmental sample
  misc_feature (1)..(158): Xaa is any amino acid
MSKESTNLEVLSTRSGFNTAVRHMNKTMEISGALGSSNLGDLLYERGDENLSGERGALLLRMLLIDKLGYKSVSVNLESVASDLPALASEFSKWKGVDLIAAYYHPDLGLLIANPKVAEELANFGMLRKRELWVYMPERAPAPLTKVAKSGGTGGKIL

SEQ ID NO: 68313 - DNA, 333 bp, Unknown
  Obtained from environmental sample
  misc_feature (1)..(333): n is a, c, g, or t
gtgaggatgacgccgatgtattcggttgttgtcgccaacgagctcttccataacggaaacgtggaagcctggaagcgcattatagcgagttactgtgccaaatacccgacgcttcaggtatatatttattacgaaggcgagcgcattttggacatcaacaccctgtttaagtgggggaaggtgaaacacggaagttcgattcagtttgcggtttccggcaacgaaattaaagacgtagccaaattgcagcgttatctggttcagggagccagcaaccaatttgaagcgttcctgcacggcccggtgaacaacgtgttaaagctttttggttag

SEQ ID NO: 68314 - protein, 110 aa, Unknown
  Obtained from environmental sample
  misc_feature (1)..(110): Xaa is any amino acid
MRMTPMYSVVVANELFHNGNVEAWKRIIASYCAKYPTLQVYIYYEGERILDINTLFKWGKVKHGSSIQFAVSGNEIKDVAKLQRYLVQGASNQFEAFLHGPVNNVLKLFG

SEQ ID NO: 68315 - DNA, 2304 bp, Unknown
  Obtained from environmental sample
  misc_feature (1)..(2304): n is a, c, g, or t
atgtacgatcatgtatttgagcttttactgcgcctgaaagggaattacctttggcccgcgatgtggacttcatcgttcccgctggacggcccgggaaaccttaacgaagagctggccgacatctacggcgtagtgatgggggcttcccaccatgagccatgcctcagggcaagcgaggaatgggacaaggttcggggaaaggactccgtgtacgggaacgactggaattattataaaaacaaagacgggcttttgaagtactgggaggacgcccttaaaagaagcggaaaatacgaaaaaatcatcacgataggcatgcgcggggaacgcgacagttccatgctcggcaacgcggctttaaaggacaacattgacgtattaaaggatataatcaaaaaccagcgcgaactgataaaaaaacacgttaatcaaaatcttgatgaagttccgcaagttttggcggtatataaagaagtcgaggagtattactacggcgacggacagacgcaaggattaaaggactgggacggtcttgacaatgttatctgcatgctctgcgaggacaacttcggatttatgcgcgctcttcccacggcggataaaaggggacgcaagggcggcttcggcatgtactaccatttcgattaccacggtgggccgatctcatacgaatggatgccctcaatttcttttgagagaacctgggaacaaatgtgcatggcttatgactacgggatcaaagacgtttggattgtcaatgtcggcgatttgaaattcaacgaagtccccctcgcatattttatggagcttgcctatgattttgaaaaatggggaacaaaaacgcctaaccgcatagacgaatatacgtctctttggtttaacaagaatttcccaagcgtgaaaaaagaaacccgcgaaaaaatggcggacgttctgcaaggatttttaagactgaacgccgcaaggcgtcctgaagcgcttaactccgacatttacaacccgtgccattatcttgaagcggacagaatattggttattgtggaaaaaatacattcactaaacgaagaaatatattcctcgctgagtaaaagcgaaaaaaacgcgtattacagcatgatatatttcccggcaaaatccagcgttaatttgttaaaaatgcacttgtacgccggaaaaaacaggcatttcgccggacagggaaagaaactcgccaatatatacgctgatcttgtaaccgcctgcatagaaaaagatcgctctcttaaaaatgaattccatgattttaacggcggtaaatggtcaggcatggaacttgaacagcacgtcggttttacaaaatggaacgaggataattgcagataccccgtaagaattcaagttgaaccggcgtacaagccgcgcttggttgtttcaagaaaagacagagaagcaatctacactaaaacttacggtctcccaatgacagtcattgttgatgattttcttttcgccggaaatgacgaggtgatactggaaatcgccaatgacggaataggcaaacttgattatacaatcgaatttgataaagaatacccgtggcttgaaatcagttcaaaaaaaggaacggttgagtttcaggaagaaataattattaggtgcaatagagacaaacttgacaaacagcgggaagaaaaagcgagattcattataaaagataaagagagcagagtagcggttgaggtaagcgcaaaagttataaatattgatttacctgaaaagacatttttggaaaacaacaatgttattgctattaacgcgaatcatttctgcggtaaaaaagacgtttccaaaggctgctttgcagagctgaaaaattacggcagaacaggctgcggcatgaaagtatttcccgttacatcggactttaatgaaaatgaagaaaagccgtcccttacataccgtttccttatcgaaaaaagcggcgattatgatgtggaagtgtggacaacccccgttaattcggtgcaaaacaaacgcccgctaagatgtcagcttgaaacttccaaaggcgaaaagcagatcatagtaacggttcccgacgatttccgcgccggaagcccctcagacgaaagatggtgtcagggagtgttagacaatattcgcgtgactaaagcgtcatttagctttgagaaaggcgttcaagaaatttcagtaagcgcactggaagccgggcttgtgctggagagggttgttatctatcctaaaaataatccgccgtttaaatcgtatttaggtccgttggaaagttattatttctctatctga

SEQ ID NO: 68316 - protein, 767 aa, Unknown
  Obtained from environmental sample
  misc_feature (1)..(767): Xaa is any amino acid
MYDHVFELLLRLKGNYLWPAMWTSSFPLDGPGNLNEELADIYGVVMGASHHEPCLRASEEWDKVRGKDSVYGNDWNYYKNKDGLLKYWEDALKRSGKYEKIITIGMRGERDSSMLGNAALKDNIDVLKDIIKNQRELIKKHVNQNLDEVPQVLAVYKEVEEYYYGDGQTQGLKDWDGLDNVICMLCEDNFGFMRALPTADKRGRKGGFGMYYHFDYHGGPISYEWMPSISFERTWEQMCMAYDYGIKDVWIVNVGDLKFNEVPLAYFMELAYDFEKWGTKTPNRIDEYTSLWFNKNFPSVKKETREKMADVLQGFLRLNAARRPEALNSDIYNPCHYLEADRILVIVEKIHSLNEEIYSSLSKSEKNAYYSMIYFPAKSSVNLLKMHLYAGKNRHFAGQGKKLANIYADLVTACIEKDRSLKNEFHDFNGGKWSGMELEQHVGFTKWNEDNCRYPVRIQVEPAYKPRLVVSRKDREAIYTKTYGLPMTVIVDDFLFAGNDEVILEIANDGIGKLDYTIEFDKEYPWLEISSKKGTVEFQEEIIIRCNRDKLDKQREEKARFIIKDKESRVAVEVSAKVINIDLPEKTFLENNNVIAINANHFCGKKDVSKGCFAELKNYGRTGCGMKVFPVTSDFNENEEKPSLTYRFLIEKSGDYDVEVWTTPVNSVQNKRPLRCQLETSKGEKQIIVTVPDDFRAGSPSDERWCQGVLDNIRVTKASFSFEKGVQEISVSALEAGLVLERVVIYPKNNPPFKSYLGPLESYYFSI

SEQ ID NO: 68317 - DNA, 1032 bp, Unknown
  Obtained from environmental sample
  misc_feature (1)..(1032): n is a, c, g, or t
atgaaatatccactatttatcatcgttttatcggtatttttatttacccagtgcaaaagcgcgcctaaaaaaattgatgttaagaccgatcctgttgataaggaacttgaagtatttattcaacgaccggaacaaaccctgcctgtaacggcgttcaaagaaatatggggctatgtcatggtagaaagggaagcgtctcttaaaaaaggtctccctctaacggacatcggctacttcgccgctgatgtcaatatttacggctctcttacagccgtcccaaaccgtcaaaatctttcgttttttacgggcagagtgcatttggtggcaaaatgcgacggcaacgctctttcctactttacgctattgccggaaagtccgcagcgtaaaaaattaatcactgatttaatttccgctgcaaaaaattatgacggcttaaatattgactatgagaatatccctccccgttcgggcgaagcgtttatttcttttcttcgtgaattaagagaagggcttccaaaagataaaatattttccatcgctcttgccgcccgcacaaaaaaattaaccaacgatgtttacgattacgaaagaataaaacctcttgtagataaaatttttataatggcttacgacgaacactggagcggaggtccccccggttccgtagcgtcgcttcgctggtgccgcagtgtagcggactattccatgcgcgtaatagggagtgaaaaacttgtcatgggtattccgttctacggacgagcgtgggaagaacaaaaccaccacagggcgcttatttactctactacggaaaaattgataaatactcataatattaaagagataaaacgagaaaacggcatccccacttttgattacgttccgaatgtaaatgtaaaagtttattacgaagatgaatattccatttccgcgcgaatggagatgtacaagtcgatgaaaataaacgccattggtttctggcgcatcgggcaggaaactccaaaagtctgggaaattattcagatagagaaataa

SEQ ID NO: 68318 - protein, 343 aa, Unknown
  Obtained from environmental sample
  SIGNAL (1)...(20)
  DOMAIN (53)...(331): Glycosyl hydrolases family 18
  misc_feature (1)..(343): Xaa is any amino acid
MKYPLFIIVLSVFLFTQCKSAPKKIDVKTDPVDKELEVFIQRPEQTLPVTAFKEIWGYVMVEREASLKKGLPLTDIGYFAADVNIYGSLTAVPNRQNLSFFTGRVHLVAKCDGNALSYFTLLPESPQRKKLITDLISAAKNYDGLNIDYENIPPRSGEAFISFLRELREGLPKDKIFSIALAARTKKLTNDVYDYERIKPLVDKIFIMAYDEHWSGGPPGSVASLRWCRSVADYSMRVIGSEKLVMGIPFYGRAWEEQNHHRALIYSTTEKLINTHNIKEIKRENGIPTFDYVPNVNVKVYYEDEYSISARMEMYKSMKINAIGFWRIGQETPKVWEIIQIEK

SEQ ID NO: 68319 - DNA, 876 bp, Unknown
  Obtained from environmental sample
  misc_feature (1)..(876): n is a, c, g, or t
ttgagtatagggcaggttgttccgcatgaagtcgccggaatggcaaaccacggaaaaaacatctttgtgggaaccggcggaaaagaagcaatcgataaaagccattttgtaggagccgcctacggaatggaaaaaataatgggcaaggttgacacccccgtccgcgcccttttcgacgaaggactgcgccgcttcggcaatgaactgccgccgattctttgggtgctaacggttatctcggcgcggacagagagcgaaaccgcaggcggcagcaaagaacgcagctctctcgcggttcgagggctttacatcggctttggcagggaatgttttgaaaaagccgccgccttatcgcgtcaagttaatgttaacctaatgaacgaatcggttaacaaagcggtagtttaccttgaaccggacgaatttcgtactacttggcttggaaacaaggctatttaccgtacgcgaatggtaatcgcggacggcggcgagcttttaatcctagcccccgccttagagcgtttcggcgaagattcggggatagacgcgttaatacgcaaacacggctaccgccccagcagggaaataatcgccaaggcggcaaccgacccggaacttggcggcaatttaagcgccgccgcccacctgatacacggctccagtgaaaaccgctttacgatacgctattgtccgggaagtaaggtaacaaggcgggaaattgagtctgttggcttccaatggggcgatttaaaagaagcgcaggaaaaatacgacattaacaaactttcttccggctggaataccgtaggcggcgaaaggattttctttgtccccaaccccgcgcttggattgtgggcggagaaagcgaagttttag

SEQ ID NO: 68320 - protein, 291 aa, Unknown
  Obtained from environmental sample
  misc_feature (1)..(291): Xaa is any amino acid
MSIGQVVPHEVAGMANHGKNIFVGTGGKEAIDKSHFVGAAYGMEKIMGKVDTPVRALFDEGLRRFGNELPPILWVLTVISARTESETAGGSKERSSLAVRGLYIGFGRECFEKAAALSRQVNVNLMNESVNKAVVYLEPDEFRTTWLGNKAIYRTRMVIADGGELLILAPALERFGEDSGIDALIRKHGYRPSREIIAKAATDPELGGNLSAAAHLIHGSSENRFTIRYCPGSKVTRREIESVGFQWGDLKEAQEKYDINKLSSGWNTVGGERIFFVPNPALGLWAEKAKF

SEQ ID NO: 68321 - DNA, 861 bp, Unknown
  Obtained from environmental sample
  misc_feature (1)..(861): n is a, c, g, or t
gtgacagaaaattatgtggttgagattctccgcgaggcaaaacggaacggctggcgcggggcaaaattttatttcatgatcggcctgcccgcctgttcacaggcaaatgctgccggttcggcagatacttcatctgccggcgaagaaacggcgattgtcaattttgtcagttccgtcgccaaaaaaacggcgatgcactttaatgtcaacgtaggacttttcgtgcccaagccccacacgccctaccagtgggcgcggcagttggattctgaaaccgcagccaaaaaactcgactttatccgttcaaggctgaaaccccagggccataaggtgagcgtgtgcgatacctttgtttcaatgcttgaaggcattctgagccgaggggacgagcgcgcgggcgatatggctgaacaggccttccgtctgggaacaaggcttgatccctggcaggaatttatttccaaagaagcctggcaaacagcgctggataacagtccggggcttgccgatgaattccttgcggcaaaaaatctggcggaaccgccgccctggggcgttattaacgcgggtgtttcaccggcatacctgcgaaaagagcttgaaaaatccaatcgtggcgaattgaccccgccgtgcaaggaagagtgcggcgaaagatgcggggtatgcaatgagcaattaacaattaacaatgaacaattaacaatgagcaatgacgcagagagggcacggcgtttagccgtgtttgacagaatatgcgcatacagacggcatattagccgtctgattaagaatttctttgctgcgactctagggcagagcacgcagaggaagaaaaaaggatattttcttaaaacttga

SEQ ID NO: 68322 - protein, 286 aa, Unknown
  Obtained from environmental sample
  misc_feature (1)..(286): Xaa is any amino acid
MTENYVVEILREAKRNGWRGAKFYFMIGLPACSQANAAGSADTSSAGEETAIVNFVSSVAKKTAMHFNVNVGLFVPKPHTPYQWARQLDSETAAKKLDFIRSRLKPQGHKVSVCDTFVSMLEGILSRGDERAGDMAEQAFRLGTRLDPWQEFISKEAWQTALDNSPGLADEFLAAKNLAEPPPWGVINAGVSPAYLRKELEKSNRGELTPPCKEECGERCGVCNEQLTINNEQLTMSNDAERARRLAVFDRICAYRRHISRLIKNFFAATLGQSTQRKKKGYFLKT

SEQ ID NO: 68323 - DNA, 933 bp, Unknown
  Obtained from environmental sample
  misc_feature (1)..(933): n is a, c, g, or t
atgagtcttttaagatattttaacaaaataaaagaaaaggacgaagcccgcgcaagagaaatatacaggaataagatttgttatatttttcttgccccttacgctattgtttttattcttttctttgtcgctcccgttataatatcaatattcttcagttttacatattataacattcttgagccccccaagtttctcgggctgcgtaattatatcaacctgttgttaggtgacgatgtatttttaatttcacttaaaaacacttttattatggcggcaattacgggaccaatcggctacattgccgccttcctgtttgcgtggtttattaacgagttaccgcggtatatccgcgcttttgtaactttaattttttacgcgccgtcaatttcaggcgctgtctacatgatatgggcgctgatattttcaggcgacgcctacggttacataaacggacttttaatgagcattggtattcttgatcaaccggtgctttggctgaccgatcccagatatatgatgcctgtaatgcttatagttatcctgtggatgagcttgggcgcgggcttccttgcgttccttgccggtctattcacgattgatccttctctttacgaggcgggtcttgtagacggaatttccaaccgctggcaggaactgtggtatattacgcttcncaatatgaaaggcatgctaatgttcggggcagttatggcaataacccaatccttcggcgtagcggacgttactatcgcgctcgcgggattccccagtacggattacgcagtgcatacggttgttaatcatctgattgattatggctcaatccgttttgagatgggttatgcttccgcaatcgcgacgatattgtttttcacaatgattatctgcaataccgttattcagaaatttcttaagcgtgtaggaacttaa

SEQ ID NO: 68324 - protein, 310 aa, Unknown
  Obtained from environmental sample
  misc_feature (1)..(310): Xaa is any amino acid
MSLLRYFNKIKEKDEARAREIYRNKICYIFLAPYAIVFILFFVAPVIISIFFSFTYYNILEPPKFLGLRNYINLLLGDDVFLISLKNTFIMAAITGPIGYIAAFLFAWFINELPRYIRAFVTLIFYAPSISGAVYMIWALIFSGDAYGYINGLLMSIGILDQPVLWLTDPRYMMPVMLIVILWMSLGAGFLAFLAGLFTIDPSLYEAGLVDGISNRWQELWYITLXNMKGMLMFGAVMAITQSFGVADVTIALAGFPSTDYAVHTVVNHLIDYGSIRFEMGYASAIATILFFTMIICNTVIQKFLKRVGT

SEQ ID NO: 68325 - DNA, 2454 bp, Unknown
  Obtained from environmental sample
  misc_feature (1)..(2454): n is a, c, g, or t
ttggagccgacaggctttcctttcagcgcgtttggggcgacagcggcagcagcccgttttgacaatcagggcaatgagattcgttcatcacaagttgaaaaaccgcgctgggagagcgcgtggttcagagatccgttgggttatgttacggaaccctattcattttatttacagcaaggcgcgaataaaataagacttacaggcgtaaatgaacctttagtgatccgctctttaacaataatggctcctgttaagacccaaaattaccatgattacatttcgagtattaacttgaatgaatataaaaacagccgcagtaattattctttaaagattcaaggggaaagatcgacgcgaagatccgatccttctctgtatcctatttatgatcgttcttcaggcgcgacagaacctccgagcgtggcgagaataaggcttaacatgattggcggtcaaagctggcgcgttgcgggacagtggattgagtgggaatttgaagcgccggaaaacggactttaccgtatttcaattaagggcagacaaaattataaccgcggctttgtttcaaatcgtaccattatgataaacggggaaattcccgttcaagaactttcttcagtgccttttaactacagcaataagtggagtcttaccacgttaggtgataagaacggggactttttattcccattagaagccggtacaaataccattcgcgttcaggcgactatgggcgatatgggtgaaatgcttaatataatggaagaaagcgtttttcgcctgaattcaatctatcgcaaaatacttgtattaaccggaccggagcctgatatttaccgcgattaccgcgttgatgttgtgtatcccgaaattatacaagcgatggaactggagagcagaatactgtttaaactggtggacgatttaacaaggtattcgggagaacgaagcgcgcaggcggcggtcgcgttgactcttgcccgtcagcttgagctttttgtaaaacgccccgacaaaattccaagaacgcttgtcaattttaaaacaaatataagctctctcggcgacagtttgctcgctctctctcagtcacagcttgatatcgactacattgtgcttagcgcatccgattcaaaactgccgtcggtaaatgagaatttctttgtctcggcttcgcacgaaatacgctctttcttcgcgtccttctttgtcgattacaataacctcggcgattttcaccgtaagagcgccgatgttgtcaatgtttggattcttgccggacgcgatcaaagtacaatcttaaaagcgatgatagacgattcttttaccccggtaacgggaataaaagtaaacgtaaaacttgtagccgcggacgcggttatgccggcggttgtagctggtacgggtcccgatatggctcttaccgttccgcagggcgatcccgttaactacgctattcgtaaagcggttatagatgtttcaaaatttccagattatgaggaagcgataaaggacataggtcccagcgcgattattccttttacattcaatgacggcgtatggggtctgccggaaacacagtacttccatgtaatgttttacagaaaagatatttttgaggagcttaaactcccgattcccgacacatgggaagaattaataaatatcctgcctattattcaaaagagcaatatgaatgtaggtattccttctgttgcgactaacgttcagacaagtattgatttttcaaacttcctggcgcacctgttccagcgcggcggtcgtatgtacaatgaagacagttcaagaacgctcttggacagcgaaatcgccatagaagcgtttgatgtttacacaaaatttttcactcactataaaacgccggttgtttatgattttgttaaccgcttccgcaccggtgaaatgccgctcgcgtttgcggattatacaaactttaatactctggaagtatttgcgccggaactccgcggtctgtggggcttttcaagaatgcccggtttgcgcagagcggatggagtagtagatcgctctgtttcaacgggaactcttgccgcaatgattttttccaaggcaaaaaataaagacgccgcgtggcaatttatgaaatggtggatcagcgcggacactcagcttagatacggacgagaacttgaaagcatcatgggcgccgccgcgcgttacccgacggcgaattatgccgctttcagacggctttcatggggctcggagcaaatggcggttcttgatgaacagcgcaaatggacagtcggagtgccggaagtacccggcggatattttataagccgccatattacaaacgcggcgcgtaaaattttaaatgagggtcaggatacgcgcgagactttgttggattataccctcacgatcaacgatgagttgattaaaaaacgcaaagaatttggtttggaatag

SEQ ID NO: 68326 - protein, 817 aa, Unknown
  Obtained from environmental sample
  DOMAIN (414)...(718): Bacterial extracellular solute-binding protein
  misc_feature (1)..(817): Xaa is any amino acid
MEPTGFPFSAFGATAAAARFDNQGNEIRSSQVEKPRWESAWFRDPLGYVTEPYSFYLQQGANKIRLTGVNEPLVIRSLTIMAPVKTQNYHDYISSINLNEYKNSRSNYSLKIQGERSTRRSDPSLYPIYDRSSGATEPPSVARIRLNMIGGQSWRVAGQWIEWEFEAPENGLYRISIKGRQNYNRGFVSNRTIMINGEIPVQELSSVPFNYSNKWSLTTLGDKNGDFLFPLEAGTNTIRVQATMGDMGEMLNIMEESVFRLNSIYRKILVLTGPEPDIYRDYRVDVVYPEIIQAMELESRILFKLVDDLTRYSGERSAQAAVALTLARQLELFVKRPDKIPRTLVNFKTNISSLGDSLLALSQSQLDIDYIVLSASDSKLPSVNENFFVSASHEIRSFFASFFVDYNNLGDFHRKSADVVNVWILAGRDQSTILKAMIDDSFTPVTGIKVNVKLVAADAVMPAVVAGTGPDMALTVPQGDPVNYAIRKAVIDVSKFPDYEEAIKDIGPSAIIPFTFNDGVWGLPETQYFHVMFYRKDIFEELKLPIPDTWEELINILPIIQKSNMNVGIPSVATNVQTSIDFSNFLAHLFQRGGRMYNEDSSRTLLDSEIAIEAFDVYTKFFTHYKTPVVYDFVNRFRTGEMPLAFADYTNFNTLEVFAPELRGLWGFSRMPGLRRADGVVDRSVSTGTLAAMIFSKAKNKDAAWQFMKWWISADTQLRYGRELESIMGAAARYPTANYAAFRRLSWGSEQMAVLDEQRKWTVGVPEVPGGYFISRHITNAARKILNEGQDTRETLLDYTLTINDELIKKRKEFGLE

SEQ ID NO: 68327 - DNA, 1053 bp, Unknown
  Obtained from environmental sample
  misc_feature (1)..(1053): n is a, c, g, or t
atgaacagaaaattgaacgtatatctttgcggtgaaaaaatcggcgaattatttgaagatgatttattgcagctaacgtttcaatattataataacgcctctcctttatctgtccgtttgcctgtaagaacggaaatttatccccatgcctcagcttatccgttttttgagaatttaactccggaaggcgaggcttttgaaatactcacaaaagaccatgtttccggtaataatgttttttccattcttaacaaattcggcggagattgcgccggtgcggtggctttatatgaaacaactcccgataatagcggcgaaaatataagtgaaatatcttcaaaaaaaattgcgcaaataatcgacagacttccgcaggaccctttgcttacaagtattgagaagccgcctcgtctttcattggcgggggctcagtcaaaatttgcggtatacaaattagccggaaaatattatcgttcaagcgatgtaaatcctacgactcatatcattaaaattaccaataaaagatttcctgatttattggaaaacgaattattttgcatgaaacttgcaaaaatggttttatctaacgttcctgaaattgaactattggaagccgaaaatcgtccgtatcttgaaattacaagatatgacagatatgttgaaaataaaacagttcagcgtatacatcaggaagatttttgtcaggcgcttggtattgtttccgataaaaaatatcaggcgggcggcggcgcaaaactaaaagactgttataggattattaacgaattttctgaaaatcgtctttcggatattatccgatttacggaatggattattttcaattatttaatcggtaatacggacgcccatgcaaaaaatttgtctttgcttcatacaagttcaggaattcaacttgctccattttatgatttactgtcaaccgaggtttaccctgaaaacatcatcgaccatgaaacggctatgcttataaacggcaaggggaaatacagttctctaaatccaaagattttattgcgttgtttgaaaatttag

SEQ ID NO: 68328 - protein, 350 aa, Unknown
  Obtained from environmental sample
  DOMAIN (139)...(218): HipA-like N-terminal domain
  misc_feature (1)..(350): Xaa is any amino acid
MNRKLNVYLCGEKIGELFEDDLLQLTFQYYNNASPLSVRLPVRTEIYPHASAYPFFENLTPEGEAFEILTKDHVSGNNVFSILNKFGGDCAGAVALYETTPDNSGENISEISSKKIAQIIDRLPQDPLLTSIEKPPRLSLAGAQSKFAVYKLAGKYYRSSDVNPTTHIIKITNKRFPDLLENELFCMKLAKMVLSNVPEIELLEAENRPYLEITRYDRYVENKTVQRIHQEDFCQALGIVSDKKYQAGGGAKLKDCYRIINEFSENRLSDIIRFTEWIIFNYLIGNTDAHAKNLSLLHTSSGIQLAPFYDLLSTEVYPENIIDHETAMLINGKGKYSSLNPKILLRCLKI

SEQ ID NO: 68329 - DNA, 1353 bp, Unknown
  Obtained from environmental sample
  misc_feature (1)..(1353): n is a, c, g, or t
atgactgatgccggtctcttagaaaagataaattcaaaacggtctgcggaaattttcgcggaactttacggagagcatgaaattgacgccgcaaaacagcgatatacatcgttaatttcgggagcgcaaaaagaaaaagcggagttcggcggcgatcaggaaaacttgcggattttcagcgcacccggaagaacggaactggcgggcaatcacaccgaccacaacagggggaaagtgcttgcggcatccattcaacttgataatgccgccattgcgcaaaaaagaaacgacagcattgtatttttccgctcaacagctttccccgatgtaaaagttaaattgacagataaaaacggcgctcccgatttacagccgaagcccgaagaaaaaggaacgacagaagcgctcgttaggggaatagccgcagaattatcaaaccgaggctgcaaaacaggcggcttttcagctaacgccgattccagcgtgtttgcaggttcgggactgtcatcatcggcggcgcttgaaacgcttatatgccgtattttcgattctctttacggcgagggaaaacgcggcgcattggaaatagcgcaaatcggtcaaacagcggaaaacgttcactttggaaaaccctgcggattaatggatcaggcggcgtgcgcctgcggcggcgcagtagcgattgatttcgccgatacttcacgccccgtaataaaacaaattaatttcgatctcgccgcagagggttatgctctctgcgtagtgaacacaggcggcagtcacgccgatcttaccgccgattacgcttccattccggcggaaatgaaatccgtcgctgtgtttttcggcaagactgtacttggagagttggaaaaagaaaccgttctttcccgagccgccgaagtgcgaagttcattgggagacagggcttttttacgcgccattcactttttcaacgaaaacgaaagagtagacgcaatgaccgcaattttattggaaatggaaaagccagcaacagccgccgacaaaaaacgggcgttaagccgctatttggagttggtcaacgagtcgggcgattcctcatgggagtttttacaaaacgtattctcccctactcgtccaaaagatcaaggcatcgctgcggctctcgctctgacaaaagattttttccgcaaacaaaacctgcaaggagcgtgcagagtccacggcggcggtttcgccggaaccattcaaacttatgtccctgtagacgcaatgaccgcctaccgcacgcacatcgaagccgtattcggcgcaaattcgctgacagtattacggataaggtctaggggcgcggtggaattggagttttag

SEQ ID NO: 68330 - protein, 450 aa, Unknown
  Obtained from environmental sample
  DOMAIN (155)...(224): GHMP kinases N terminal domain
  misc_feature (1)..(450): Xaa is any amino acid
MTDAGLLEKINSKRSAEIFAELYGEHEIDAAKQRYTSLISGAQKEKAEFGGDQENLRIFSAPGRTELAGNHTDHNRGKVLAASIQLDNAAIAQKRNDSIVFFRSTAFPDVKVKLTDKNGAPDLQPKPEEKGTTEALVRGIAAELSNRGCKTGGFSANADSSVFAGSGLSSSAALETLICRIFDSLYGEGKRGALEIAQIGQTAENVHFGKPCGLMDQAACACGGAVAIDFADTSRPVIKQINFDLAAEGYALCVVNTGGSHADLTADYASIPAEMKSVAVFFGKTVLGELEKETVLSRAAEVRSSLGDRAFLRAIHFFNENERVDAMTAILLEMEKPATAADKKRALSRYLELVNESGDSSWEFLQNVFSPTRPKDQGIAAALALTKDFFRKQNLQGACRVHGGGFAGTIQTYVPVDAMTAYRTHIEAVFGANSLTVLRIRSRGAVELEF

SEQ ID NO: 68331 - DNA, 612 bp, Unknown
  Obtained from environmental sample
  misc_feature (1)..(612): n is a, c, g, or t
atgaaccttgcaaacaaattatcatttttccgtattatcctcgcccccgtgtttttcatcatttatcttatgcctcgcttttttccttcgctattcctgaacggagcggtatggacagtgccggcgctttggggcatttctgtcgtttctgaaataaccgactatttcgacggttttgccgcccgcaaactcaacctgacaagcgactttggaaaactgctagaccctttcgccgacacgcttacgcaaattacttttttcctttgttttataattgacggaacttttcccgggggtatttttccggtaattttatttttaatagttgtttaccgtgaattcgccattatgttccttcgcaacttgatggcgaaaaaaggcattgctatgggcgcgcgcatgggcggaaaaataaaaaccgtcgcatatatcaccgcggcggcaatcgctctcttaaccgaaagttttgaacgattggaagtattaacatcgattttaccgtatataaaaatcggcgcgcttattgcctttactatttccgtaaccatttcggtaatttcgttttttgactatcttttaatttacaaaaaaacggcggacataaaagcgtaa

SEQ ID NO: 68332 - protein, 203 aa, Unknown
  Obtained from environmental sample
  DOMAIN (44)...(194): CDP-alcohol phosphatidyltransferase
  misc_feature (1)..(203): Xaa is any amino acid
MNLANKLSFFRIILAPVFFIIYLMPRFFPSLFLNGAVWTVPALWGISVVSEITDYFDGFAARKLNLTSDFGKLLDPFADTLTQITFFLCFIIDGTFPGGIFPVILFLIVVYREFAIMFLRNLMAKKGIAMGARMGGKIKTVAYITAAAIALLTESFERLEVLTSILPYIKIGALIAFTISVTISVISFFDYLLIYKKTADIKA

SEQ ID NO: 68333 - DNA, 834 bp, Unknown
  Obtained from environmental sample
  misc_feature (1)..(834): n is a, c, g, or t
atgacagattggccgagactgctcgaagcgggagagataacaagcgaggacgaagaacttataaacactctgcgtccgtaccgagataaattaattgtaacagtaaacaagacggaaggcggcaggcacgaagccgacgcgtggaatgttctcaccttcggttttgaaaaagttttaatgatctccgccgagcatggcgacaatatcggcgaacttcaacaggagataataaagcgtcttgatttttccaaagtggaagaagcgcaggaagaaaaagttatcaggattgcgcttttgggcaaacccaacacaggcaagtccacgctgtcaaacagactgacaggagccaacgcttctatcgttagcgaaattcccggcacgacaagggacactgttgaggggcgtttcagttggaaatcacgcaattttattatcatggataccgcaggcattagacgcaaggcaaaggtaaacgaaaacatcgaatactattccgtaaacagagccattaaaacaattagcgacgcggatattgttatactgatgattgacgccgtagagggactttccgatcaagacaagaaaatagccgccctcgctcatgacaagggcaggggtataattatggcgctcaacaaatgggatacaatgccccagcaaaaaaatacgtttaaggacgctgaaggaaaaattcattttcagttcgggcaaatggaatacgcgccgattatccccgtcagcgcaaaagacggctccggcgtcgataaactgctgaatacggcgataaaaatgtacggacagcttaatctgcaaataggaacatcacagctttaa

SEQ ID NO: 68334 - protein, 277 aa, Unknown
  Obtained from environmental sample
  DOMAIN (96)...(215): Dynamin family
  misc_feature (1)..(277): Xaa is any amino acid
MTDWPRLLEAGEITSEDEELINTLRPYRDKLIVTVNKTEGGRHEADAWNVLTFGFEKVLMISAEHGDNIGELQQEIIKRLDFSKVEEAQEEKVIRIALLGKPNTGKSTLSNRLTGANASIVSEIPGTTRDTVEGRFSWKSRNFIIMDTAGIRRKAKVNENIEYYSVNRAIKTISDADIVILMIDAVEGLSDQDKKIAALAHDKGRGIIMALNKWDTMPQQKNTFKDAEGKIHFQFGQMEYAPIIPVSAKDGSGVDKLLNTAIKMYGQLNLQIGTSQL

SEQ ID NO: 68335 - DNA, 2166 bp, Unknown
  Obtained from environmental sample
  misc_feature (1)..(2166): n is a, c, g, or t
atgccgaactgtttatattatcggacgagaaaaccattattctttggggaagcattgatgaattctaaatcaaatcgtaaacagttaaatgaagaacaaaaaagagccgctttctgcaaagataacgccgttgtttccgccggcgcgggatcgggtaagactatggtgcttgcgcatcgatttgtatggcttctaacagagaaagattataaagtagatgaaatattaactttaacctttacaaaaaaagccgccgctcaaatgtttaagaggatttattcgctggtttcgcaaatcgctcaggaagagagcggcgtgcaggcgcagagggcgcaaaaagcgcttgatgattttattcacgcaagaattcaaactttggactcttacagcgcttcaatcgtaaaacaatgcgcgccccgttacgggataagtcccgattttcagattgatcagcagaggtgctataatatcgctcttgaagtttcgtatcccttttttatcgcgcaccgccaccaccctgccgtaaaaagactttattcgggaaaccgcccgaacggcattgtccgcaatatattcgccgatgttttgtttaattactgtttaatcgacaagcctagagatttttcggctgatttgaaatttcagtttgatactctttgttcccagtgggacagctacattaaaaatataagaaaactgttatatgaaataaaacttgatatcggcaacgataattctctgctccctgttcttgtccccataattgagaaagaaaaaaatgataagattgatatacccacaaccgatgatatacaaaaatattttattcaattacaaaatactccgctggaatcggtaattgatgaagcagaatctcaccctctgcaaaaatcatttttaaaatttttgttttttgtaaatgacatacaaagcgcaagtttaaggggaggaaaacgttccgacaatcctgtaaaaaacaacattcatcttcttcgtgatatttacgagcctttttcttctttgacaatttcgtgtatgcaggcgggatttatcacttctataatgtctctgcttgaaaaattgcaaaaacgctatcttgcaagaaaacgggcggagggcgttcttacattccgcgatgtggcaagtctttccagaactatacttatcgaacaacccgatataaggcgcagtgaaaaagatacttttaaatcgataatgatagacgagtttcaggataacaatgaactgcaaaaagacattctttttcttcttgccgaaaaacgcaacaaattgaataagggcgttccgcctgcggaagatttggacatgggaaaattattttttgtcggcgatgaaaaacagtcgatttatatgttcaggggcgcggacgtttccgttttccgcaaattaaaagaagaaataaaaggcgataaccttcccttaactacaaattatcgttcatcagccggtttaatcggcgcttttaacgctattttcggcggaatttatccagactcagacggaaataatcagccgtcaaaatacaattccgttttcgctcaatccaaatccctcccccactttgaagccgaatacacgcctcttcaatcggttatttcggaaagcggaaaattatcgctttttattttgaacaaaaaatccgagacagaagatgatgatgatcagcttaccgccgatgaaaatgaagcgagatttaccgccgaaaaaataaaacaactgttatctgaaaactatcagccggacgacatcgcaattcttttccgtacccgctcaactcaatatctgtatgaaaaacatttaagaacactcggtatcccttacgcctgcgaagatattaacgatttattttacggcggtcccgtaaacgacattttatcggttcttcggctgaccgctcacccgatggataaagccgcctacgctgaaatgcttcgctcgccttttgccggtctttctttttcgggaacagccgtgtgtctttccttctgctgtgatgaaaataatatttctcagccgttcgacgataaaccgcttgcctctcttgaagacgccgacaaagaaaaatatctttgcggaaaaaatgtctattcgtcaatttgcgagaaggcaaaagaaaaaagatcctcgtccgctcggccgatctga

SEQ ID NO: 68336 - protein, 721 aa, Unknown
  Obtained from environmental sample
  DOMAIN (29)...(716): UvrD/REP helicase
  misc_feature (1)..(721): Xaa is any amino acid
MPNCLYYRTRKPLFFGEALMNSKSNRKQLNEEQKRAAFCKDNAVVSAGAGSGKTMVLAHRFVWLLTEKDYKVDEILTLTFTKKAAAQMFKRIYSLVSQIAQEESGVQAQRAQKALDDFIHARIQTLDSYSASIVKQCAPRYGISPDFQIDQQRCYNIALEVSYPFFIAHRHHPAVKRLYSGNRPNGIVRNIFADVLFNYCLIDKPRDFSADLKFQFDTLCSQWDSYIKNIRKLLYEIKLDIGNDNSLLPVLVPIIEKEKNDKIDIPTTDDIQKYFIQLQNTPLESVIDEAESHPLQKSFLKFLFFVNDIQSASLRGGKRSDNPVKNNIHLLRDIYEPFSSLTISCMQAGFITSIMSLLEKLQKRYLARKRAEGVLTFRDVASLSRTILIEQPDIRRSEKDTFKSIMIDEFQDNNELQKDILFLLAEKRNKLNKGVPPAEDLDMGKLFFVGDEKQSIYMFRGADVSVFRKLKEEIKGDNLPLTTNYRSSAGLIGAFNAIFGGIYPDSDGNNQPSKYNSVFAQSKSLPHFEAEYTPLQSVISESGKLSLFILNKKSETEDDDDQLTADENEARFTAEKIKQLLSENYQPDDIAILFRTRSTQYLYEKHLRTLGIPYACEDINDLFYGGPVNDILSVLRLTAHPMDKAAYAEMLRSPFAGLSFSGTAVCLSFCCDENNISQPFDDKPLASLEDADKEKYLCGKNVYSSICEKAKEKRSSSARPI

SEQ ID NO: 68337 - DNA, 1662 bp, Unknown
  Obtained from environmental sample
  misc_feature (1)..(1662): n is a, c, g, or t
atggaaaactgcgttgaagaaacagacttaattctttcccgttgtatttccgaacttatgaaccttgtagagatagaaaaaagtttccccgacgtgaaagcggctcaacctttcaaattttatacggaatatttagatgaaattcagtatcttcctcagcagaaattttcaggcgtggcgattcttccgtataaaacagcggcggcggctcattttgactgccatattattctgggagcgggacaggaaagcctatccgttgtttattcacgtcttgcttttttacccaaaaaaaagcgagagaaattgggtattcccgatgaagacgcttctttggaatttatcaatatgcacaaatataactctgaaaaaatatcggctttcttttgcagtgaacaaactttttcgggctttgctattccgcattcaagaattaacgccccttcagagccaaaaacgtcttattctacagatacggcgtttgccgataaatttgcgcatgactcttttaaaacggaaaattctttttattcttcgctttcaaataaagaaaagagtcagaaactgcatgataaccagataaacggatttacaaattggaaaaaccgcagagcgggaaaaagcgcatcaagcggaaaatggactgcgagtgaggaaataaagaacagcataaaaaaagccttcgcaaaatcaggcaagtacagtgtttccgccacatcgcttcaaaaatattatcaatgctcttttaagtggctctttggaaatgtcttcggtatcgagaatacgcaaatagaaactaccctgatggcggaaaatatatcgggtcttgtttaccacgccgtattaaataattttttcacagagctgaaaaatgacgctcccctgctcgctcccgtgcaaactgattccggtctgtctctccctccttcttacagcgctctcctcgaaaaaagcgtaaataaaatttttgactgttttccgttattggaacaggacggtcattcacaaatgagcgcattaaccgcccgtctgttatacgccggaaaagatgatgtccattatcatcttgatcgatgcctttcttcttttctttctttttttgccggaaacaaagtcgcgggaagcgagtgtaattataaatatgaaaaagacacatatatacttaacggatttattgactgcgttctaaaagaaaatcgtgatggaatcgataaatatgttattgtcgattttaagttaaaaaatttgcccaaccgcggcgattgcacggcggaagacgaaacgcctcttgcggactttcagcttcccatgtatataactttaatcgaaaaaaatgaacaattcgacgtatacaccgctctcttttacagcattatcgatcaaaaatccgaagtaataatcggaacaatctacaatgaaaacacaaataaaaccattcccgctaaagaagaagatcaaattgaccgaagtaaggaacgttataagaaaatttttgaagaattccaaagtaagacggagcagtttacgaatgaaatatcatcgggtgattttactgtttttccgcagagtaacagcgagtgtaacgattgtaactatcagcgtatatgccgaactgtttatattatcggacgagaaaaccattattctttggggaagcattga

SEQ ID NO: 68338 - protein, 553 aa, Unknown
  Obtained from environmental sample
  misc_feature (1)..(553): Xaa is any amino acid
MENCVEETDLILSRCISELMNLVEIEKSFPDVKAAQPFKFYTEYLDEIQYLPQQKFSGVAILPYKTAAAAHFDCHIILGAGQESLSVVYSRLAFLPKKKREKLGIPDEDASLEFINMHKYNSEKISAFFCSEQTFSGFAIPHSRINAPSEPKTSYSTDTAFADKFAHDSFKTENSFYSSLSNKEKSQKLHDNQINGFTNWKNRRAGKSASSGKWTASEEIKNSIKKAFAKSGKYSVSATSLQKYYQCSFKWLFGNVFGIENTQIETTLMAENISGLVYHAVLNNFFTELKNDAPLLAPVQTDSGLSLPPSYSALLEKSVNKIFDCFPLLEQDGHSQMSALTARLLYAGKDDVHYHLDRCLSSFLSFFAGNKVAGSECNYKYEKDTYILNGFIDCVLKENRDGIDKYVIVDFKLKNLPNRGDCTAEDETPLADFQLPMYITLIEKNEQFDVYTALFYSIIDQKSEVIIGTIYNENTNKTIPAKEEDQIDRSKERYKKIFEEFQSKTEQFTNEISSGDFTVFPQSNSECNDCNYQRICRTVYIIGRENHYSLGKH

SEQ ID NO: 68339 - DNA, 957 bp, Unknown
  Obtained from environmental sample
  misc_feature (1)..(957): n is a, c, g, or t
gtgcagaataaaaaaagcatcccttccgtgcttagaaaaatattcgtaagtaatattgtcaatgaaaacgcgcaagccgcacagcagggaaaaacgcctgttttttcatcattaatcaaagttgaatacgctcaaacggcggctcaatttacaccgtggcttacttccgtactgccgcagcttggcggctggtttaacagggttacgggcttaaaaaccgacaacattctcgggaaagatgcggaaactgcggcggacaaaatggaaggcgacgatagggatatattcgccctcgcaaggcgttatgcgctttttcttgatgagcataaactttttgaacctgcgtgggaaactccgccgtttaatgatgagggaaaagaagtttttattttcttccctgaatcgctttccgattacggcgaatacagggaattgctggcggacagcaaacacgttaagacgcttaatgcgcctaataccgataacttaaaaagcaatacttttttttataccaattcccgaagcgaaataaaagaagccgctctttatattcgctccttaaatgaaaatcatggcgttagctgggattcaatcgccgtttgtataacaaactccgagaattacgaaccttatgtactgcgtgagtttaccaacagaaatatcccgttcgtaaaacgcaccagtaaaattctctccgattatccggcgggcggttttttccgatccatacttgactgcgcttcacaggattttactttctccgctcttgtttccctagtcatgaataaaaatcttccttggaaaaaggaacttcctatagaagaattagtgcaattcggaatagaaaacaactgtctttattcgtggatagaagaaattgacggggaagaaaaatatatcaatgtatgggaagacgctcttaaaaaaccgaattcaccgcttatgacaataaaataa

SEQ ID NO: 68340 - protein, 318 aa, Unknown
  Obtained from environmental sample
  misc_feature (1)..(318): Xaa is any amino acid
MQNKKSIPSVLRKIFVSNIVNENAQAAQQGKTPVFSSLIKVEYAQTAAQFTPWLTSVLPQLGGWFNRVTGLKTDNILGKDAETAADKMEGDDRDIFALARRYALFLDEHKLFEPAWETPPFNDEGKEVFIFFPESLSDYGEYRELLADSKHVKTLNAPNTDNLKSNTFFYTNSRSEIKEAALYIRSLNENHGVSWDSIAVCITNSENYEPYVLREFTNRNIPFVKRTSKILSDYPAGGFFRSILDCASQDFTFSALVSLVMNKNLPWKKELPIEELVQFGIENNCLYSWIEEIDGEEKYINVWEDALKKPNSPLMTIK

SEQ ID NO: 68341 - DNA, 1020 bp, Unknown
  Obtained from environmental sample
  misc_feature (1)..(1020): n is a, c, g, or t
atgaagaccatatttgtcgttgacgacagcgataccaacctgacgatggcagagtcggcattggaagaccaataccgcgttatgacaatgccgtcagcggcaagtatgttctcgtttttggaaaaagttattcccgatttaatccttctggatatagaaatgccggaaatggacggctttgaagcgcttgcgaaacttaagactaaagaaagattcagcgaaattcccattatgtttttaacaggccgcaccgacgcggatgtggaagcgcgcggttttgaaatgggcgcgattgattttgttacaaagccgttctccgcgcccgtccttttaaaccgcataaagactcaccttgatattgatcaggttatccgcgagcggacggcgcagttacgcaggcttcaaaacaatatagtgtctgttctggcggacatggtggaaaaccgcgacaaggggacaggcggccatattgaacgcacttcaatttatataaaaattctgatagaggaaatgaaagagcgcggagtttatcttgatgaaatccgcgattgggacgtggataaaatagtttcttccgcgcgtatgcacgatctggggaaaatctccattaccgatattattgtgaacagccctgataaacttaccgataaagaatatgagttaataaaaacacatactatcgaaggtgaaatgataattgacgagataatctccaaaaccggagaagatgaatttttgcacagcgcgcggctttttgccggctgtcatcatgaacgatgggacggcaaggggtatccgcgcggtttaataggagagaaaatccccctacagggacgcatcatggctattgttgatgtatatgacgctcttgtttcggaaagaccttataaaaaagcgttttccgacgaagaagcggtgcagataattatggataatgccggcgttcattatgatccgaaaatagccgaagtttttttttctgtaagggatcaatttaaggctgtaagggcaaaattgtaa

SEQ ID NO: 68342 - protein, 339 aa, Unknown
  Obtained from environmental sample
  DOMAIN (153)...(290): HD domain
  misc_feature (1)..(339): Xaa is any amino acid
MKTIFVVDDSDTNLTMAESALEDQYRVMTMPSAASMFSFLEKVIPDLILLDIEMPEMDGFEALAKLKTKERFSEIPIMFLTGRTDADVEARGFEMGAIDFVTKPFSAPVLLNRIKTHLDIDQVIRERTAQLRRLQNNIVSVLADMVENRDKGTGGHIERTSIYIKILIEEMKERGVYLDEIRDWDVDKIVSSARMHDLGKISITDIIVNSPDKLTDKEYELIKTHTIEGEMIIDEIISKTGEDEFLHSARLFAGCHHERWDGKGYPRGLIGEKIPLQGRIMAIVDVYDALVSERPYKKAFSDEEAVQIIMDNAGVHYDPKIAEVFFSVRDQFKAVRAKL

SEQ ID NO: 68343 - DNA, 2856 bp, Unknown
  Obtained from environmental sample
  misc_feature (1)..(2856): n is a, c, g, or t
gtgaacaagtactacctcgcagtgccgggcatcgtgcaggcggagatggacaaactcgccaaaatcatcgggcggcagtatcatgtattcgattatcacggcgcgaaagacgcggaaaaagtaatcgtcatcatgggttccggcgcggaaacctgcgaggaaaccgttgattaccttaactcaaagggagagaaaaccggcctggtgaaagtacacctgtaccgcccctttgacgtaagcctctttgtaaaggccctgccttccacggtaaaagccattgccgtcctcgaccgcaccaaagacccgggcgcaatcggcgaacccttatacgaagatgtccgcaccgcaatcgcagaggcgcaggccaacggcagtttcaaagccaacccgattgtgctgggcgggcgctacgggcttggttcaaaagaattcacccccacaatggttaaagcggtgtttgacaacctttccggcaagaaaatcgccaacttcatcgtcggcgttaatgacgacgtggggcacaagagtctggattacgatccgaatttcgtactggaagaagaaggcctgaacgaagccctgttctacgggcttggagcagacggcacggtcggcgcgaacaagaactcaatcaagatcatcagcgaggcgaaaccggaactcaacgcccaggcgtacttctcttacgactcgaaaaagtcaaacggctttaccgtttcgcacctccgcttcggcaagggccgtatcaggaggccctaccttatcaactccgcggacttcctcgcctgccataaattttcctacatggaaatgtacgacatgctcaaaagcgttaagacaggcggaaccttcctcctcaacagccccttcaaggccgccgacgtatggaagaatatccccgtagaggcccagaaacagatcattgacaaaaagcttaagttctacgtaatcaacgccgccgaaattgcgcataacaccggtatgggcaaccgcatcaacacggtcatgcaggccgcttatttcaagatttccggcatattgtcagaagaagaagcggtaagacgcatgaaggaacatatcgaacattcctacggcaagaagggcaaagacgtagtagaaaagaactacaaaaccgtagacgcgtcattaaccgccgttgaggaagtaaaatatccttccaagaccgaaggcgacatccacatgaaaaaaccctttgccaccgcaaaggatccatggatcaaggaagttctcggaactatgtcggtacaggaaggcgacaacctgcccgtcagcaaacttccggaagacggaacattcccgacagccactacccagtacgaaaaacggtctgtcgcggagcgcgttcccctttggaatcccgaagtctgtatacagtgcggtaactgtacggtcgtatgtccgcacgcgtgtatgcgctttaagaatcttacagacgatcaggttgcgaaagcgcctaaaggatttaagaccgcggaaattaagccgaaaccggtagccggacagaaagcggcattggttatcgcgtgcgaagactgttacagctgcggcgtttgttttaatatctgcccaatgtccaataaaggtcaggagaaaccggcgttgtcatggaaatcttacgcggacgatcatgaattgcacgcggaacaggtagccgtttgggattacttcctttcattgcccgaaacaccggcgggagaacttatatcgccgaaagcgcttgcctacaaacgccccctgtttgaattctccggcgcgtgcggcggctgcggcgaaactccctatgttaaacttatgtcccagttgttcggcgaccgcgcgatcatcgccaacgccacgggttgttcctccatttacggcggaaacctcccgaccacgccttactgccagcgcgcggacggacgcgggccggcatggtcgaacagcttgttcgaggacgccgctgaatttgcgatgggcttccgtcttacaagcgacaagctcgccgttcatgcccgcgaaatcgccgaaaaggcaaagagcgaaggcatcgcggcggcaacaatcgacaagattctttccaacaaccaggccgacgacgcggcaattgacgagcttcgcaaaaacattgacgcgcttaaagccgaacttaaaaacaattccaaacccactgcaaaacttttggtttcgttagccgactattttgtaaaacgttcagtgtgggcgttcggcggcgacggctgggcttacgacataggcttcggcggactggatcacgttatcgcttccggcaagaacgttaacctcttgtgcatggataccgaggtttattccaacaccggcggacagatgtcaaaatcgactcctgtcggcgcgattgcgaaattcgccaatgccggaaaggatattacaaagaaggatcttggcgcgatagcgatgagctacggttatgtgtatgtcgccaaagtttcgttaggcgcaaatatgccgcaggtaatcaaagcgttccgcgaagcggaatcttacgacggcccgtcgcttataatcgcgtactcgcactgcatcaaccacggaatcgacatgagcaaggggcttgagcagggcaaagcggttgtatcaagcggactttggcccttgtaccgctacgatccgcggcttaaggatcagggaaagaatcccttccagcttgactcgaaggatccgacgacgagcatagaagattttatgtacaaagaagtacgtttcaagagcttaaaagccgctaatcccggccgcgcagacgcgttgcttgcaaaagcgaaagcccatgcggaaagagtttggaaagagtacaaatatttggcggaacgtccgttctaa

SEQ ID NO: 68344 - protein, 951 aa, Unknown
  Obtained from environmental sample
  DOMAIN (456)...(479): 4Fe-4S binding domain
  misc_feature (1)..(951): Xaa is any amino acid
MNKYYLAVPGIVQAEMDKLAKIIGRQYHVFDYHGAKDAEKVIVIMGSGAETCEETVDYLNSKGEKTGLVKVHLYRPFDVSLFVKALPSTVKAIAVLDRTKDPGAIGEPLYEDVRTAIAEAQANGSFKANPIVLGGRYGLGSKEFTPTMVKAVFDNLSGKKIANFIVGVNDDVGHKSLDYDPNFVLEEEGLNEALFYGLGADGTVGANKNSIKIISEAKPELNAQAYFSYDSKKSNGFTVSHLRFGKGRIRRPYLINSADFLACHKFSYMEMYDMLKSVKTGGTFLLNSPFKAADVWKNIPVEAQKQIIDKKLKFYVINAAEIAHNTGMGNRINTVMQAAYFKISGILSEEEAVRRMKEHIEHSYGKKGKDVVEKNYKTVDASLTAVEEVKYPSKTEGDIHMKKPFATAKDPWIKEVLGTMSVQEGDNLPVSKLPEDGTFPTATTQYEKRSVAERVPLWNPEVCIQCGNCTVVCPHACMRFKNLTDDQVAKAPKGFKTAEIKPKPVAGQKAALVIACEDCYSCGVCFNICPMSNKGQEKPALSWKSYADDHELHAEQVAVWDYFLSLPETPAGELISPKALAYKRPLFEFSGACGGCGETPYVKLMSQLFGDRAIIANATGCSSIYGGNLPTTPYCQRADGRGPAWSNSLFEDAAEFAMGFRLTSDKLAVHAREIAEKAKSEGIAAATIDKILSNNQADDAAIDELRKNIDALKAELKNNSKPTAKLLVSLADYFVKRSVWAFGGDGWAYDIGFGGLDHVIASGKNVNLLCMDTEVYSNTGGQMSKSTPVGAIAKFANAGKDITKKDLGAIAMSYGYVYVAKVSLGANMPQVIKAFREAESYDGPSLIIAYSHCINHGIDMSKGLEQGKAVVSSGLWPLYRYDPRLKDQGKNPFQLDSKDPTTSIEDFMYKEVRFKSLKAANPGRADALLAKAKAHAERVWKEYKYLAERPF

SEQ ID NO: 68345 - DNA, 1254 bp, Unknown
  Obtained from environmental sample
  misc_feature (1)..(1254): n is a, c, g, or t
ttggacgatttaaacgatctagcccaattaaaggatgatataaataaactgctgaacggcagaaaccggaaagatttacaagataaggaagaacttcgccgattgaatgatttggagagaagagaaagaaagatcaaagcggatatggccgacgtttaccgcagagacattccaagtttggtaatggttccgacaatggatatggagtttgcgcatatagacggatataacggcgtgcccatatatcagcgggatgagaaaaccggccgcctgttttataaaagacacggcggtaaaggcgcagtgtatttgaatgacgacgaggcgttgatttttcagaattggaagcggcagatttccgatgtggaggcggccgcgatatccaatccgctccgcctcttcccgttgttctcttacgacccccgccgctacaggctttccgacgcagacacggcgaaaaacggctggggaacttggagagaacctttcgcgcgtattgtcgggcatagcgattcggcgaaagacgtcagaaaaatctggcttgggttttgtatgaatccgacccttggattcaggccgtttgacgaatattgcgattatcttccgatgttttacaaggagtgcgaaaaaaacaacatcccccttctcgtaaattgcgtagcgggcggaattacctcgcacgacgcggcgtattatgaacacgattgggataaacgcgaaagtaaaaacagcgagcgctataagatgatggtggaaaaaggtttggcggacagccaaaacactgccgccgcccataattccagcaatagatattacggcggagaacgtgttttcagcgatggattctacaatggaagcatggactatttctaccaaggtttggattatttctatatgaactacggacacccgcggaattggattccggtgttggattttttcccggacctgcgcttgtgcttcgccggtttcggcggaaacgacgagtggcggcttgccgaatggtacgacagcacctctttgcccacaagacagtggctacgcgtcatcatcaaacttacggcgcgacacgataatgtttacgccgatatttcaggccttaatatatacgacgaanagatcagggacgggcttttggagatgttgaaattgatacaagccgacaagataacggctttaacatctgaaacacaaactgatattcggcagcggctggtactcaacatatctgacggacgcggcctccggcggtaa

SEQ ID NO: 68346 - protein, 417 aa, Unknown
  Obtained from environmental sample
  misc_feature (1)..(417): Xaa is any amino acid
MDDLNDLAQLKDDINKLLNGRNRKDLQDKEELRRLNDLERRERKIKADMADVYRRDIPSLVMVPTMDMEFAHIDGYNGVPIYQRDEKTGRLFYKRHGGKGAVYLNDDEALIFQNWKRQISDVEAAAISNPLRLFPLFSYDPRRYRLSDADTAKNGWGTWREPFARIVGHSDSAKDVRKIWLGFCMNPTLGFRPFDEYCDYLPMFYKECEKNNIPLLVNCVAGGITSHDAAYYEHDWDKRESKNSERYKMMVEKGLADSQNTAAAHNSSNRYYGGERVFSDGFYNGSMDYFYQGLDYFYMNYGHPRNWIPVLDFFPDLRLCFAGFGGNDEWRLAEWYDSTSLPTRQWLRVIIKLTARHDNVYADISGLNIYDEXIRDGLLEMLKLIQADKITALTSETQTDIRQRLVLNISDGRGLRR

SEQ ID NO: 68347 - DNA, 660 bp, Unknown
  Obtained from environmental sample
  misc_feature (1)..(660): n is a, c, g, or t
atgaaagaagctgtattgatagtcccatgctgtgaaaaaggcaggggcggcggccacttaactcgctgcgtaaaattaaccaatgaactgcgctcgtcaggcaaggaagcgtacctttatattcccgccgatattaatgttatcaagttccttcaaaccgcgcaatttgacaaatcatttgtaatatctgaatacgccgttaataaaaaaaattgggaactggtaattatggaccgttaccagacaccgcaaaacgaacttgcccgctggaaaaaactcgcgccggtagtggggattgacgaaggcggcccttaccgcgattattttgacattcttgtagacatacttatccctgaaaattttaaaaaaccttcagcgaatattacttcctgcggcttacttgatttgccgaaaaaaacaaaaaccgcgcggaacgagattaataaaaaagtaaaaatattaatcagttttggacaggaagacgccgccgggcttgctatccgtacggtaaaaaaactgacaaagaaatatttttccggaactgaaattactttaataaaaggcatgttaaaccgttcaaaatataaaatccccgattccgtaaaagtattggattcaacgccgaatttcgcggatcagctttacgaatacgatctgtaa

SEQ ID NO: 68348 - protein, 219 aa, Unknown
  Obtained from environmental sample
  misc_feature (1)..(219): Xaa is any amino acid
MKEAVLIVPCCEKGRGGGHLTRCVKLTNELRSSGKEAYLYIPADINVIKFLQTAQFDKSFVISEYAVNKKNWELVIMDRYQTPQNELARWKKLAPVVGIDEGGPYRDYFDILVDILIPENFKKPSANITSCGLLDLPKKTKTARNEINKKVKILISFGQEDAAGLAIRTVKKLTKKYFSGTEITLIKGMLNRSKYKIPDSVKVLDSTPNFADQLYEYDL

SEQ ID NO: 68349 - DNA, 678 bp, Unknown
  Obtained from environmental sample
  misc_feature (1)..(678): n is a, c, g, or t
ttgacttgtattgtacttcaagcccgtcttgattctacccgcctgccagaaaaatcaatgcttccaatagacggaatgccgcttatctttcgcgtaatggaagctctgaactttgttcctgccgatttgcgtattctagcctgttcccaggactcgctttcatcatttaagcccctcgtaaaacaggcgggctttgaaattttcgccggtcccaaagatgatgttcttgaacgctattgccaagttattcgccaatttaagattaagcgcgtaataagagcgacgggagacaatccctttgtttttacggacgccgcagctgcgataaacgccgaagctctggcgcttaacgccgattacgccggtttctcgggacttccttacggcgcgggagtggaatcggtttcggcttccgctcttcttcgcgctggaagcgaagcgtcctcgccatcggagcgcgaacatgtctgcccctatttatacacccatcccgaacttttcagccttcaccggccttacgccccgaagcgctggcaaggctcaaatatacggcttacagttgatactcaggaagattttgaccgcgctcttgttttatatgacgccttaaaaaacgagtctctccgttattacggatttacaataatcaaaaaatacggggaagtttttaaaaaatga

SEQ ID NO: 68350 - protein, 225 aa, Unknown
  Obtained from environmental sample
  DOMAIN (3)...(215): Cytidylyltransferase
  misc_feature (1)..(225): Xaa is any amino acid
MTCIVLQARLDSTRLPEKSMLPIDGMPLIFRVMEALNFVPADLRILACSQDSLSSFKPLVKQAGFEIFAGPKDDVLERYCQVIRQFKIKRVIRATGDNPFVFTDAAAAINAEALALNADYAGFSGLPYGAGVESVSASALLRAGSEASSPSEREHVCPYLYTHPELFSLHRPYAPKRWQGSNIRLTVDTQEDFDRALVLYDALKNESLRYYGFTIIKKYGEVFKK

SEQ ID NO: 68351 - DNA, 900 bp, Unknown
  Obtained from environmental sample
  misc_feature (1)..(900): n is a, c, g, or t
ttgaaaaaactcggttttgacaatgtaatctccatagagtcttcaacgccgaattacaacatagaagaactttccaggcgctttccttttgtgcgctttatcattcctgaaaaagaaataaatctgggcgaacagataaatcttgcggcgtccgaaattgaaaatcctcttttctttgtccttcagagcgacatgaaaattatcgccggagggacggcaagaagaatggcggaacgcttaagcgttattcagaaagaaactgatgataataataaaaagccaaatacgtttaagaggctttgtaccgttccggttttggtgaattccaactacgaatccataccgacaattgtaaccccgttaacacggaacaaaaaaatgtcgacaggaatcatggagcctcataatgagggagaattaagcctttatccgtttatagggattggaatttacgaccgccttaaattcatcagcataggcggatttgacccgacaataaaaaacaaacattggcagtttatggactttggctttcgctcatatctttggggggaagaaatatctttaagccttcatttaaaaattttatgcgagaaagaaataccggccgtagattattctgttgacaaaagttacaggcaatttttcctgaaaaacctcgctccggtattccgaaaaaacggcccccatttgccgctttgccgctttatgccttttttatttaaatccaacgaagaccttttttccgcgtgggaagaattctcaaacaaaaggaaatgggtaaccgaaaacaaagacagattcaaacgcgatgataccgccgttataaacctctggagcaatattccgtcggaagcaataacagaaaatgaatctgaacaggaacaggagcaaacttga

SEQ ID NO: 68352 - protein, 299 aa, Unknown
  Obtained from environmental sample
  misc_feature (1)..(299): Xaa is any amino acid
MKKLGFDNVISIESSTPNYNIEELSRRFPFVRFIIPEKEINLGEQINLAASEIENPLFFVLQSDMKIIAGGTARRMAERLSVIQKETDDNNKKPNTFKRLCTVPVLVNSNYESIPTIVTPLTRNKKMSTGIMEPHNEGELSLYPFIGIGIYDRLKFISIGGFDPTIKNKHWQFMDFGFRSYLWGEEISLSLHLKILCEKEIPAVDYSVDKSYRQFFLKNLAPVFRKNGPHLPLCRFMPFLFKSNEDLFSAWEEFSNKRKWVTENKDRFKRDDTAVINLWSNIPSEAITENESEQEQEQT

SEQ ID NO: 68353 - DNA, 1518 bp, Unknown
  Obtained from environmental sample
  misc_feature (1)..(1518): n is a, c, g, or t
atgaaagcgcttgcggtattattcggcggtcaactctttgatgaggcatttgagcctttattagacgggaaaaacagcgttactctggctttggaacaggcaaaaaaattcccttcttcggaaaaaaccattcttttggctcctttggggaattatccatttcccggcggcgttcaaattgagcaaaaagactggacaaagcggattttactggaaaaaatcgcggaattgcaggcgggatttgactgcgtttattttgcctttgccgactgtccttttttagaccctgcccttgccggaattttatcacagcggcatataaacgaaagagccgattattcttacgcggacggctttccctacgggcttgcgcctgaaatactctctcccggaacagccggcattttggcaaaaattttaggcgataacgacgggcctgtcgaaagggatattctgttttccgtcattcaaaaagacataaacgcttttgacatagaagcggaaatctcctcagttgatcttcgctgccacagaattaacctttgcgcggattcaaaacgcagtctgttgctcttaaagaattttattggcgaggccggaaagataccctgcgcctctgatgttgaaaaaattgttcaggagaaacctgaagttttaagaacattaccggctttctacccgattcaggtttacggcggctgtcctacggcctgtaaaatatgcccctaccctttgttcacggacgcggagggacggaaagattttatggatgcgtctcatttttcgtccctgcttgataagattgtttctttttccggggacgcggtaatcgatctttccctgtggggagaattaagcctgcaccctgaaaaaatgaagttaattgaagaggttgtttcccgcggctcgcttgcgcttgtaattgaaacttcgggaataggctggaaggaacaggaactggaaaaatgcgcgcaaatccgcgccgatttttcaaaaaacacggcgcggaaaaacgcgctgccgcctctttcatggattgtgtcttttaacatggaacaagggggatatggttttgccgaaacggaaaactgcgcccaaaaattgttatccctgtttccaaaagactgctatgtgcaggcggtgcgcataaaaggctcggaagaagacacggaaaaattttaccgccgctggaaagatacaaacgtcatcattcaaaaatatgacgatttttgcggcgctttggaaaaaaaacaggcttctgacatatcccctgttgtccgaaaaccatgctggcatataatgagggatatgcctgttttattagacggcgccgtacccctttgcagggaagacttgagtatgctaaaacagcaagtgtcccgtatccttggaaatgttttcagcgattctcttgaaaatatctggaaattaggagattcttactacagggaacaatgcggtaaaaattattcaggactttgtaaagaatgcgatgaatactacaccttcaacttttaa

SEQ ID NO: 68354 - protein, 505 aa, Unknown
  Obtained from environmental sample
  misc_feature (1)..(505): Xaa is any amino acid
MKALAVLFGGQLFDEAFEPLLDGKNSVTLALEQAKKFPSSEKTILLAPLGNYPFPGGVQIEQKDWTKRILLEKIAELQAGFDCVYFAFADCPFLDPALAGILSQRHINERADYSYADGFPYGLAPEILSPGTAGILAKILGDNDGPVERDILFSVIQKDINAFDIEAEISSVDLRCHRINLCADSKRSLLLLKNFIGEAGKIPCASDVEKIVQEKPEVLRTLPAFYPIQVYGGCPTACKICPYPLFTDAEGRKDFMDASHFSSLLDKIVSFSGDAVIDLSLWGELSLHPEKMKLIEEVVSRGSLALVIETSGIGWKEQELEKCAQIRADFSKNTARKNALPPLSWIVSFNMEQGGYGFAETENCAQKLLSLFPKDCYVQAVRIKGSEEDTEKFYRRWKDTNVIIQKYDDFCGALEKKQASDISPVVRKPCWHIMRDMPVLLDGAVPLCREDLSMLKQQVSRILGNVFSDSLENIWKLGDSYYREQCGKNYSGLCKECDEYYTFNF

SEQ ID NO: 68355 - DNA, 573 bp, Unknown
  Obtained from environmental sample
  misc_feature (1)..(573): n is a, c, g, or t
gtgggtgaagccgccacaatagccgacgccattaagattgccgaaaaggaaaaaccaaaccttgtcataatggaaattcaccttggaaatgaaaacggcatggagcttattcctcaaataaaatccaaatgtccgggtatatatgttttagtcatgtcaatgcacaacgaacgctactattccgagagaattctccgcatgggcgcgcagggatatataatgaaaaacgcgcccgctaacgatgtaaaaaacgctattaacaccgtcatgtccggaaaagtctatttaagcgaaaatgaaagggaaaggatatttgaagctattacgggagataattaccgaggcatgaaagactgggcaaattccatgcgcaagctttcggacagggaacttcaggttttttcattaataggcaagggtttcggcaccatagaaattgccacaaaactcaatttaagcaccaaaaccattgatacccacaaggagcatataaagataaaactccactgcaacacgtcacaggaactaagacagctggccatagaatggaccaattactcggcttcattgtag

SEQ ID NO: 68356 - protein, 190 aa, Unknown
  Obtained from environmental sample
  DOMAIN (1)...(87): Response regulator receiver domain
  misc_feature (1)..(190): Xaa is any amino acid
MGEAATIADAIKIAEKEKPNLVIMEIHLGNENGMELIPQIKSKCPGIYVLVMSMHNERYYSERILRMGAQGYIMKNAPANDVKNAINTVMSGKVYLSENERERIFEAITGDNYRGMKDWANSMRKLSDRELQVFSLIGKGFGTIEIATKLNLSTKTIDTHKEHIKIKLHCNTSQELRQLAIEWTNYSASL

SEQ ID NO: 68357 - DNA, 420 bp, Unknown
  Obtained from environmental sample
  misc_feature (1)..(420): n is a, c, g, or t
gtgttctccggattggtcacagcctgccgcttggcgatagcccccacaaggcgctcgccggccttggtaaagcccacgatggagggcgtggtgcgcccgccttcggagttgggaatgaccaccggcttcccggcctccatcaccgacacgcacgaattggtcgtccctaggtcaataccgatgatcttgcccataaacccccctaatgtatggtgtttcttttttgttttttgtcattgccggtacaaatatatatatatctatatcaaatatcgtgccattatgagaaacggcgaaatttggggtttaaaggagggagtgggcttggattatgtatatgttatattagtacagattaaggcgggagtgtttcaaattgaaacaatgcctttaaattcttttttagatcggaagagctaa

SEQ ID NO: 68358 - protein, 139 aa, Unknown
  Obtained from environmental sample
  misc_feature (1)..(139): Xaa is any amino acid
MFSGLVTACRLAIAPTRRSPALVKPTMEGVVRPPSELGMTTGFPASITDTHELVVPRSIPMILPINPPNVWCFFFVFCHCRYKYIYIYIKYRAIMRNGEIWGLKEGVGLDYVYVILVQIKAGVFQIETMPLNSFLDRKS

SEQ ID NO: 68359 - DNA, 1932 bp, Unknown
  Obtained from environmental sample
  misc_feature (1)..(1932): n is a, c, g, or t
atgggcaagatcatcggtattgacctagggacgaccaattcgtgcgtgtcggtgatggaggccgggaagccggtggtcattcccaactccgaaggcgggcgcaccacgccctccatcgtgggctttaccaaggccggcgagcgccttgtgggggctatcgccaagcggcaggctgtgaccaatccggagaacaccgtctactccataaagcggttcatggggcggcggcacagcgaggtgcagtcagaggagaagcgcgtgccatacagcgtggtcggcggcgccgaggatccggtaaaggtcaagatacttgaccacgactactcgcctcccgagatatccgccatggttctgcagtacctcaagaaagctgcggaggactatttgaacgagccggtcaccgaggcggtgatcaccgtgccggcctacttcaacgacgcgcagcgtcaggccaccaaggacgccggcaggatcgctgggcttgacgtcaagcgcatcatcaacgagcccacggcggcgtcgctcgcgtacgggcttgataagaagaagaacgaaaagatcgccgttttcgacttgggcggcggcacattcgacatatccatcctcgagatcggcgacagcgtcttcgaggtcaagtccacaaacggcgacacccatttgggcggcgacgactttgacgaggtgctgatagaccacatcgccgatgagttcaaggtatccaacggcatcgatctgcgcaacgacaggatggcgctgcagaggctcaaagaggcggcggagaaggcaaaggtggagctttcgtccgctatgcaggcgaatgtcaacctgccgttcatcaccgcggattcgagcgggcctaagcacctcgacctgaccataacccgcgcgaagctcgagcagctcgcgtctaagttgatagacaggacggtcgagccttgcaagaaagcgctcgccgacgcgaagctcgccgcgtccgagatcgacgaggtgatactggtaggcggcgcgactaggatgcccgccgttcaggccaaagtggaggcaatcttcggcaaggtccccaacaagggcgtcaaccccgacgaggtggtggccatcggcgccgccattcagggcgccattctcggcggcgaccagagcgtcaaggacgtgctgctcttagacgtcactcccctgtcgctaggcttagagacattgggcggcgtgatgaccaagctcattgagcgcaacacaaccattcccacaaagaagagcaacgtcttctccaccgcctccgacaaccaagacgccgtcacgatcatggtctatcagggcgaacgcgaaatggccgcccacaataggctcttaggcaagttcgatctggtgggcatcccgcacgcgccacgcggcattctccagatagaggtctccttcgacattgacgccaacggcatcctaaacgtgagcgccaaggatctcggcaccggcaaacagcagcagataaggatagagtcctccagcggtctctccgagggcgacatccagcgcatggtaaaggaagcggaggccaacgccgccgccgacaaagaggaaaaagagcgaatcgaggtaaagaaccaagccgaccaagctatataccagacggaaaagaccctgtcggaaataggcgacaaaatcgccgaaagcgataaagccgacgtccaaaaagcccttgacgaccttaaggagaaggtcaaagagacggactacggagcgataaaagccggcctggacgctctaatgaaagcgagccacgcgatggccgaagcgatgtacaaacaagccaaccccgccggagccgcgggtccgcaaccggacccctccccgtcgccgtcagatccgcccaagcagggcactaccagcggcgataaaaagagcggcgccgtcgacgctgactttgaagttgtagagtga

SEQ ID NO: 68360 - protein, 643 aa, Unknown
  Obtained from environmental sample
  DOMAIN (2)...(380): MreB/Mbl protein
  misc_feature (1)..(643): Xaa is any amino acid
MGKIIGIDLGTTNSCVSVMEAGKPVVIPNSEGGRTTPSIVGFTKAGERLVGAIAKRQAVTNPENTVYSIKRFMGRRHSEVQSEEKRVPYSVVGGAEDPVKVKILDHDYSPPEISAMVLQYLKKAAEDYLNEPVTEAVITVPAYFNDAQRQATKDAGRIAGLDVKRIINEPTAASLAYGLDKKKNEKIAVFDLGGGTFDISILEIGDSVFEVKSTNGDTHLGGDDFDEVLIDHIADEFKVSNGIDLRNDRMALQRLKEAAEKAKVELSSAMQANVNLPFITADSSGPKHLDLTITRAKLEQLASKLIDRTVEPCKKALADAKLAASEIDEVILVGGATRMPAVQAKVEAIFGKVPNKGVNPDEVVAIGAAIQGAILGGDQSVKDVLLLDVTPLSLGLETLGGVMTKLIERNTTIPTKKSNVFSTASDNQDAVTIMVYQGEREMAAHNRLLGKFDLVGIPHAPRGILQIEVSFDIDANGILNVSAKDLGTGKQQQIRIESSSGLSEGDIQRMVKEAEANAAADKEEKERIEVKNQADQAIYQTEKTLSEIGDKIAESDKADVQKALDDLKEKVKETDYGAIKAGLDALMKASHAMAEAMYKQANPAGAAGPQPDPSPSPSDPPKQGTTSGDKKSGAVDADFEVVE

SEQ ID NO: 68361 - DNA, 621 bp, Unknown
  Obtained from environmental sample
  misc_feature (1)..(621): n is a, c, g, or t
gtgcttaggcccgctcgaatccgcggtgatgaacggcaggttgacattcgcctgcatagcggacgaaagctccacctttgccttctccgccgcctctttgagcctctgcagcgccatcctgtcgttgcgcagatcgatgccgttggataccttgaactcatcggcgatgtggtctatcagcacctcgtcaaagtcgtcgccgcccaaatgggtgtcgccgtttgtggacttgacctcgaagacgctgtcgccgatctcgaggatggatatgtcgaatgtgccgccgcccaagtcgaaaacggcgatcttttcgttcttcttcttatcaagcccgtacgcgagcgacgccgccgtgggctcgttgatgatgcgcttgacgtcaagcccagcgatcctgccggcgtccttggtggcctgacgctgcgcgtcgttgaagtaggccggcacggtgatcaccgcctcggtgaccggctcgttcaaatagtcctccgcagctttcttgaggtactgcagaaccatggcggatatctcgggaggcgagtagtcgtggtcaagtatcttgacctttaccggatcctcggcgccgccgaccacgctgtatggcacgcgcttctcctctga

SEQ ID NO: 68362 - protein, 206 aa, Unknown
  Obtained from environmental sample
  misc_feature (1)..(206): Xaa is any amino acid
MLRPARIRGDERQVDIRLHSGRKLHLCLLRRLFEPLQRHPVVAQIDAVGYLELIGDVVYQHLVKVVAAQMGVAVCGLDLEDAVADLEDGYVECAAAQVENGDLFVLLLIKPVRERRRRGLVDDALDVKPSDPAGVLGGLTLRVVEVGRHGDHRLGDRLVQIVLRSFLEVLQNHGGYLGRRVVVVKYLDLYRILGAADHAVWHALLL

SEQ ID NO: 68363 - DNA, 495 bp, Unknown
  Obtained from environmental sample
  misc_feature (1)..(495): n is a, c, g, or t
ttgcaaggctcgaccgtcctgtctatcaacttagacgcgagctgctcgagcttcgcgcgggttatggtcaggtcgaggtgcttaggcccgctcgaatccgcggtgatgaacggcaggttgacattcgcctgcatagcggacgaaagctccacctttgccttctccgccgcctctttgagcctctgcagcgccatcctgtcgttgcgcagatcgatgccgttggataccttgaactcatcggcgatgtggtctatcagcacctcgtcaaagtcgtcgccgcccaaatgggtgtcgccgtttgtggacttgacctcgaagacgctgtcgccgatctcgaggatggatatgtcgaatgtgccgccgcccaagtcgaaaacggcgatcttttcgttcttcttcttatcaagcccgtacgcgagcgacgccgccgtgggctcgttgatgatgcgcttgacgtcaagcccagcgatcctgccggcgtccttggtggcctga

SEQ ID NO: 68364 - protein, 164 aa, Unknown
  Obtained from environmental sample
  misc_feature (1)..(164): Xaa is any amino acid
MQGSTVLSINLDASCSSFARVMVRSRCLGPLESAVMNGRLTFACIADESSTFAFSAASLSLCSAILSLRRSMPLDTLNSSAMWSISTSSKSSPPKWVSPFVDLTSKTLSPISRMDMSNVPPPKSKTAIFSFFFLSSPYASDAAVGSLMMRLTSSPAILPASLVA

SEQ ID NO: 68365 - DNA, 408 bp, Unknown
  Obtained from environmental sample
  misc_feature (1)..(408): n is a, c, g, or t
ttgaccttctccttaaggtcgtcaagggctttttggacgtcggctttatcgctttcggcgattttgtcgcctatttccgacagggtcttttccgtctggtatatagcttggtcggcttggttctttacctcgattcgctctttttcctctttgtcggcggcggcgttggcctccgcttcctttaccatgcgctggatgtcgccctcggagagaccgctggaggactctatccttatctgctgctgtttgccggtgccgagatccttggcgctcacgtttaggatgccgttggcgtcaatgtcgaaggagacctctatctggagaatgccgcgtggcgcgtgcgggatgcccaccagatcgaacttgcctaagagcctattgtgggcggccatttcgcgttcgccctga

SEQ ID NO: 68366 - protein, 135 aa, Unknown
  Obtained from environmental sample
  SIGNAL (1)...(22)
  misc_feature (1)..(135): Xaa is any amino acid
MTFSLRSSRAFWTSALSLSAILSPISDRVFSVWYIAWSAWFFTSIRSFSSLSAAALASASFTMRWMSPSERPLEDSILICCCLPVPRSLALTFRMPLASMSKETSIWRMPRGACGMPTRSNLPKSLLWAAISRSP

SEQ ID NO: 68367 - DNA, 663 bp, Unknown
  Obtained from environmental sample
  misc_feature (1)..(663): n is a, c, g, or t
ttggctgaaatgcgcaataggtttgatcagcagttaaagaagctgcacgacgacttggtgcagatggggacgtttatagaacagacgatggcaaagaccatgtcggcttttcggacgaatgactacgcgctggcgcgggaggtctacgacaacgacgacatcgccgacgagctcgagataaaggtggagcggcgcagcctgcgcatcctcctctcgcagcagcccgtggcgagggatttgcgcacgatatccacagccctaaagatgatcaccgacatggagcggatctgcgaccaggcgaagagcatctcggaaatagtgctgcgctttgagggcaaggagttcaaaaaaaccgacgatatcttgcaaatgagcgaaaaatgtgttataatggtaaataagagcatagacgccttcataaacgacagcttggagctggccgaagaggttgagacgctggacgacgagatcgacgcgctcttcaagcgcatccacgacaatatggccacaatggtcacgcaagaaccgaactgcgtggaacaggcgatagacatcgtgatgatagcgaagtatctggagaggataggcgaccacgcggtcaacatatccgagtgggtggtgttcaacattacgggggagcataagcataggctgttgatataa

SEQ ID NO: 68368 - protein, 220 aa, Unknown
  Obtained from environmental sample
  DOMAIN (19)...(107): PhoU family
  misc_feature (1)..(220): Xaa is any amino acid
MAEMRNRFDQQLKKLHDDLVQMGTFIEQTMAKTMSAFRTNDYALAREVYDNDDIADELEIKVERRSLRILLSQQPVARDLRTISTALKMITDMERICDQAKSISEIVLRFEGKEFKKTDDILQMSEKCVIMVNKSIDAFINDSLELAEEVETLDDEIDALFKRIHDNMATMVTQEPNCVEQAIDIVMIAKYLERIGDHAVNISEWVVFNITGEHKHRLLI

SEQ ID NO: 68369 - DNA, 606 bp, Unknown
  Obtained from environmental sample
  misc_feature (1)..(606): n is a, c, g, or t
gtgccggctttggctttgcgctccatttccaaggaggttccctggcccggcgcgcgctgcggatggacggaaatttataaccgcaaggccgacccccgttttgacgcttatgtcaagagtcttctggattcaaaacgtctggaagtatgttccaccagccttccccagctttgcatccccgctattatgggggattcccgctacagtaaacatctggaaacaagggccgccatgtttgagaaaagagcggacgaaatggaaaaggcttttgcgggcgtatccggaatccggataaaaaaacccaacggcgctttttatgtttccgcggtttttgacgatgttataaaaaagaatcccggcagccattccctgccggtcattgatttgagtttacgaaattacatcagcgcggaaatcgccgggcttaaaccggacaagcagtttgcctactggctcctggcttccaccggtatatgcgtggttccgctttcgggctttgccagcgaccttccggggtttcgttttacattgctggaacacaacgatgaaaaacgaaaatggattttcaagaccattgctgaagcgattcaaaattacttaagatga

SEQ ID NO: 68370 - protein, 201 aa, Unknown
  Obtained from environmental sample
  misc_feature (1)..(201): Xaa is any amino acid
MPALALRSISKEVPWPGARCGWTEIYNRKADPRFDAYVKSLLDSKRLEVCSTSLPQLCIPAIMGDSRYSKHLETRAAMFEKRADEMEKAFAGVSGIRIKKPNGAFYVSAVFDDVIKKNPGSHSLPVIDLSLRNYISAEIAGLKPDKQFAYWLLASTGICVVPLSGFASDLPGFRFTLLEHNDEKRKWIFKTIAEAIQNYLR

SEQ ID NO: 68371 - DNA, 1089 bp, Unknown
  Obtained from environmental sample
  misc_feature (1)..(1089): n is a, c, g, or t
atgagcgcttactggaataaccgcactaaaaatctttctccctatgtccccggcgaacagccgaaagaccgtaaatttatcaaactgaataccaacgaaaacccctatcctccttcccctaaggtaatcgaggcggttcaaaaagccgtcaatgacagcctgcggctgtaccccgaccccgaatgtaccgtgtttcgggaagcggtcgccgcccgttatggagtgcggcccgaacaggtttttgccggcaatggttccgatgagatactggcctttgctttcggcgcgttttttgaaagttcaggtacgaaaaaaacaaaaccaattctttttcccgatattacctacagtttctatcccgtatacgcccgtttttgggacattccctatcgtaccattccgttaaacgatgatttttccatcaacgctgcggattataaaaccccctcaggcggcgcggtatttccaaatccgaatgccccaaccggaacagcattgccgttaggtgatgttctatctctggccgaatatctggaagcaaataagaaaatatttattcttgatgaggcgtataccgggtttggcgcggattcggctgttccccatatcggggatcatccaaacctgctctgcgttcatacgctctcaaaatctggctcacttgccggattgcgcacgggcttcgccattggaaacgaggaactgatcgaagggctacgccgcgtgcgggactccttcaactcttacacccttgacaggcttgccctcgtcggcgcggctgccgcgctttcagataacgcttattacaatgaaattaacggccgtgtcgtcagaacgcgggacagggtaacagaagccctgcgaatcatgggttttacagtccttccctcggaggcaaattttatttttatgaagtcgctcaatataaacggatccgatattttttccgcgctccgtgaaaaagggatacttgtaaggcattttaacaaggaacggatttcagatttccttagggtcagcatgggaacggatgacgatatggatgtatttcttggcgcatgcggggaaattatcagtcatcttaagtaa

SEQ ID NO: 68372 - protein, 362 aa, Unknown
  Obtained from environmental sample
  DOMAIN (24)...(354): Aminotransferase class I and II
  misc_feature (1)..(362): Xaa is any amino acid
MSAYWNNRTKNLSPYVPGEQPKDRKFIKLNTNENPYPPSPKVIEAVQKAVNDSLRLYPDPECTVFREAVAARYGVRPEQVFAGNGSDEILAFAFGAFFESSGTKKTKPILFPDITYSFYPVYARFWDIPYRTIPLNDDFSINAADYKTPSGGAVFPNPNAPTGTALPLGDVLSLAEYLEANKKIFILDEAYTGFGADSAVPHIGDHPNLLCVHTLSKSGSLAGLRTGFAIGNEELIEGLRRVRDSFNSYTLDRLALVGAAAALSDNAYYNEINGRVVRTRDRVTEALRIMGFTVLPSEANFIFMKSLNINGSDIFSALREKGILVRHFNKERISDFLRVSMGTDDDMDVFLGACGEIISHLK

SEQ ID NO: 68373 - DNA, 1293 bp, Unknown
  Obtained from environmental sample
  misc_feature (1)..(1293): n is a, c, g, or t
atgattatatcttcaatagacatacaaaacggcaaagtcgtccagttaaaactgggcgaggagctggtgttacagcgtgaaaattctcttgaactggctgcggaattcgaccgttacggcgaagtcgcggtcatagaccttgacgccgcgatgggaaagggaagcaacctcgaaatgataaagccgctcttgcggaaagccgagtgcagggtaggcggcggcatcagaacgccccagcaggcgcaggagctggtcagccttggggcgcgaaaaataatagtcgggtcaaacgcttttcgcattcccgaaaaaaaaggctcagggatcgcgggcggcgagtttgcggtgaacgttcctttcctcgaagtcatgtcaaaaaaaatagggcgtgagcgtttaatagttgccgtagacgcccgcaacggagaagttgttgtagacggctggaaaacccacacaggtcttaatattgtagaagcggcaaaacaggttgagtcttttgcgggcgaattgctttttacctgcgttgagcgcgagggcacaatgtccggctttgattctgccccggcgcgcagattgcgcgagttggtctcatgtaaagttaccgtcgccggcggcgtttcaaccttagctgaaattgaagaaatcgcagctttcggctgtgatatacagctgggtatggcgctttacaccggaaaaataaacctggaggacgcctttgtcttgtcccttaattgggagaaagatcaaaattcacttctccccgtaatcgttcaatccacggacggacaggtaatgatgacaggctttactgacaggcaggcgttagccgaaactttcaagcgcggcaatgtctgtttccacagccgcacaagagacagactctggatgaaaggcgagaattccggcaatgtgttaaaacttgtcaagataagagcggactgcgacagggacgcgctcttagtcacggcggaaccggcgggtcccgtctgccacaccggcgcgtggtcatgttttgcgactaacagggattacacactgcaatttttgcaaaacataataatagagcgttttcgcaatcccgtacccgggtcgtatacagccacccttgacgatgagcttgtccgtgaaaaaataatggaagaggcaaaagaactttgtgaagcgaagactcatgatgaaattgtctgggaagccgcggacttgctctactttgcgacggtgttaatgacaaaagcgggagtcaccattgatgaaattcttgacgagcttgaccggaggcataaaaaataa

SEQ ID NO: 68374 - protein, 430 aa, Unknown
  Obtained from environmental sample
  DOMAIN (347)...(429): Phosphoribosyl-ATP pyrophosphohydrolase
  misc_feature (1)..(430): Xaa is any amino acid
MIISSIDIQNGKVVQLKLGEELVLQRENSLELAAEFDRYGEVAVIDLDAAMGKGSNLEMIKPLLRKAECRVGGGIRTPQQAQELVSLGARKIIVGSNAFRIPEKKGSGIAGGEFAVNVPFLEVMSKKIGRERLIVAVDARNGEVVVDGWKTHTGLNIVEAAKQVESFAGELLFTCVEREGTMSGFDSAPARRLRELVSCKVTVAGGVSTLAEIEEIAAFGCDIQLGMALYTGKINLEDAFVLSLNWEKDQNSLLPVIVQSTDGQVMMTGFTDRQALAETFKRGNVCFHSRTRDRLWMKGENSGNVLKLVKIRADCDRDALLVTAEPAGPVCHTGAWSCFATNRDYTLQFLQNIIIERFRNPVPGSYTATLDDELVREKIMEEAKELCEAKTHDEIVWEAADLLYFATVLMTKAGVTIDEILDELDRRHKK

SEQ ID NO: 68375 - DNA, 1119 bp, Unknown
  Obtained from environmental sample
  misc_feature (1)..(1119): n is a, c, g, or t
atgaggaacgcgtacagttttaaaattcttttcgctttcggcatagcgcttatttattttttagtttgccgcgctttcccttccagccttatcgggcttttaacgacgaataatacggcgcaggaagaaatcgcttttatcggctccggctatcttaatcttgtgtcatggacatttttcccgatggcggtatctatgtccgtcgcgaccagtttccgcgaaatagcgaagcctaaaatcccgcttataatctcggccgccgcgacgctgataaacacggcgggaaactggatattgatttacggcaacctcggcgcgccccgtcttgaagttacaggcgcggcttacgccacaatcatagcgcgtttttttgaagccgcggcttatataggttacgcgtcattcgcgaaagcgccgttttttgccggcataagaaggctttttgctataaagaaacgccttgtaggcgagatattcgcgaagtccggaatgatattcgcctcggaaatatcgtgggtcgcttccgaaacgctgatgattgccatgtacaacaggcgcggcggcgcggaagttgtcgccggcatggcggcgggctggacgatagcgaatattttcttcatgctgttcggcggtttgtggacgacaaccagcgttttggtgggaggatctttgggagccggcaaactggacgaggcgcgcgaccgcgccaagtggattaagtggggaggctttataatgggctttattatcgctgttccgggagcggtgttaacatattttcttatacccgtcgtattctcaaatcttacaatagcggcaagggtaaactgcctgggtcttgtaattgttattctggcttatctgcccctgtggtgttttctcaacacccaattcgctatttcacgcgcgggaggcgacaccgctatgggaatgtataccgatgtttcagttaatttcctgttatttgcgccaggctccgtgcttctttccttttttaccactctcgcgcccgtgcctatgtttgccattttaaaagctaccgacatagtaaaatgttttgtcgcgcgttttctccttcgcaaggaaaaatgggtaaaaaaccttacggtaacatcatga

SEQ ID NO: 68376 - protein, 372 aa, Unknown
  Obtained from environmental sample
  SIGNAL (1)...(25)
  DOMAIN (163)...(328): MatE
  misc_feature (1)..(372): Xaa is any amino acid
MRNAYSFKILFAFGIALIYFLVCRAFPSSLIGLLTTNNTAQEEIAFIGSGYLNLVSWTFFPMAVSMSVATSFREIAKPKIPLIISAAATLINTAGNWILIYGNLGAPRLEVTGAAYATIIARFFEAAAYIGYASFAKAPFFAGIRRLFAIKKRLVGEIFAKSGMIFASEISWVASETLMIAMYNRRGGAEVVAGMAAGWTIANIFFMLFGGLWTTTSVLVGGSLGAGKLDEARDRAKWIKWGGFIMGFIIAVPGAVLTYFLIPVVFSNLTIAARVNCLGLVIVILAYLPLWCFLNTQFAISRAGGDTAMGMYTDVSVNFLLFAPGSVLLSFFTTLAPVPMFAILKATDIVKCFVARFLLRKEKWVKNLTVTS

SEQ ID NO: 68377 - DNA, 1089 bp, Unknown
  Obtained from environmental sample
  misc_feature (1)..(1089): n is a, c, g, or t
atgcgatctcgtcaggacatgaggggcggcaagtcgacgctcatcggcggcgggtcgctcaatacggcgatggtcaatatcctcaaagaacgtcttggagacctcgacgtccccgaaaccgctgcggcttttgaggcttacggggcggcgctctgggccgccgacaacgagtgcgtcgcgcttcccaaagatctctccgaggtaatccacgacgctccgacctccttcggacgccacgctccgctcgcggaggcgctgccgctcgtctcgttcaaggagatgaagaaggacaccgtcaagaagggcgacgagtgcgttctggggctggacgtcgggtcgaccacaaccaaggcggtgcttatgagaaggcgcgacaaagcggtcgtcgcctccgtatatttgaggacgaacggcgatcccataggcgcgtcgcgcaactgctacaaggccgtacgcgagcaggtcggcgatacgaaattcgaaatctccggactcggggtaacggggtcgggacgccaaatcgcggcgctccacgcgctcaccgacaacgtcataaacgagatcatcgcccacgcgacggcggcggcttatttcgacaaagaggtcgataccatattcgagataggcggacaggatgcgaaatatacttatctgacgggcggcgtgccgtcggactacgccatgaacgaggcttgcagcgccggtacgggatcgtttctggaagaatccgcgcgcgaatcgctgaacatcctaacagaggaaatcggagagagagcgcttttgggcaaacagccgcccaacttcaccgaccaatgctcggcgttcatatcaagcgacatcaagacggccggccaagagggaatcggcaaggacgatattctggccggcctggtctattccgtatgcatgaactacctcaaccgcgtgaaaagctcgcggcaggtgggcaggaagatattcatgcagggcggcgtgtgctacaacaaggcggtgccccgtggccatggcgtcgctgatgaaacaccaaatcgtcgtcccgcccgaccccggcctgatgggggctttcggcgttgctatggaaacggctaa

SEQ ID NO: 68378 - protein, 362 aa, Unknown
  Obtained from environmental sample
  DOMAIN (107)...(338): BadF/BadG/BcrA/BcrD ATPase family
  misc_feature (1)..(362): Xaa is any amino acid
MRSRQDMRGGKSTLIGGGSLNTAMVNILKERLGDLDVPETAAAFEAYGAALWAADNECVALPKDLSEVIHDAPTSFGRHAPLAEALPLVSFKEMKKDTVKKGDECVLGLDVGSTTTKAVLMRRRDKAVVASVYLRTNGDPIGASRNCYKAVREQVGDTKFEISGLGVTGSGRQIAALHALTDNVINEIIAHATAAAYFDKEVDTIFEIGGQDAKYTYLTGGVPSDYAMNEACSAGTGSFLEESARESLNILTEEIGERALLGKQPPNFTDQCSAFISSDIKTAGQEGIGKDDILAGLVYSVCMNYLNRVKSSRQVGRKIFMQGGVCYNKAVPRGHGVADETPNRRPARPRPDGGFRRCYGNG

SEQ ID NO: 68379 - DNA, 846 bp, Unknown
  Obtained from environmental sample
  misc_feature (1)..(846): n is a, c, g, or t
gtgcgtcgcgcttcccaaagatctctccgaggtaatccacgacgctccgacctccttcggacgccacgctccgctcgcggaggcgctgccgctcgtctcgttcaaggagatgaagaaggacaccgtcaagaagggcgacgagtgcgttctggggctggacgtcgggtcgaccacaaccaaggcggtgcttatgagaaggcgcgacaaagcggtcgtcgcctccgtatatttgaggacgaacggcgatcccataggcgcgtcgcgcaactgctacaaggccgtacgcgagcaggtcggcgatacgaaattcgaaatctccggactcggggtaacggggtcgggacgccaaatcgcggcgctccacgcgctcaccgacaacgtcataaacgagatcatcgcccacgcgacggcggcggcttatttcgacaaagaggtcgataccatattcgagataggcggacaggatgcgaaatatacttatctgacgggcggcgtgccgtcggactacgccatgaacgaggcttgcagcgccggtacgggatcgtttctggaagaatccgcgcgcgaatcgctgaacatcctaacagaggaaatcggagagagagcgcttttgggcaaacagccgcccaacttcaccgaccaatgctcggcgttcatatcaagcgacatcaagacggccggccaagagggaatcggcaaggacgatattctggccggcctggtctattccgtatgcatgaactacctcaaccgcgtgaaaagctcgcggcaggtgggcaggaagatattcatgcagggcggcgtgtgctacaacaaggcggtgccccgtggccatggcgtcgctga

SEQ ID NO: 68380 - protein, 281 aa, Unknown
  Obtained from environmental sample
  misc_feature (1)..(281): Xaa is any amino acid
MRRASQRSLRGNPRRSDLLRTPRSARGGAAARLVQGDEEGHRQEGRRVRSGAGRRVDHNQGGAYEKARQSGRRLRIFEDERRSHRRVAQLLQGRTRAGRRYEIRNLRTRGNGVGTPNRGAPRAHRQRHKRDHRPRDGGGLFRQRGRYHIRDRRTGCEIYLSDGRRAVGLRHERGLQRRYGIVSGRIRARIAEHPNRGNRRESAFGQTAAQLHRPMLGVHIKRHQDGRPRGNRQGRYSGRPGLFRMHELPQPREKLAAGGQEDIHAGRRVLQQGGAPWPWRR

SEQ ID NO: 68381 - DNA, 1023 bp, Unknown
  Obtained from environmental sample
  misc_feature (1)..(1023): n is a, c, g, or t
atggctaaaatcattgaccagcttattatcaattccccttacgaagaacctaaagaacattggagtttcaaccccgacacccaaacctttgaccgtgttcaaggccgccgttccgccggttactttgtcgcggggcaaggcggcaatcagtataacgatcaaggcgaatttatatcccttccgctggtaaatgaaattcgtaaaagggtaaaattatggcgtaacaacaactatcagggtattacaagcgttacacgcaaacttattgaacactggtatttaaatgatgtccgccgctttcctttcttcttttgccaactggacgctatcgaaactattatctggcttgccgaagctcccgaaaccgaaaaaaacgggcttgatatacagggagacggaggtgcatttaaccgtatctgtaccaaactatgcactggcgggggaaaaacaacagtaatggctatgcttatagcatggcaaatttgcaacaaggtttcttatccacaggacaaacgattttcaaaaaatgtttttatcgttgccccagggcttaccgtaaaggaacgtttacaggttttactgacaggtggggggaataattactatattgagtttaatgtcgtccccgcttcgttacttgataaattgtatcaaggcaaagtagtaatcaataattggcaaactttggcatgggatagcgtcgaagaccttacaaagaaaaaatcagttgacaaaagaggcccaaaaagcgatgaagcttatgcccgcgaagtattaggcgatattgcaaacagtcagaatattttagtcattaacgatgaagcccatcacgcatggaggcgcaaccccgaaatcaaagaaaaaatgaccaaagaatataaggaagctgaaaaagaagcgacaatatgggtaagcggtcttgaccgtattcacaacgcaaggaaaatattgacttgttacgatttttccgcaaccccttttgctccttccggcaagaaaaacgatcagactcggccgatctga

SEQ ID NO: 68382 - protein, 340 aa, Unknown
  Obtained from environmental sample
  DOMAIN (99)...(328): Type III restriction enzyme, res subunit
  misc_feature (1)..(340): Xaa is any amino acid
MAKIIDQLIINSPYEEPKEHWSFNPDTQTFDRVQGRRSAGYFVAGQGGNQYNDQGEFISLPLVNEIRKRVKLWRNNNYQGITSVTRKLIEHWYLNDVRRFPFFFCQLDAIETIIWLAEAPETEKNGLDIQGDGGAFNRICTKLCTGGGKTTVMAMLIAWQICNKVSYPQDKRFSKNVFIVAPGLTVKERLQVLLTGGGNNYYIEFNVVPASLLDKLYQGKVVINNWQTLAWDSVEDLTKKKSVDKRGPKSDEAYAREVLGDIANSQNILVINDEAHHAWRRNPEIKEKMTKEYKEAEKEATIWVSGLDRIHNARKILTCYDFSATPFAPSGKKNDQTRPI

SEQ ID NO: 68383 - DNA, 1035 bp, Unknown
  Obtained from environmental sample
  misc_feature (1)..(1035): n is a, c, g, or t
atggctgatataatccccgtcgaagatacagtttatcaaagtatccgtactgttcttgccgctgcgcggcaaaaggtgtataccgcagtaaattccgctatggtcgaagcctattgggatatagggcggcaaatcatggaagctcaggaagggcagcgggctgaatatggcacggggttaattaagtatctggcggaacggctatcaaaggaattcgggaaaggatataccgaaaccaatttgaaatatatgcgccagttttatgccgctttcccaattcgtcacgcactgcgtgacgaattaagctggacgcattaccgccttttaatgaaggttagaaatgaggttgaacgtgagttttaccttaaagaatgtatcgaatgtaactggagcgtgcgccagcttgaacggcaaattacgactttttattacaaacggctccttgccacccgaaaagaaggcaaggaatcggtaaaaaatgaaattcaacaaactgaaccaaaaacagaccccgatttcatattaaaagacccctatattctggagttccttgaccttaaagaaaataaagattaccacgaaagcgagcttgaacaagcccttatagacaaattacaggaattccttttggagttaggtaaaggattttcatttgttgcgcgccaaaaacgtataaccattgaaggggatcattattatgtcgatctggttttttacaattatctcttaaaatgttttattataattgatttaaaaaccggaaagctgtcatatcaggatattgggcagatagatttctatgtccgctatttcgatgatcaaatcaagcttccggaagacaatcctacattaggtattattctatgcgccgataaaaatgaaactatggcaaaatattctgtcctttctgataaagacaatctttatgcctcaaaatatatggattatcttcccacggaagaagaactgaaacgagagctggaacgcgagcgggcaattatcgaaagtaagctgaaggaagacaataatggctaa

SEQ ID NO: 68384 - protein, 344 aa, Unknown
  Obtained from environmental sample
  DOMAIN (11)...(330): Protein of unknown function (DUF1016)
  misc_feature (1)..(344): Xaa is any amino acid
MADIIPVEDTVYQSIRTVLAAARQKVYTAVNSAMVEAYWDIGRQIMEAQEGQRAEYGTGLIKYLAERLSKEFGKGYTETNLKYMRQFYAAFPIRHALRDELSWTHYRLLMKVRNEVEREFYLKECIECNWSVRQLERQITTFYYKRLLATRKEGKESVKNEIQQTEPKTDPDFILKDPYILEFLDLKENKDYHESELEQALIDKLQEFLLELGKGFSFVARQKRITIEGDHYYVDLVFYNYLLKCFIIIDLKTGKLSYQDIGQIDFYVRYFDDQIKLPEDNPTLGIILCADKNETMAKYSVLSDKDNLYASKYMDYLPTEEELKRELERERAIIESKLKEDNNG

SEQ ID NO: 68385 - DNA, 1878 bp, Unknown
  Obtained from environmental sample
  misc_feature (1)..(1878): n is a, c, g, or t
ttgcaaagggaattattgtcaaacagtggtagcgtctttgtgcagattagcgatgagaatgtacatcatgtgagggaaatttgcgatgaagtttttggtattgaaaattttgtaagtcaaatactgtttcaaacaactggcggatttgagagcaatacaatatcaagggcaggtgatttgatttgttggtatgcaaaaaataagaaagaaataaagtatcactctttgtatgaaaagcaagatgtctctcccggagacagtttgtacaattgggttgttttacctgatggaacgcaacgtagtcttacaaaggacgaaaaaaccgacgcatctttaatacccgtcggtgcaaatgtttataaagctgataatattaaatcacaaggagctagttcaactgaacaggcatttacgtatagtggcaaaacatattatcccggagaaactagtcactggaaaacatcacctgaagggctccaaagattggcggataatggaagaatccatcttgcagcaaacagtatccagtatagacgatttactactgattttcctttttctcaattcacaaatgtctggcgagatacaggaagcggcagttttcttgatgaaaaagtttatgttgtacaaacaggcgtaaaggttgtctcccgctgtctcctcatgaccaccgaccccggcgacttggtactcgacatcacctgcggaagcggaaccaccgcctacgttgccgaacaatggggacgccgttgggtaacctgcgacacttcccgcattgccatcacccttgcaaaaaaacgcctgatgaccgcaacatttgattattacaaactggcgcacccggaacagggagtatcaagcggctttgtgtataaaacagtcccgcacatcacgctcaagtcaatagcgaataacgaaccgccggaacaggaaacgctctacgaccagccggaaatagaaaaaagaaaagtccgcatatcaggaccctttaccgtggaagctcttcccgctccggtagtaaaaccactcgatgatgatacccaccccgctccgtttttccatgaaaacgccgctaaaaaacaatccgactggatgcaggaattaaaagcgtcaggcatattggggcggcagggagaaaaaattcaattctccagagtagaaccattggaaggaacaaaatttctccatgcggaagccgagacaaaagaaacagacagaaaaaaagccgtcatttgttttgctggcgaaactcgccctctcgatattcgcatggttacccaagcgttgaatgaggcggaaaccataagaccgaaacccgtttacatcgttttcgccgctttccaatttgacccaacggcggcaaaacatattgacgatactaaatggcccggggttacattgttaaaagtacaaatgaaccccgaccttatgaccgcagatttaaagaagaaagtatcctcaagccaaagtttctggcttgtcggacagcccgatgtagagcttatccacatcgaaaaaggagccgacaaaggcaagtataaaatcaaagtaaaaggctttgactattacgatataaaacaagggatagtcaattcaggcggaaccgataaaatcgccatgtggatgcttgataccgattatgacggtatgtccatagaacccaaacaggtatttttccccatggaagggaaaaacgaaggttgggataaactggcaaaaaccttaaaagcggaaatcaaccctgacctaatcgaaaaatacaggggcacagaatccctgccatttacaattaaagataatacccaaatagccgtcaaaatagttgatgataggggaattgaaagccttaaagtaatttcggtaggcgcaaatggctga

SEQ ID NO: 68386 - protein, 625 aa, Unknown
  Obtained from environmental sample
  DOMAIN (1)...(266): DNA methylase
  misc_feature (1)..(625): Xaa is any amino acid
MQRELLSNSGSVFVQISDENVHHVREICDEVFGIENFVSQILFQTTGGFESNTISRAGDLICWYAKNKKEIKYHSLYEKQDVSPGDSLYNWVVLPDGTQRSLTKDEKTDASLIPVGANVYKADNIKSQGASSTEQAFTYSGKTYYPGETSHWKTSPEGLQRLADNGRIHLAANSIQYRRFTTDFPFSQFTNVWRDTGSGSFLDEKVYVVQTGVKVVSRCLLMTTDPGDLVLDITCGSGTTAYVAEQWGRRWVTCDTSRIAITLAKKRLMTATFDYYKLAHPEQGVSSGFVYKTVPHITLKSIANNEPPEQETLYDQPEIEKRKVRISGPFTVEALPAPVVKPLDDDTHPAPFFHENAAKKQSDWMQELKASGILGRQGEKIQFSRVEPLEGTKFLHAEAETKETDRKKAVICFAGETRPLDIRMVTQALNEAETIRPKPVYIVFAAFQFDPTAAKHIDDTKWPGVTLLKVQMNPDLMTADLKKKVSSSQSFWLVGQPDVELIHIEKGADKGKYKIKVKGFDYYDIKQGIVNSGGTDKIAMWMLDTDYDGMSIEPKQVFFPMEGKNEGWDKLAKTLKAEINPDLIEKYRGTESLPFTIKDNTQIAVKIVDDRGIESLKVISVGANG

SEQ ID NO: 68387 - DNA, 558 bp, Unknown
  Obtained from environmental sample
  misc_feature (1)..(558): n is a, c, g, or t
atgcctaagaaaacccccgccattgacacctccaaactcaaccaaatagacgcctacacctaccccgaacacgaccgcgccaacatccctcctattggcatggctcaatacgacacagtagccagccccgaagttaaatacgaatacgacccccacatagccccctccctgcaatgggcaggaaaaaaagaaggaacaacttttgaagtgccgacatcttcaatccatatacacgaaagcataaaaccccataaaataatccgctccgtccagacaatcggtgacgattatgctgatgaacaaggctggttattcgaatcagacgcggaaagggcaaaacgccgcaatgactctattgagttttaccagcataaaaacaaatggacaaaccgcctcatagccggagacagcctcgtcataatgaattccatgcttgaaaaagaaggaatggcaggacaagtacaaatggtctacatagacccgccctacggtataaaatacggctccaatttccagccctttgtgaacaaacgggacgttaaagacaaaaaagactaa

SEQ ID NO: 68388 - protein, 185 aa, Unknown
  Obtained from environmental sample
  misc_feature (1)..(185): Xaa is any amino acid
MPKKTPAIDTSKLNQIDAYTYPEHDRANIPPIGMAQYDTVASPEVKYEYDPHIAPSLQWAGKKEGTTFEVPTSSIHIHESIKPHKIIRSVQTIGDDYADEQGWLFESDAERAKRRNDSIEFYQHKNKWTNRLIAGDSLVIMNSMLEKEGMAGQVQMVYIDPPYGIKYGSNFQPFVNKRDVKDKKD

SEQ ID NO: 68389 - DNA, 2979 bp, Unknown
  Obtained from environmental sample
  misc_feature (1)..(2979): n is a, c, g, or t
atgtttcttaaacgccttaccattctcggttttaagtcatttgccgaccgtacagacattgccttcagcgacgggattaccgcccttttaggccccaacggctgcggaaagtccaatgttgtagacgcagtcaagtgggtgcttggggagcatgccattaaatccctgcgcgccgagaaaatggaagacgttattttcggcggcacggaaacccgaaaaccgctgaatgtggctgaagtaaccctgaccatcgcaaacgacgccggccttttgccgcttgatttgccggagattgagataaagaggcggcttttccgttccggtgagagcgaatattttatcaacggcgctcaggtgcgtcttaaagacatacgcgaacttttttgggataccggcgtaggcaaaaccgcctattcggtaatggagcagggaaggatagaccaaatcctctcttccaagcccgaggacaggcgctatctttttgaagaggcggcgggaataacgcgtttcaaagaacgaggcgcggaagcggagcgcaaccttgccaaaaccgaggaaaatgtccgccaggtggaaataatcttaaatgaggtaaaacgctcccacgacagcctgaaagtccaatccgaaaaaacaatgaagtaccgcaccctgcgcgatgaaattttcaattatgagcttgatatacagcttttgcgtttaaagcagttcaggaacgagaggggagagcgcaacgaaacattgaaacggcgcaccgccgaccgcgaccgtatccgcgccgagatggaaaacgagaacaaggcgcttgaagaacacatggacgaggtaaactccatggaggcgcgttttgtagaactgcaaaaaaacatttacggtcttgcccttgaaaaaaacgcgcgtgaaaacgaagtgcgtctttttaacgaacagcgcaacgagaataaaataaaagcaggccagaacgaggaacgcgaaaaacaaattatccagaaaatagaagaactgaacagcgacgccgctgctcaggacgctatagtcgccgacatgcaaaaacagcttgaaagcatagaagaaaatatccgcgcctttgaggaaaacatacagcttgccgcctcccgcataagcgagaatgaaaaagaggtgcatcgggctgaagaagagatacacaatatcgagaaagagcaggcggagtttgagaaagagcttgccgtaataaccgacgacatagtcgcggaattggacgcaggcttaagaaaagccggctattcggcggccgagcgcaaaacagcggaagaagcgttacacgaaactcttggtcgtttgaatgccgttctgggcggcagggaagcgctgctccgcgacttgaccgccgcatcggcgacgggtgtggatgctgcggaacttggacgcattgcgggtactttggcatcggggcttgccgaggccgccgcggacgcgcaaaaggcgctggaactttttaaaagttaccgcgaacatacgccgacttttattgacgagtttcttgcccctcagggaattattaccaaaaagcgcgcgcttgattcgcagatcaggggcgcgaaggacagtattgaggagcgacggcagcgcgttaaagatttacgaagcgataatatcaatctgctggcaaagatagacgaataccgcgctactctggaaaatttaaaagttaaccgcgctcatatgaaaacgcgcgcgcaatccgccgaagaacaggcaaggcttatcaggcgggaactttcggggcaggaaggtcagttaaaaaatatccgcgacgaactttcgcttacgcgcaaaaggctggaagagattgacgcgcggattgccgctattcacgcggaaattacatctatcgaagaaaagactgcggcgttttccgcagagcttgaaaaactggaaaaagatatccgcaaaagaaacgacaatgtcgcaagtaaaaaagaagttatcaataagcgtatggcggagctttccaaagtgcaggaagctcttgaaaaaatacacatagagcttgtgcagtcggaaaccgaaataaaaaacattcaggataatttccgggaaaaccattcaagggatttaatggaatttgaagagcgtatctttacaattacggccgcccccgccgacttgcgcgacaagctggcgaacgctcgaactaaaatgaaagagctaggctccgtaaaccttatggccccagaagaatttgcggaaacaaaagaacgttacgaatttttaagcaatcagatggcggatctcgaaaaagcaagaaaagaccttgaagaccttaccgccgaaattagacaggaatcttcagctttgtttctggaaacttacaatcgtatcaagaaaaattttcacaatatgttcaggcggcttttcggcggcggtcgcgcggaactgcggctttccgaccctaaccacattctggaatcggggattgaaattttcgctcagccgcccggaaaaaagctggaacatttaagcttgctttccggcggcgaatgttcgatgacggcggtcgccctgctctttgcgacatacatggtaaagcccagtcccttctgccttttggacgaaattgacgccgcgttagacgaacagaatgtcgggcgctttgtccaccttctgcgcgaattcagcgacacaagccagtttattgtcataacacataacaagaaaaccgttaccggcgcggggactctgctgggcgttactatggaagaatccggcgttaccaaactcgtttcggtgcggcttgagcatgaggaattggccctggcaaaagaggagcctccccagcatgaactgtgggacagcgaaggcaatttcgcggaagaagacgttccgcccgaagagggccgtgaactgcccatcggcgtaaacgatccccgcaaagttactgaagcccaactgcggccaatcacggcggcaaggccgcaaaccgctcctcaaacataa

SEQ ID NO: 68390 - protein, 992 aa, Unknown
  Obtained from environmental sample
  DOMAIN (2)...(920): RecF/RecN/SMC N terminal domain
  misc_feature (1)..(992): Xaa is any amino acid
MFLKRLTILGFKSFADRTDIAFSDGITALLGPNGCGKSNVVDAVKWVLGEHAIKSLRAEKMEDVIFGGTETRKPLNVAEVTLTIANDAGLLPLDLPEIEIKRRLFRSGESEYFINGAQVRLKDIRELFWDTGVGKTAYSVMEQGRIDQILSSKPEDRRYLFEEAAGITRFKERGAEAERNLAKTEENVRQVEIILNEVKRSHDSLKVQSEKTMKYRTLRDEIFNYELDIQLLRLKQFRNERGERNETLKRRTADRDRIRAEMENENKALEEHMDEVNSMEARFVELQKNIYGLALEKNARENEVRLFNEQRNENKIKAGQNEEREKQIIQKIEELNSDAAAQDAIVADMQKQLESIEENIRAFEENIQLAASRISENEKEVHRAEEEIHNIEKEQAEFEKELAVITDDIVAELDAGLRKAGYSAAERKTAEEALHETLGRLNAVLGGREALLRDLTAASATGVDAAELGRIAGTLASGLAEAAADAQKALELFKSYREHTPTFIDEFLAPQGIITKKRALDSQIRGAKDSIEERRQRVKDLRSDNINLLAKIDEYRATLENLKVNRAHMKTRAQSAEEQARLIRRELSGQEGQLKNIRDELSLTRKRLEEIDARIAAIHAEITSIEEKTAAFSAELEKLEKDIRKRNDNVASKKEVINKRMAELSKVQEALEKIHIELVQSETEIKNIQDNFRENHSRDLMEFEERIFTITAAPADLRDKLANARTKMKELGSVNLMAPEEFAETKERYEFLSNQMADLEKARKDLEDLTAEIRQESSALFLETYNRIKKNFHNMFRRLFGGGRAELRLSDPNHILESGIEIFAQPPGKKLEHLSLLSGGECSMTAVALLFATYMVKPSPFCLLDEIDAALDEQNVGRFVHLLREFSDTSQFIVITHNKKTVTGAGTLLGVTMEESGVTKLVSVRLEHEELALAKEEPPQHELWDSEGNFAEEDVPPEEGRELPIGVNDPRKVTEAQLRPITAARPQTAPQT

SEQ ID NO: 68391 - DNA, 348 bp, Unknown
  Obtained from environmental sample
  misc_feature (1)..(348): n is a, c, g, or t
ttgataaaatattcgctctcaccggaacggaaaagccgcctctttatctcaatctccggcaaatcaagcggcaaaaggccggcgtcgtttgcgatggtcagggttacttcagccacattcagcggttttcgggtttccgtgccgccgaaaataacgtcttccattttctcggcgcgcagggatttaatggcatgctccccaagcacccacttgactgcgtctacaacattggactttccgcagccgttggggcctaaaagggcggtaatcccgtcgctgaaggcaatgtctgtacggtcggcaaatgacttaaaaccgagaatggtaaggcgtttaagaaacatataa

SEQ ID NO: 68392 - protein, 115 aa, Unknown
  Obtained from environmental sample
  misc_feature (1)..(115): Xaa is any amino acid
MIKYSLSPERKSRLFISISGKSSGKRPASFAMVRVTSATFSGFRVSVPPKITSSIFSARRDLMACSPSTHLTASTTLDFPQPLGPKRAVIPSLKAMSVRSANDLKPRMVRRLRNI

SEQ ID NO: 68393 - DNA, 510 bp, Unknown
  Obtained from environmental sample
  misc_feature (1)..(510): n is a, c, g, or t
ttgggacattcatataagacggcgttctacgcttacaatctggttaaaaatttcaagaacgaacccggacttctggatgatgtttatgtcggcggcatattgcatgatatgggaaaaatcattttttccaatgtgcatcccgacttgcttaataaaataaaggcattcagctcggaaagaaaccttccggcttccacctttgaagacctttcagcgggcatgaaccacgcggagttgggcgcgttaatcgcggaaaaatggaacttccctccgcggctggtttcggcaatacgttatcatcatgagcccgacgcggttcccgacgacttaaaaaatatggtagacgcggtataccttgcgaacatgttctgcgagtatgaaaataaaaatgtcagttttgaccagtttgatgccggcgcccttgaaaattacggtctgagcagcaagaaaaaacttaataccattcttggacgtttccagtccggattcaagaaagaaatgaagatttaa

SEQ ID NO: 68394 - protein, 169 aa, Unknown
  Obtained from environmental sample
  DOMAIN (2)...(122): HD domain
  misc_feature (1)..(169): Xaa is any amino acid
MGHSYKTAFYAYNLVKNFKNEPGLLDDVYVGGILHDMGKIIFSNVHPDLLNKIKAFSSERNLPASTFEDLSAGMNHAELGALIAEKWNFPPRLVSAIRYHHEPDAVPDDLKNMVDAVYLANMFCEYENKNVSFDQFDAGALENYGLSSKKKLNTILGRFQSGFKKEMKI

SEQ ID NO: 68395 - DNA, 768 bp, Unknown
  Obtained from environmental sample
  misc_feature (1)..(768): n is a, c, g, or t
ttggttttctttccgctctgtgtgcggcatggttcgcgtcgcggaaagcggctaaaatacagccggcggaggtgctgcgttatgagtaatattcttgtaaggacgcaagacatagtaaaaaattatttatccggtgcggagacccttcatatattaaaaggaataaaccttcagatagaggaaggaacatccttatcaataacggggcagagcggaagcggcaaaagcaccctgctgaacattttaggcgggcttgaccgcgccgacggcggaagcgtttttatcggcaatgatgaaattacgtccctctcggaaaaggaaatgtccgtgttcagatcaaaaaaagtgggctttatttttcagtttcattacctgcttaaagattttaccgctcttgaaaacattatgattcccgcctacatagccggactgaaaaaaaaggacgcgcttgacagggcaagaaccctgcttgccgacgtaaaccttgaagagcgcggaaaacatttcccgtcccagctttcaggcggggaacgccagcgcgtggcagtcgcaagatcaatggtaaacgatcccgcgttaatcctcgcggacgaaccgacgggcaatctggaccccgccaacagcgatattgtttcggaactgctctatgccgccgcgcaaaagaggggaaaaactttaattgtagtgacccatgacgaaaaagcggcggcaagggcttctgtccgccttgtccttgaaaacgggcagttacaggggcaggcgctttga

SEQ ID NO: 68396 - protein, 255 aa, Unknown
  Obtained from environmental sample
  DOMAIN (27)...(251): RecF/RecN/SMC N terminal domain
  misc_feature (1)..(255): Xaa is any amino acid
MVFFPLCVRHGSRRGKRLKYSRRRCCVMSNILVRTQDIVKNYLSGAETLHILKGINLQIEEGTSLSITGQSGSGKSTLLNILGGLDRADGGSVFIGNDEITSLSEKEMSVFRSKKVGFIFQFHYLLKDFTALENIMIPAYIAGLKKKDALDRARTLLADVNLEERGKHFPSQLSGGERQRVAVARSMVNDPALILADEPTGNLDPANSDIVSELLYAAAQKRGKTLIVVTHDEKAAARASVRLVLENGQLQGQAL

SEQ ID NO: 68397 - DNA, 492 bp, Unknown
  Obtained from environmental sample
  misc_feature (1)..(492): n is a, c, g, or t
atgtttatacttgtagggcttatttttatagtagtggcccttaatatttttcaatcgcagagaagggctgtcttgcagcgcagagaggaaatcggactgttacgcgccataggcgggcaggaaagggatgtccgttttgtttttgtctgcgacggggcgtttatagggcttacgggcgcgggactcggccttattttcggccttttaatagcgtcccatattcctcaatttttttcattggtagaaattattgtaaataatgttataggcctgcttaatactgtagccggttttttcggagcgcaaaaacaggcgaatttcgccgttttctcgccggctgttttttacattaaagaaataccttcaaggataatacccgcggaagttatattaatattcatgtttggttttctttccgctctgtgtgcggcatggttcgcgtcgcggaaagcggctaaaatacagccggcggaggtgctgcgttatgagtaa

SEQ ID NO: 68398 - protein, 163 aa, Unknown
  Obtained from environmental sample
  DOMAIN (1)...(156): Predicted permease
  misc_feature (1)..(163): Xaa is any amino acid
MFILVGLIFIVVALNIFQSQRRAVLQRREEIGLLRAIGGQERDVRFVFVCDGAFIGLTGAGLGLIFGLLIASHIPQFFSLVEIIVNNVIGLLNTVAGFFGAQKQANFAVFSPAVFYIKEIPSRIIPAEVILIFMFGFLSALCAAWFASRKAAKIQPAEVLRYE

SEQ ID NO: 68399 - DNA, 768 bp, Unknown
  Obtained from environmental sample
  misc_feature (1)..(768): n is a, c, g, or t
ttgaaaaacagatgggttttgtttgtagcgttacgctatatttttaagggcagatcaaattcccccgttttagcggtgcttggaatcgctttcggcgttcttgcccttataataattatttcgataatgaacggttttcagcttggctttatagaaagcattatagaaatctcgtcataccacctgcgtttggattccgttccccccgaattaataccgcgggctcgggatatattaatgacggttccgggggtaaagtccgccgccccttttaaggaatttcaggcgcttgtaaggagttccggaaggtcgggacagcaggcggttttggtaagaggagtcccggcggatgtccttgaatcggacaagttaatgggagaaaaactggaatttgaagaaggctcatttgacatttacagtccggattcagtcttactgggaaccgaacttgcaaggaggcttgggcttgacgttggggacagcgtaactatatattcgataaccggaattttatccgcgcaggacgacagcggctttgatgaatttacaataaaaggaattttcaggacgggtttttatgaatacgactgcagttgggcgtttataaatataggaagcggcgcttttcttgcggaagataacggcaacgccaaaggcgacgcccacggcgaaaaaataggcgtaaaaattaaaaaccgttttcaggacaggattgttctggaacgagttagaaaaagattttcaagggaagaggatttaaggacgtaa

SEQ ID NO: 68400 - protein, 255 aa, Unknown
  Obtained from environmental sample
  misc_feature (1)..(255): Xaa is any amino acid
MKNRWVLFVALRYIFKGRSNSPVLAVLGIAFGVLALIIIISIMNGFQLGFIESIIEISSYHLRLDSVPPELIPRARDILMTVPGVKSAAPFKEFQALVRSSGRSGQQAVLVRGVPADVLESDKLMGEKLEFEEGSFDIYSPDSVLLGTELARRLGLDVGDSVTIYSITGILSAQDDSGFDEFTIKGIFRTGFYEYDCSWAFINIGSGAFLAEDNGNAKGDAHGEKIGVKIKNRFQDRIVLERVRKRFSREEDLRT

SEQ ID NO: 68401 - DNA, 921 bp, Unknown
  Obtained from environmental sample
  misc_feature (1)..(921): n is a, c, g, or t
atgagatgccccttccgtaaagtatgtcgaactcggcctcccgaaacggcggggcgaccttgttttttacactttggcgcgggtgcggttgcctatcacctcttcgccgtcttttatctgggcggtgcggcggatgtcgacgcgcacggaagagtaaaatttaagggcgttgccgcctgtcgtggtttccgggttccccataaaaacgccgatcttcatgcggatctggttgatgaagatgaggcaggtcttggacttcgagagtatgccggtcagcttgcgcagagcctgcgacatgaggcgggcttgcagacccacgtggctgtcgcccatgtcgccctcgatctcggcggcggggacgagggcggccacgctgtcgatcactatgaggtcgatggccccgctgcgcaccagcgtgtcggcgatctccagcgcctgctcgccggtatcgggctgggagacaagaaggttgtcaacatccacgcccaagcccttggcgtaggtggcgtcaaaagcatactccgcgtctatgagcacagccaccccgccctgtttctggacgttggctatagcgtggagcgccacggtggtcttgccggaggactccggcccgtatatctcgactatgcgccccttcgggaagccgcccacgccgagagccgtgtccaaggagatggagccggtcggaatcgcctgaatgtccgtctgctgcgcggcggtgcccagccgcatgatcgaacccttgccgtgctgcttctctatctggctgagcgcctgctcgatggcggcgttgcgctgcttgttgccgccgtccttgccctctttgccatccttgtccttgctatccttttcgtcggccgccgacgcacttttctttcccattatcatcactccgtatttattggttttattgtttgttga

SEQ ID NO: 68402 - protein, 306 aa, Unknown
  Obtained from environmental sample
  misc_feature (1)..(306): Xaa is any amino acid
MRCPFRKVCRTRPPETAGRPCFLHFGAGAVAYHLFAVFYLGGAADVDAHGRVKFKGVAACRGFRVPHKNADLHADLVDEDEAGLGLREYAGQLAQSLRHEAGLQTHVAVAHVALDLGGGDEGGHAVDHYEVDGPAAHQRVGDLQRLLAGIGLGDKKVVNIHAQALGVGGVKSILRVYEHSHPALFLDVGYSVERHGGLAGGLRPVYLDYAPLREAAHAESRVQGDGAGRNRLNVRLLRGGAQPHDRTLAVLLLYLAERLLDGGVALLVAAVLALFAILVLAILFVGRRRTFLSHYHHSVFIGFIVC

SEQ ID NO: 68403 - DNA, 825 bp, Unknown
  Obtained from environmental sample
  misc_feature (1)..(825): n is a, c, g, or t
gtgatgataatgggaaagaaaagtgcgtcggcggccgacgaaaaggatagcaaggacaaggatggcaaagagggcaaggacggcggcaacaagcagcgcaacgccgccatcgagcaggcgctcagccagatagagaagcagcacggcaagggttcgatcatgcggctgggcaccgccgcgcagcagacggacattcaggcgattccgaccggctccatctccttggacacggctctcggcgtgggcggcttcccgaaggggcgcatagtcgagatatacgggccggagtcctccggcaagaccaccgtggcgctccacgctatagccaacgtccagaaacagggcggggtggctgtgctcatagacgcggagtatgcttttgacgccacctacgccaagggcttgggcgtggatgttgacaaccttcttgtctcccagcccgataccggcgagcaggcgctggagatcgccgacacgctggtgcgcagcggggccatcgacctcatagtgatcgacagcgtggccgccctcgtccccgccgccgagatcgagggcgacatgggcgacagccacgtgggtctgcaagcccgcctcatgtcgcaggctctgcgcaagctgaccggcatactctcgaagtccaagacctgcctcatcttcatcaaccagatccgcatgaagatcggcgtttttatggggaacccggaaaccacgacaggcggcaacgcccttaaattttactcttccgtgcgcgtcgacatccgccgcaccgcccagataaaagacggcgaagaggtgataggcaaccgcacccgcgccaaagtgtaa

SEQ ID NO: 68404 - protein, 274 aa, Unknown
  Obtained from environmental sample
  DOMAIN (35)...(274): recA bacterial DNA recombination protein
  misc_feature (1)..(274): Xaa is any amino acid
MMIMGKKSASAADEKDSKDKDGKEGKDGGNKQRNAAIEQALSQIEKQHGKGSIMRLGTAAQQTDIQAIPTGSISLDTALGVGGFPKGRIVEIYGPESSGKTTVALHAIANVQKQGGVAVLIDAEYAFDATYAKGLGVDVDNLLVSQPDTGEQALEIADTLVRSGAIDLIVIDSVAALVPAAEIEGDMGDSHVGLQARLMSQALRKLTGILSKSKTCLIFINQIRMKIGVFMGNPETTTGGNALKFYSSVRVDIRRTAQIKDGEEVIGNRTRAKV

SEQ ID NO: 68405 - DNA, 699 bp, Unknown
  Obtained from environmental sample
  misc_feature (1)..(699): n is a, c, g, or t
atgacagattggccgagactccatctggatgtgctggttacgcggattatcaaggaattcaacgtaggcgcgagggtggggcagccccaggtaacctaccgcgaatcggtcagcgcggcggtagaaagaaccgagcaattctcccgggtaatcgcgggaaaggaaaacgccgcttcgctaaccataaaagttgaacctgtgggacggggtaaagggaaccggtactcctggctggttaaaaaaccggggatccccgaaggtattcgggacgcggtagagcgggggattaattcggcgtttcagtcgggcataagcctgggctacccctgtatggatgtcggcgtgagtattatagacgcggggtttaacgaattaaccgccacggaatttgcctttgaggcctgcgccagccttggctttgacgaagcctgccgcagcgcaaacccgattctccttgaaccaatcatggcccttgaccttgtttctcccaaggaatttgtcggggacgttatcagccttgttacccagcggggtgggcaggtattgagcatggaatcaaagcccggcggggacgaagttaaagcccaggcccctatggcgaaaatgttcggcttcatgacctccctccgcagcgcaagccagggccgggctacttttaccatggtattctcccactttgagaagacttcggggaaatag

SEQ ID NO: 68406 - protein, 232 aa, Unknown
  Obtained from environmental sample
  DOMAIN (29)...(148): Elongation factor G, domain IV
  misc_feature (1)..(232): Xaa is any amino acid
MTDWPRLHLDVLVTRIIKEFNVGARVGQPQVTYRESVSAAVERTEQFSRVIAGKENAASLTIKVEPVGRGKGNRYSWLVKKPGIPEGIRDAVERGINSAFQSGISLGYPCMDVGVSIIDAGFNELTATEFAFEACASLGFDEACRSANPILLEPIMALDLVSPKEFVGDVISLVTQRGGQVLSMESKPGGDEVKAQAPMAKMFGFMTSLRSASQGRATFTMVFSHFEKTSGK

SEQ ID NO: 68407 - DNA, 936 bp, Unknown
  Obtained from environmental sample
  misc_feature (1)..(936): n is a, c, g, or t
atggacgaggatagcataacaagaatctattgcgatgtcgacgacttttgcaaagcccttgaaggctattgcagggcccatctgttgcctggcgggaaggccccgaagtggttcccggcaagccgcctgtcgctaagcgaggtgatgaccattaccgtgctgtttcatctgtcgggctaccgttgtttcaagtggtattaccaaacccaagtttgtgtgcatatgcgggactatttccccgcgccggtcagctataatcggtttgtggagctgatgggctacgctttgcttcccctgctcatatatacccagaggttcagacgggggaagtgtaccggtatcagttttattgactctactccccttaaagcctgcaatgcaaggcgcatctatagccacaaagtgttcaaaacatgggcggctcggggaaaaagctctaccggatggttttacggctttaaattgcacctggttatcaacgacatgggagagatatgctctttttgtcttaccccgggcaacattgacgaccgcaatgttgacgtcattggtcggctttgccgggaattgagcgggaaactcttcggggataggggatatatttcacaggaactgtttgaaggcctgtatcggcagggcatccagttgatcaccaggctacggaagaacatgaagaataagttgatggacatgggggacaggatactgttgcggaaacgtgctgtgatagagtcggtcaatgattttctaaaaaacatctgccaagtggagcacagtcggcatcggagcatacataattttctagtgaatgtattggtggctgtatcggcatttagttttctgccacataagccgtctattcgtggtcttggtgatgagagggctttgctgtgcttgcttaatattttcatcgaactcacgttatttttaaggtag

SEQ ID NO: 68408 - protein, 311 aa, Unknown
  Obtained from environmental sample
  DOMAIN (114)...(280): Transposase DDE domain
  misc_feature (1)..(311): Xaa is any amino acid
MDEDSITRIYCDVDDFCKALEGYCRAHLLPGGKAPKWFPASRLSLSEVMTITVLFHLSGYRCFKWYYQTQVCVHMRDYFPAPVSYNRFVELMGYALLPLLIYTQRFRRGKCTGISFIDSTPLKACNARRIYSHKVFKTWAARGKSSTGWFYGFKLHLVINDMGEICSFCLTPGNIDDRNVDVIGRLCRELSGKLFGDRGYISQELFEGLYRQGIQLITRLRKNMKNKLMDMGDRILLRKRAVIESVNDFLKNICQVEHSRHRSIHNFLVNVLVAVSAFSFLPHKPSIRGLGDERALLCLLNIFIELTLFLR

SEQ ID NO: 68409 - DNA, 465 bp, Unknown
  Obtained from environmental sample
  misc_feature (1)..(465): n is a, c, g, or t
ttgtcgaactcacgtggctttaaattgcacctggttatcaacgacatgggagagatatgctctttttgtcttaccccgggcaacattgacgaccgcaatgttgatgtcattaaccggctttgccgtgaattgagcggaaaactctttggggataggggatatatttcacaagaactgttcgaacgcctgtatcagcagggcatccaattaatcacgaaactgcggaagaacatgaagaataagctgatggatatgagggacaagatactgttgcggaaacgcgcggtgatagagtcggtcaatgattttctaaaaaacatctgccaagtggagcacagccgtcaccggagcattaacaattttctagtcaatgtattagctgctctgtcggcatatagctttctgtcgcataagccgtctattcacggtctatgcgatgaaaaggctttgccgattcttgtttaa

SEQ ID NO: 68410 - protein, 154 aa, Unknown
  Obtained from environmental sample
  DOMAIN (2)...(134): Transposase DDE domain
  misc_feature (1)..(154): Xaa is any amino acid
MSNSRGFKLHLVINDMGEICSFCLTPGNIDDRNVDVINRLCRELSGKLFGDRGYISQELFERLYQQGIQLITKLRKNMKNKLMDMRDKILLRKRAVIESVNDFLKNICQVEHSRHRSINNFLVNVLAALSAYSFLSHKPSIHGLCDEKALPILV

SEQ ID NO: 68411 - DNA, 1290 bp, Unknown
  Obtained from environmental sample
  misc_feature (1)..(1290): n is a, c, g, or t
atggcagagaaaaattacaagtttgaaactatccagattcacgccggacaggaaaaacccgacccggctacggacgcaagggcggtcccgatttatcagaccacttcgtatgtgtttccctcgtccaaatcggcggccgaccgttttgcgcttacggaaccgggtaatatttacactcgtcttatgaaccccacttgggacgtttttgaaaaactcatggctgctttggaaaacggctcggtggctttggctacctcatctggagcggcggcggtctacttacgcaatcttgaatatcgccaaagcggagatcatatcgtatcggacaaccagctttacggcggcacttataatttattcgccaatacattaaaggacgtaggtatcgatgtaacttttgtggacggcggcaacgcggcgaattttgaaaaggcgattaagccgaatacaaaggcgttgttttttgaaacgataggaaacccgaacgcgactatcgtagacattgaagcggttgtcgaaatcgctcatcgtaacggtattcccgttatcgtagacagcacatttgccacgccctaccttttacgcccgattgattacggcgtagacattgtggtacattcggcgacaaaatttatcggcggtcacggaacatctatcggcggcgttattgttgacggaggaaaattcgattgggcgcagaacgataaattccccggtctgtccaaaccgaacccaagttatcacggcgtagttttcaccgacgttgtgggaaaattggctttcatcattaaagccaggacgacgcttctgcgcgatacaggcgcggctatgtcgcctttcaacgctttcatgtttttgcagggacttgaaactttgtctttccgcatagagcgtcatatcgaaaacgcgaaagccgttgttaagtggctggaaaaacatccgcaagtggaacgcgtaaatcatccttcactgcccagccacaaggatcacaaattgtacggcaaatatttcccaaaaggcgcgggttctatttttacattcgagataaagggcgacgcggagaaagcaaagcgtttcactgaagaacttaaattgttttcactgcttgccaacgtggctgatgtaaaatcgctggttatacatccggctactacaacccactcgcagatgagcgaaagcgaacttcttgagtcgggaataaaaccaaatacaattcgtctttctatcggcgctgaacatatcgacgatattattgatgatctgagtcaaggttttgaagcggttaagtaa

SEQ ID NO: 68412 - protein, 429 aa, Unknown
  Obtained from environmental sample
  DOMAIN (40)...(422): DegT/DnrJ/EryC1/StrS aminotransferase family
  misc_feature (1)..(429): Xaa is any amino acid
MAEKNYKFETIQIHAGQEKPDPATDARAVPIYQTTSYVFPSSKSAADRFALTEPGNIYTRLMNPTWDVFEKLMAALENGSVALATSSGAAAVYLRNLEYRQSGDHIVSDNQLYGGTYNLFANTLKDVGIDVTFVDGGNAANFEKAIKPNTKALFFETIGNPNATIVDIEAVVEIAHRNGIPVIVDSTFATPYLLRPIDYGVDIVVHSATKFIGGHGTSIGGVIVDGGKFDWAQNDKFPGLSKPNPSYHGVVFTDVVGKLAFIIKARTTLLRDTGAAMSPFNAFMFLQGLETLSFRIERHIENAKAVVKWLEKHPQVERVNHPSLPSHKDHKLYGKYFPKGAGSIFTFEIKGDAEKAKRFTEELKLFSLLANVADVKSLVIHPATTTHSQMSESELLESGIKPNTIRLSIGAEHIDDIIDDLSQGFEAVK

SEQ ID NO: 68413 - DNA, 1128 bp, Unknown
  Obtained from environmental sample
  misc_feature (1)..(1128): n is a, c, g, or t
atggatataagcacgctatgtgtacatggctgtgaaaaaaagtttgatacaaccggagcggtagccgttccgatattcgcgtcggctaccttcgctcatccgggcgtcgggcaaagtaccggctttgattactcacgctctcttaaccctaccaacgtacatttggaagacactgtcgccgcgttggaaggcggcagtcacgctgtggcgttttcctccggcatggcggcggtatcggctttaatggagttgttttcacccggcgaccatattatcgcttccaacgatctctacggcggtacgttccgtcttttcaagcatatatcagaaaagaacggcgtaaaattttcctacgccgccacggtaaaagatatagaaaaagaaataacttcgtccacaaaagccatattcatagaaacgccgtctaatccgatgatgaatgtgatagacattgccgcagtcgcggagattgccaagaaacataaattgctctttattgtcgataacacttttcttacgccgtattttcaacagccgttctctcttggagcggatattattctgcacagcgcgacaaaatatttaggcggacacaacgacactctagccggattgttggttgtaaaagattcaagccttgatgaaaaactaagatttatcgcaaagacgacaggcggatgtctttcgccttttgacagtttcctgattattcgcggaattaaaacgcttgctattcgcatggaacgccagcaggaaacagcgataaaaatagcgcattggcttttggaacaaagcgcggtaaaaaaagtttattacccgggattaaaagaccaccccgattatgaattatcccgcaagcagacaagcggcttcggcggaatgctctccttttccttgaaagacggaaaaacggcggagcgtattctggagagcgtaaaagtaattaagtacgccgaaagtttaggcggcgttgaaagccttatcacataccccatgcttcaaacccacgccgaccttcccgaaaatgagcggaaagcgcgcggcatagacgaatgtttactgcgcctgtccgtgggactggagtccgcggatgatttaatagctgatctaaaacaatcattcaggtaa

SEQ ID NO: 68414 - protein, 375 aa, Unknown
  Obtained from environmental sample
  DOMAIN (12)...(312): Aminotransferase class I and II
  misc_feature (1)..(375): Xaa is any amino acid
MDISTLCVHGCEKKFDTTGAVAVPIFASATFAHPGVGQSTGFDYSRSLNPTNVHLEDTVAALEGGSHAVAFSSGMAAVSALMELFSPGDHIIASNDLYGGTFRLFKHISEKNGVKFSYAATVKDIEKEITSSTKAIFIETPSNPMMNVIDIAAVAEIAKKHKLLFIVDNTFLTPYFQQPFSLGADIILHSATKYLGGHNDTLAGLLVVKDSSLDEKLRFIAKTTGGCLSPFDSFLIIRGIKTLAIRMERQQETAIKIAHWLLEQSAVKKVYYPGLKDHPDYELSRKQTSGFGGMLSFSLKDGKTAERILESVKVIKYAESLGGVESLITYPMLQTHADLPENERKARGIDECLLRLSVGLESADDLIADLKQSFR

SEQ ID NO: 68415 - DNA, 1188 bp, Unknown
  Obtained from environmental sample
  misc_feature (1)..(1188): n is a, c, g, or t
ttgtatatgaaatacaattttgatcgcgtaatagacagaaccaactcctgcagtatcaaatacgaacccacatggcgcgggaagcccgccgacgtactgcccctatgggtcgccgatatggacttcgcttctccgccctgcgtgcaaaaagcgctcgcccgcagagtcaaacacggaatctacggctactcggaaccggatacggaatattttgatgtcacgcgcaagtggtttgaaagccgctataactggtctccccagcgcgaatggctgactattacgccgggagtggtaaccgctttgtacatcgccgtccgctcgctgacagagccgggtgacaatatcgttatacaacaacccgtgtattacccgtttgaatcaagcataagaaaaacaggacggcaattactggtcaacgaacttgtatacagcgacggtcgctacagcatagattttcaggactttgaggaaaaagttaaacaggcgaaaatgtttattttgtgcaatccgcacaatccggtcgggcgcgtttggaaaaccgatgagcttacgcgcatgggcgaaatatgtctgcgctacggcgtgactgttatcgccgatgagattcatcaggactttgtttttcccggtcacaagcacattgtattcgccgccatgaatcaggattttgcgaatataactgttacctgcacttcaccgtcaaaaacttttaatcttgcgggattgatgagcgcaaatatttttatttccaacaaagacctgcgcttaaaatttaaagacgagtatacgagatcaggtttaagccagccgggaataatggggcttatctcatgcaaggcggcgtacaaagacggcgcgcagtggctggaacagcttattgattatcttgcgggaaatatcgctttcctaaaaacatatcttgctaaacacattcccaaaattaaacttgttgaacctgagggaacatatcttgcgtggctggattgcggcgcacttggagttccctctcaaaaaattgacgaaacaattacgcaaaaaggaaaactatggctcagcgcggggcagactttcggaaaaggcggcaacggctttgaacgtatcaatgttgcctgcccccgctccgtactgcgtaacgcgctggatcggctaaaaagtattgattgggaaagcgcggagaaggaaaaatga

SEQ ID NO: 68416 - protein, 395 aa, Unknown
  Obtained from environmental sample
  DOMAIN (30)...(383): Aminotransferase class I and II
  misc_feature (1)..(395): Xaa is any amino acid
MYMKYNFDRVIDRTNSCSIKYEPTWRGKPADVLPLWVADMDFASPPCVQKALARRVKHGIYGYSEPDTEYFDVTRKWFESRYNWSPQREWLTITPGVVTALYIAVRSLTEPGDNIVIQQPVYYPFESSIRKTGRQLLVNELVYSDGRYSIDFQDFEEKVKQAKMFILCNPHNPVGRVWKTDELTRMGEICLRYGVTVIADEIHQDFVFPGHKHIVFAAMNQDFANITVTCTSPSKTFNLAGLMSANIFISNKDLRLKFKDEYTRSGLSQPGIMGLISCKAAYKDGAQWLEQLIDYLAGNIAFLKTYLAKHIPKIKLVEPEGTYLAWLDCGALGVPSQKIDETITQKGKLWLSAGQTFGKGGNGFERINVACPRSVLRNALDRLKSIDWESAEKEK

SEQ ID NO: 68417 - DNA, 1704 bp, Unknown
  Obtained from environmental sample
  misc_feature (1)..(1704): n is a, c, g, or t
atgaaattaaatttattttttaagaaagacaagtcccctgccgatgagggaaaagccggaaatgatttgtcctttaaggataaaagcattttagatcatatcgacaaaatcgttgaaatttccaggaaaaacggcatagaaaaatgcctgattttagggaaaaagcatctggattttattacaaagaaactcggaataaaccctatacaggcgattttattttctcattttttggaaaaaagcaatgactccaatatacagctaagtgaaattgcccagaccataaagtgcagcaatataaaaatcataaaatatatgaacgaatgtgaagaacttgaaaagaaaaaactaattcgctgcagtaaaaacaacgactgcgtttcattcaggataccccgaaatgtatgggacgctctcagaaaaaatgaagagttcaagccggaaaagctggataatttaacaatatcaaagttctttgttactcttgaagaaatttttgatgaaaggagcaataatgaattaacttatgaatccatggctatggaaatattagaccttataaacctaaacatgcatcttcaattttgtaaaaaaattatgagctataatctttacgaagacacccttattcttttagtctgtttttgccatttattcggtaataacaatgatgataatataggagcgcatgatcttaaatttttatacgatgaaaaatttatctacagcgacgttaaaacaagtttaattcacggcagccatgtccttataaaatcaaaatatattgtttataccaataacgacggttttgtgaatactgattcatggaaattgtcggatatggcaaaaaaagagctgttaactgaacttgtagaaaagcataattaccaaaaaaacctgattttgtttgataaaattaagcccaaaaatatgttttacaacgaaaaagaaaaggaggagattggtaaacttcgctcgcttttacaggaagacaattatcataaaatacaggacaggctggaaggcaagggaatgagaaaaggatttgcctgcttgttctcgggctcgccgggaaccggtaaaacagaaaccgcgtggcaaattgcccgcgaaacaaaacggaatgtgatgatggtagacatagccgaaacaaaaagcatgtggtacggggaaagcgaaaagaaaataaaggaagtttttgacacatacagaacggcggttgataattccgaaattgcccccatcctgttgtttaacgaagccgacgctgttataggcaagagaaaagaaattggttcatccaatcactcgattgatcaaaccgaaaataccattcagaacattatcctgcaggaaatggaaaacctttcgggaattatgatagcgactaccaatttgacacaaaacatggacagcgcttttgaacgccgtttcctgtataaaatcacctttgacaaacccagcgtagagagcagaaaaggcatttggaattcaatgcttcccgacctgccaaacgataaagccgaagaactgtccaaaaaatttgaactgtccggcggccagatagaaaacatcgcccgaaagattgaggttgacgcgataataaacggaagtgaattgtgtatggatacgcttgtacagtattgcaaggatgagcttcagaacagccttagtaccggcaggaggatagggtttggggagtga

SEQ ID NO: 68418 - protein, 567 aa, Unknown
  Obtained from environmental sample
  DOMAIN (350)...(535): ATPase family associated with various cellular activities (AAA)
  misc_feature (1)..(567): Xaa is any amino acid
MKLNLFFKKDKSPADEGKAGNDLSFKDKSILDHIDKIVEISRKNGIEKCLILGKKHLDFITKKLGINPIQAILFSHFLEKSNDSNIQLSEIAQTIKCSNIKIIKYMNECEELEKKKLIRCSKNNDCVSFRIPRNVWDALRKNEEFKPEKLDNLTISKFFVTLEEIFDERSNNELTYESMAMEILDLINLNMHLQFCKKIMSYNLYEDTLILLVCFCHLFGNNNDDNIGAHDLKFLYDEKFIYSDVKTSLIHGSHVLIKSKYIVYTNNDGFVNTDSWKLSDMAKKELLTELVEKHNYQKNLILFDKIKPKNMFYNEKEKEEIGKLRSLLQEDNYHKIQDRLEGKGMRKGFACLFSGSPGTGKTETAWQIARETKRNVMMVDIAETKSMWYGESEKKIKEVFDTYRTAVDNSEIAPILLFNEADAVIGKRKEIGSSNHSIDQTENTIQNIILQEMENLSGIMIATTNLTQNMDSAFERRFLYKITFDKPSVESRKGIWNSMLPDLPNDKAEELSKKFELSGGQIENIARKIEVDAIINGSELCMDTLVQYCKDELQNSLSTGRRIGFGE

SEQ ID NO: 68419 - DNA, 573 bp, Unknown
  Obtained from environmental sample
  misc_feature (1)..(573): n is a, c, g, or t
atgaatgattttataactatcgacttcgaaactgctacgtgtaggccagaaagcgccatttccgtgggtttggtaaagtatcgtaattacaagcctgtaagctcttattattcgttaatccgtccgcctaatctgtacattcgttcggattttacggaaattcacggccttacggtaaatgacgtaagggacgcgcctgattttggttatctttggaaaaaggaaataaagggttttataggaaataccatgcttgcggctcataacgcgccttttgacatgagggttcttaaagcggttcttgaatggtatgaacttggcgtaccggaaacatcgtatttttgtacgcttaatttggcgcgcctggcgtggtcccaactggagtctcacgcgcttgcggcgctggcaaaaaattttgggattgtttacaacgcgcacaacgcccttgaagacgctcttacctgcgggaaaatggtacagcttgcggcggaaaaatttgaaccgcaaaaggaaataaaggaatttttgggatatatgggagtccagataaagtatttatcagatcaaaggtaa

SEQ ID NO: 68420 - protein, 190 aa, Unknown
  Obtained from environmental sample
  DOMAIN (4)...(159): Exonuclease
  misc_feature (1)..(190): Xaa is any amino acid
MNDFITIDFETATCRPESAISVGLVKYRNYKPVSSYYSLIRPPNLYIRSDFTEIHGLTVNDVRDAPDFGYLWKKEIKGFIGNTMLAAHNAPFDMRVLKAVLEWYELGVPETSYFCTLNLARLAWSQLESHALAALAKNFGIVYNAHNALEDALTCGKMVQLAAEKFEPQKEIKEFLGYMGVQIKYLSDQR

SEQ ID NO: 68421 - DNA, 462 bp, Unknown
  Obtained from environmental sample
  misc_feature (1)..(462): n is a, c, g, or t
atgaaaacgttagccatgtaccgcccaaacacaattcaaaacgccctgagcgattttgatcgttattttgaatctttttttggcgactcgcttttatctcccgccgcgaggatgttcaaccatattccggcagtagacattcaagaaaccgagaacagctatgttcttgatatggaactgcccggctacgatgaaaagaatatcgaagttcatgtagacggttcaagcctgacgatctcttccaaggaagaggatacgcgcgaggagaaaaagaacaacgataacgcggggacttacattcttcgcgaacggaaagtaaattcttttacccgttccttcaaactgccggaaaatgccgattcatcggcggtaaacgcgtcatttaaaaacggtattctgaatttgcaaattaagaaacgcgccgagacgcagaaaagggcgattcagataaacgccgcgtaa

SEQ ID NO: 68422 - protein, 153 aa, Unknown
  Obtained from environmental sample
  DOMAIN (46)...(151): Hsp20/alpha crystallin family
  misc_feature (1)..(153): Xaa is any amino acid
MKTLAMYRPNTIQNALSDFDRYFESFFGDSLLSPAARMFNHIPAVDIQETENSYVLDMELPGYDEKNIEVHVDGSSLTISSKEEDTREEKKNNDNAGTYILRERKVNSFTRSFKLPENADSSAVNASFKNGILNLQIKKRAETQKRAIQINAA

SEQ ID NO: 68423 - DNA, 969 bp, Unknown
  Obtained from environmental sample
  misc_feature (1)..(969): n is a, c, g, or t
gtgacggaagccattaggctgaggaacttcacggcggaagaggtcgccgagttatacgcgcaacatacggccgagaccgggcaggtatttgagcgacacgcggcagactacgtttttgagcagacgcaagggcagccatggctcgtgaacgccatagctagggaagcagttgaaaaaatctgcaaatctgattattccgccgccataaccaaagatattgcaaagcaagccatccaaaatataattctagcaaggggaacgcattntgattcgcttatggagaggctaaaagaggaacgtgtccgcaacgttatacagcctttgattctgggcgaagagttcgcgatagataaatcatcggatgactatctttacactagagatttgggaataatcagagacagcggcgaccaaacagagccagccaatcccatttatgcagaattgatagtcaggacacttaattggactgttcaagatacactaaaaaccaaatacaaagattatgatgttcctcattatttgaagggtgggaaaataaatgtcaatgctttgctcaaagattttcaaagtttttggcgtgagaacagcgagatatggatacaacgctacaaagagaatttttaccaatatgacgaagccgctcctcatttggtgattcaggcatttttgcagagagtgctcaatgggggagggcatatttcaagagagatggcactcggtaaaaagcgtgttgatatttgcgttgagtggaataatcagaaatacccgattgagcttaaactttacaagggagctaaaacaataaaggattccacagagcaaattttggattatatggataaagtaggttcaaaagaaggctgggtggtgatttttgaccgcactcccaagaaaagttggagcaaaaaactttacgtgaaagaggtcaagcaatctggaaagaagataacggtttttgggtgctga

SEQ ID NO: 68424 - protein, 322 aa, Unknown
  Obtained from environmental sample
  misc_feature (1)..(322): Xaa is any amino acid
MTEAIRLRNFTAEEVAELYAQHTAETGQVFERHAADYVFEQTQGQPWLVNAIAREAVEKICKSDYSAAITKDIAKQAIQNIILARGTHXDSLMERLKEERVRNVIQPLILGEEFAIDKSSDDYLYTRDLGIIRDSGDQTEPANPIYAELIVRTLNWTVQDTLKTKYKDYDVPHYLKGGKINVNALLKDFQSFWRENSEIWIQRYKENFYQYDEAAPHLVIQAFLQRVLNGGGHISREMALGKKRVDICVEWNNQKYPIELKLYKGAKTIKDSTEQILDYMDKVGSKEGWVVIFDRTPKKSWSKKLYVKEVKQSGKKITVFGC

SEQ ID NO: 68425 - DNA, 714 bp, Unknown
  Obtained from environmental sample
  misc_feature (1)..(714): n is a, c, g, or t
atgcggcttggggttccagtttttagtctgcgtgtttttatgcccaatttgccaagcgattctgggagtaaatctgaactaggttcattcactctgccaccaatgctaactttgtctaagcctgtgaacatttttgatttgaaaaaagtaccgcttgcgattataaccgatctgcattgtatttgcacatcgctgtgcaaaccaactttccaacccttttcatttttttcaagcaaaaccgcttcgccctctattatttctaacccatccaatttttccaaagtttttcgcgcaatttcgctatacaaattcatatcgcattgggcacggtttccccaaacggcaggccctttgctggaattcaaggttctgaacattatccccgccttgtctgccaaaacccccattaaaccgcccatagcatctatatcgcgtaccatttgccccttgccaaccccacctatcgccggattgcactcatgcgccctatgctttttttgtcaaaaacgagcaacgcagttttcacgcctattttccaagccgcgtttgccgcttcaataccagcgtgaccgccgcctattaccagtgtgtcaaggttcagcacccaaaaaccgttatcttctttccagattgcttgacctctttcacgtaaagttttttgctccaacttttcttgggagtgcggtcaaaaatcaccacccagccttcttttga

SEQ ID NO: 68426 - protein, 237 aa, Unknown
  Obtained from environmental sample
  misc_feature (1)..(237): Xaa is any amino acid
MRLGVPVFSLRVFMPNLPSDSGSKSELGSFTLPPMLTLSKPVNIFDLKKVPLAIITDLHCICTSLCKPTFQPFSFFSSKTASPSIISNPSNFSKVFRAISLYKFISHWARFPQTAGPLLEFKVLNIIPALSAKTPIKPPIASISRTICPLPTPPIAGLHSCALCFFCQKRATQFSRLFSKPRLPLQYQRDRRLLPVCQGSAPKNRYLLSRLLDLFHVKFFAPTFLGSAVKNHHPAFF

SEQ ID NO: 68427 - DNA, 1542 bp, Unknown
  Obtained from environmental sample
  misc_feature (1)..(1542): n is a, c, g, or t
atggtacgcgatatagatgctatgggcggtttaatgggggttttggcagacaaggcggggataatgttcagaaccttgaattccagcaaagggcctgccgtttggggaaaccgtgcccaatgcgatatgaatttgtatagcgaaattgcgcgaaaaactttggaaaaattggatgggttagaaataatagagggcgaagcggttttgcttgaaaaaaatgaaaagggttggaaagttggtttgcacagcgatgtgcaaatacaatgcagatcggttataatcgcaagcggtacttttttcaaatcaaaaatgttcacaggcttagacaaagttagcattggtggcagagtgaatgaacctagttcagatttactcccagaatcgcttggcaaattgggcataaaaacacgcagactaaaaactggaaccccaagccgcatagattccgcaagcgttgatttttccgagtgtgaagttcaaataggcgatgcaaacccttgggcattcagcagcaaaacagatgcaaaaaatttatgcaattccgcaaagtgctacctaaccagaaccaccaaagaaacgcacagaattttagaaaccgcttttgaaaaaagccctcttttcacaggcaaaatccaagggctcggccctcgctactgcccaagcatagaagacaaaataaaacgctttgcagacaaagaaagtcaccaattatttttagaacccgaaacaaaagaggcaaacagaatttacataaacggattcagctcaagcctgcccgaagaagcacaaatacaagcgatgcacacaatacctgggctaaaaaatgcacgtgttttgcaaataggctatgccgttgaatacgatgcaattcacgctacggaactccatccaactcttgaaagcaagcagcactgcggtctttatttcgcagggcaggtgtgcggaacaagcggctacgaagaagcggcagcacagggtataatcgcaggcataaacgccgctttgaaaataaaaggcaaagaaccctttatactttcaagagcagagagctatattggcgttttgatagacgacatcacaggaatggaatggaacgaaccctaccgaatgtttacaagccgagcggaatatcgcttatttttaagagcggataattcagagcaaaggctttgcgaaaaagcgcacaaggcgggaatgttgagcggtgaggaatggaaaaattacgaggaagaaaagagcagggtagaggaggctagaaaatttttgagcgaaaattcaggagagccagagcaaatcgcacccattttggcagagagcggacaggcacaggtagcggaaaaaacaaggtggctttcggtgttgaaaagaccgggcgtgaaagcggaaactttttttgaaatagcagctccgcacattcctttaacgagaaaagaaaaatggcatttgctttcggaagagctttacagcggtttttttgtaagggcaaaagaggaaatagcaaatttgcaaaaaatggcaaacctaaaattccagaaaatatag

SEQ ID NO: 68428 - protein, 513 aa, Unknown
  Obtained from environmental sample
  DOMAIN (1)...(341): Glucose inhibited division protein A
  misc_feature (1)..(513): Xaa is any amino acid
MVRDIDAMGGLMGVLADKAGIMFRTLNSSKGPAVWGNRAQCDMNLYSEIARKTLEKLDGLEIIEGEAVLLEKNEKGWKVGLHSDVQIQCRSVIIASGTFFKSKMFTGLDKVSIGGRVNEPSSDLLPESLGKLGIKTRRLKTGTPSRIDSASVDFSECEVQIGDANPWAFSSKTDAKNLCNSAKCYLTRTTKETHRILETAFEKSPLFTGKIQGLGPRYCPSIEDKIKRFADKESHQLFLEPETKEANRIYINGFSSSLPEEAQIQAMHTIPGLKNARVLQIGYAVEYDAIHATELHPTLESKQHCGLYFAGQVCGTSGYEEAAAQGIIAGINAALKIKGKEPFILSRAESYIGVLIDDITGMEWNEPYRMFTSRAEYRLFLRADNSEQRLCEKAHKAGMLSGEEWKNYEEEKSRVEEARKFLSENSGEPEQIAPILAESGQAQVAEKTRWLSVLKRPGVKAETFFEIAAPHIPLTRKEKWHLLSEELYSGFFVRAKEEIANLQKMANLKFQKI

SEQ ID NO: 68429 - DNA, 684 bp, Unknown
  Obtained from environmental sample
  misc_feature (1)..(684): n is a, c, g, or t
atggctttcggttcttcgcaagaggtggaaagttggacaaaagaggattaccaagcgagttatataaggggtttggagctttcaaagaaggcaaataccaaaataatttacgatgtgggaaatcaattgtctgaaccactagccactagccactccccactagccatatctatgcacgagataataaaacagcctctccccgaaccttgtactccgcattcgatttatgctactccgcctgagcttgttaagcaggctataaaatcctgtgttaaagctggggttccttggagtattcatttggcggagtttgatgagagtgataggttttgcgattttttggatattttcaagggggagcaggagtttgtcaggaatgggtttattgttcatggaaattttttaaaggagagcgatttggcttttatggcaaaaaaccatattgcccttgtgcattgcccggagagccacgagtggtttgggcataaagatccagattttgagatgtggaaaaaaagtggggtagatatttgcattgcaacagatagccttgcttctgctagttctttggatttgatggagcaggtgaagacgctttttaggcgttatcccaaggcttttacttatgaggaggctatggcgacgattacgactgtaccagaaaagttgctaatgagtcaataa

SEQ ID NO: 68430 - protein, 227 aa, Unknown
  Obtained from environmental sample
  misc_feature (1)..(227): Xaa is any amino acid
MAFGSSQEVESWTKEDYQASYIRGLELSKKANTKIIYDVGNQLSEPLATSHSPLAISMHEIIKQPLPEPCTPHSIYATPPELVKQAIKSCVKAGVPWSIHLAEFDESDRFCDFLDIFKGEQEFVRNGFIVHGNFLKESDLAFMAKNHIALVHCPESHEWFGHKDPDFEMWKKSGVDICIATDSLASASSLDLMEQVKTLFRRYPKAFTYEEAMATITTVPEKLLMSQ

SEQ ID NO: 68431 - DNA, 855 bp, Unknown
  Obtained from environmental sample
  misc_feature (1)..(855): n is a, c, g, or t
ttgaaagcgccgtcgccgcaggaggcgccgtccaattctccctttgcgtctgtcaatcaacaacataaagttgacgaagcaaaagcgccgtcgccgccgccggcaccggtcaatcctcccgttgcgtctgttaatcaacaaaataaaaataacgaattaaaagcgccgtcgccgcaggaggcgccgcccaattctccctttgcgtccgtcaatcaacaacataaggttgacgaggtgaaaacaccgccgcctgcgccggcgccggtcaatccccctgccgcgtccgtcaatcaacaaaataaagctgacgaagcaaaaacgccgtcgccgccgcctgcgccggtcaatcctcccgccgcgtccgccaatcggcaaaataaagttgacaatgtaaaaacgccggtaataacactgaagatgccgtccaattctcccttcgcgccggtagatcaagaaaatagcgtttcgacacaggcacagacgccggcagttcccgccggtcaaccgagtaatccgcaagtgtcggcgccgaaagcgcccgctaatcaacaaaacaacgcgtcggggcagccggtggcaatcaacatgcaagccgctccccccgccaatccaaagccggccggcccggtctttacgatacaagtaggcgccttcgcctcaaaggaaaacgccgacaacctagtcaagcggctcaccggcaaatacgacgacatcacaatatctccgacggcaagcggcgaccaaacgctctacagggtgcgcgtagggtcgttccagaagaaagaggacgccgtcgcctttgcggataagctcatcattgaggcggggctgtcggcacgggttacagagaagtaa

SEQ ID NO: 68432 - protein, 284 aa, Unknown
  Obtained from environmental sample
  DOMAIN (207)...(283): Sporulation related domain
  misc_feature (1)..(284): Xaa is any amino acid
MKAPSPQEAPSNSPFASVNQQHKVDEAKAPSPPPAPVNPPVASVNQQNKNNELKAPSPQEAPPNSPFASVNQQHKVDEVKTPPPAPAPVNPPAASVNQQNKADEAKTPSPPPAPVNPPAASANRQNKVDNVKTPVITLKMPSNSPFAPVDQENSVSTQAQTPAVPAGQPSNPQVSAPKAPANQQNNASGQPVAINMQAAPPANPKPAGPVFTIQVGAFASKENADNLVKRLTGKYDDITISPTASGDQTLYRVRVGSFQKKEDAVAFADKLIIEAGLSARVTEK

SEQ ID NO: 68433 - DNA, 1293 bp, Unknown
  Obtained from environmental sample
  misc_feature (1)..(1293): n is a, c, g, or t
atgccgtcggtatacttccagacattcggctgccagatgaacaccgcagactcggacgccgtccgcgacctgctgtttaggcgcggctttaagctctgtgcggcgcacgacgagagcgacctgatagtcgtcaacacctgcagcgtccgggaagccgctgagaggcgcgccaaaagccgcatcgccgaattcgcccgcggcaagagggcgcgtccgcatcagaggctctgggtgatagggtgcatggcgcagaggctcggcgaggcgcttacggccgagatacccgggatagaccttgtggtaggcgccaagcagatggagcggatggacgaggtcgttgacgagcagtttccggcgcgcccgacggacggcggcgatcgtccggagccggagctcttttccaagacggcggtcaccgacttcgttccgataatgcgcggatgcgacaactactgcgcctactgcgtggtgccctacgtgcgcgggcgcgaacggtctatgccgtatgacgatattgaggcggcggtgaagaaaaaaatagacgcgggcataaaggaaattacgtttctggggcaaaacgtcaattcgtacggccacaacgggattgattttccggagttgctgcgaaggacggcgcaaatagggggtcttgagagaatacgtttcacaacgagccatccaaaggattgcacggagcgcctgatagacgttatggcgtcgtcaaagaagttcgcgagccacatacacctgcccgtgcaggccggctccgaccgtgtccttggcctgatgaaccgcgggtacgcgtcgtcccattacatcggtttgcttgacatgataagaaagcgtctgccgcaagccgacataacgagcgatttgcttgtgggcttcccgacggagagcgacgccgagtttcgcgaaacgcttgcgcttgtgcgtaacgcgcgtttcacaacggcgttcatgttcgcctactccaaaagagagggaacggccgccgccgccgtgccggagacgattgacaaaacggaaaagatggcgcggctgtcggaacttattgatttgcagacaaagattacacgagaaatatacgataaatcggtggggacggagctggaagtactcataacggagcggcagcaaaagagagacagggcgtggatgggtcaagacagcggatgtaagagagcgttaattaattgcgacggactcgagccgggaatgattctcaaggcaaaggcggtcggcagcagcgggatgacgcttttggccgagacggttagcgatatccgttga

SEQ ID NO: 68434 - protein, 430 aa, Unknown
  Obtained from environmental sample
  DOMAIN (142)...(311): Radical SAM superfamily
  misc_feature (1)..(430): Xaa is any amino acid
MPSVYFQTFGCQMNTADSDAVRDLLFRRGFKLCAAHDESDLIVVNTCSVREAAERRAKSRIAEFARGKRARPHQRLWVIGCMAQRLGEALTAEIPGIDLVVGAKQMERMDEVVDEQFPARPTDGGDRPEPELFSKTAVTDFVPIMRGCDNYCAYCVVPYVRGRERSMPYDDIEAAVKKKIDAGIKEITFLGQNVNSYGHNGIDFPELLRRTAQIGGLERIRFTTSHPKDCTERLIDVMASSKKFASHIHLPVQAGSDRVLGLMNRGYASSHYIGLLDMIRKRLPQADITSDLLVGFPTESDAEFRETLALVRNARFTTAFMFAYSKREGTAAAAVPETIDKTEKMARLSELIDLQTKITREIYDKSVGTELEVLITERQQKRDRAWMGQDSGCKRALINCDGLEPGMILKAKAVGSSGMTLLAETVSDIR

SEQ ID NO: 68435 - DNA, 477 bp, Unknown
  Obtained from environmental sample
  misc_feature (1)..(477): n is a, c, g, or t
atgataaaaatccgggaattgatcagggaagagtgcgttatcaccgacctcaacgtcgccgaacagattgaggcgataaggtctatggcgcgcttcacctgctcgattggcggtctcgaccgcgcggaagaggtggcggacaaggtaattgagcgcgagggggagatgtctaccggaatcggcttcggaatagcgatcccgcacgcgcgtcttgccggaatagaccgcctttacatggccgcgtcgcgctccgtcggggggatagagttcgaatctttggacgggctggcggtgaatctgatttttatgctggtctccccggaaagcattccgaccgcgcataccgaggtgctctcgtcgctgtcgaggatgctctcctacgaggaggtcaggcgggggcttctgtcggccggtaccgcgaaggagtttgcggatatcttggccaaggctgaggtgaagtacgtagaggcgctctga

SEQ ID NO: 68436 - protein, 158 aa, Unknown
  Obtained from environmental sample
  DOMAIN (6)...(150): Phosphoenolpyruvate-dependent sugar phosphotransferase system, EIIA 2
  misc_feature (1)..(158): Xaa is any amino acid
MIKIRELIREECVITDLNVAEQIEAIRSMARFTCSIGGLDRAEEVADKVIEREGEMSTGIGFGIAIPHARLAGIDRLYMAASRSVGGIEFESLDGLAVNLIFMLVSPESIPTAHTEVLSSLSRMLSYEEVRRGLLSAGTAKEFADILAKAEVKYVEAL

SEQ ID NO: 68437 - DNA, 1245 bp, Unknown
  Obtained from environmental sample
  misc_feature (1)..(1245): n is a, c, g, or t
ttgaaaatcaaaatcttaaaaatagtacgggaaaaagaaaagaatccacgcaaatattatattccaataatggaacaacaacagccgccgccgccgatcccgttcaacaaaccgtacctgaccggcgaagaaatgacctacgtgggggaggccgtccgctccggcaagctctccggcaacggcgcgttcaccaagcggtgccaggagttctttgagcggcgctacggcttcaagaagtgcctgctcaccgcgtcgtgcaccgacgcgttggagatgtgcgccatcctcgccggcgtcggagagggcgacgaggtgatcgtgcccggctacactttcgtctccaccgccctcgctttcgtacgccagggcgcgaagatcgtcttcgccgacagccgcgccgaccacccgaacatagacgccgacgcgatagagccgctcttaacgccgcgtacaaaagcaatagcgctcgtccactacgccggcgccgcctgcgatatggacgccgtcacgcaaatcgcggagaaacacggccttataattatagaagacgccgctcaagcggtggactcgttccacaccgccgccgcagccgcagcgccccgcgccctcggaagcatcggccacttcgccgccttctcattccacgacaccaaaaacatcacctgcggcgagggcggcatgatcgccgtaaacgacgaccgctttatcgcccgctcggagatagtctgggaaaagggaaccaaccgcgccgattttttcagaggcaacgtcagcaagtacgggtgggtggacaccggcagctccttcctgccgtcggagataaccgccgctttcctatgggcgcagttggaacgcttggacgaaatacagaaagtacgcaaagcggcgtgggaggcgtattacgacgcatttaaaccgttggctgacaacaggttgtttctgttgcaaaagatccccgagtacgcgacgaacaacgcccacaccttctacatagtgtgcgacgcgccgagcgagaggtcggggcttatagaacacctgaaaaacaagggaatcggcgcggccttccactaccaaagtttgcataagagcgattactacaaggaacggcacgacggccggacgctcaagaattgcgacacgtactcggattgtttggtaaggctcccgctctattacggaataagcgtggaagacgtcacgcgtgtacggaacgccgtggccgatttctatcatttcaaacaatag

SEQ ID NO: 68438 - protein, 414 aa, Unknown
  Obtained from environmental sample
  DOMAIN (56)...(334): Beta-eliminating lyase
  misc_feature (1)..(414): Xaa is any amino acid
MKIKILKIVREKEKNPRKYYIPIMEQQQPPPPIPFNKPYLTGEEMTYVGEAVRSGKLSGNGAFTKRCQEFFERRYGFKKCLLTASCTDALEMCAILAGVGEGDEVIVPGYTFVSTALAFVRQGAKIVFADSRADHPNIDADAIEPLLTPRTKAIALVHYAGAACDMDAVTQIAEKHGLIIIEDAAQAVDSFHTAAAAAAPRALGSIGHFAAFSFHDTKNITCGEGGMIAVNDDRFIARSEIVWEKGTNRADFFRGNVSKYGWVDTGSSFLPSEITAAFLWAQLERLDEIQKVRKAAWEAYYDAFKPLADNRLFLLQKIPEYATNNAHTFYIVCDAPSERSGLIEHLKNKGIGAAFHYQSLHKSDYYKERHDGRTLKNCDTYSDCLVRLPLYYGISVEDVTRVRNAVADFYHFKQ

SEQ ID NO: 68439 - DNA, 678 bp, Unknown
  Obtained from environmental sample
  misc_feature (1)..(678): n is a, c, g, or t
gtgcctgctcaccgcgtcgtgcaccgacgcgttggagatgtgcgccatcctcgccggcgtcggagagggcgacgaggtgatcgtgcccggctacactttcgtctccaccgccctcgctttcgtacgccagggcgcgaagatcgtcttcgccgacagccgcgccgaccacccgaacatagacgccgacgcgatagagccgctcttaacgccgcgtacaaaagcaatagcgctcgtccactacgccggcgccgcctgcgatatggacgccgtcacgcaaatcgcggagaaacacggccttataattatagaagacgccgctcaagcggtggactcgttccacaccgccgccgcagccgcagcgccccgcgccctcggaagcatcggccacttcgccgccttctcattccacgacaccaaaaacatcacctgcggcgagggcggcatgatcgccgtaaacgacgaccgctttatcgcccgctcggagatagtctgggaaaagggaaccaaccgcgccgattttttcagaggcaacgtcagcaagtacgggtgggtggacaccggcagctccttcctgccgtcggagataaccgccgctttcctatgggcgcagttggaacgcttggacgaaatacagaaagtacgcaaagcggcgtgggaggcgtattacgacgcatttaa

SEQ ID NO: 68440 - protein, 225 aa, Unknown
  Obtained from environmental sample
  misc_feature (1)..(225): Xaa is any amino acid
MPAHRVVHRRVGDVRHPRRRRRGRRGDRARLHFRLHRPRFRTPGREDRLRRQPRRPPEHRRRRDRAALNAAYKSNSARPLRRRRLRYGRRHANRGETRPYNYRRRRSSGGLVPHRRRSRSAPRPRKHRPLRRLLIPRHQKHHLRRGRHDRRKRRPLYRPLGDSLGKGNQPRRFFQRQRQQVRVGGHRQLLPAVGDNRRFPMGAVGTLGRNTESTQSGVGGVLRRI

SEQ ID NO: 68441 - DNA, 1404 bp, Unknown
  Obtained from environmental sample
  misc_feature (1)..(1404): n is a, c, g, or t
gtgcaagcgctatgcagaagttgcggattttccggtatgttcgacccggccaaggcgccggatcagccgtttgtcataaagtgcccgcagtgcggcggggcgatccaaatgcccgggcgtatagcggcgcaggcggccgggcaagcagccgctcagccgccgccggcccaaatcctaagcgacgcctcccgcgtcgtcagcgccaaaaccggaaagaccatatcgaccccgcccggcgtcgcgtcggttcaaaccgccccgcagacggtgccggccatgttcgcgccgccgccgccgccgggggctttgcggatcgacgcgctgctgcgcgtcatggtcgacctcaaggcctccgacctccacctatcgagcgagtgccaacccatgatccgcaaggacggcgagatggtggcgatatccggttggccggtgttctccgccggcgaagtgaaggacctgatgtggccgatcgcgccggagcgcaaccgggagcagttcgaggagtgccacgacaccgacttcgcctacgagattgaggggctggcgcgctttagggtcaacctcttcatggacatgaagggcatcggcacggtcttacgcgtcatccccagcaaaatcatcaccgccgaggacctaaacctctccaacgagatactgggcctctgcaagttgcccaagggattggtgctggtcaccggccccacgggaagcggcaaatcgaccaccctatgcgctatggttgactacgtaaaccgcaaccgcaaagaccacatgatcacgatcgaagaccccatagagttcgtccacgcgaacaagaactgcctgataaaccaacgcgaggtgcacgaacacaccggctccttcaagaacgccctgcgggccgcgctgcgcgaagacccggacatcgtctacatcggcgagatgcgcgacctcgagacgatctccatcgccatagagaccgccgagaccggccacttggtcttcggcacgctgcacacctccaccgccccctccaccgtagaccgcataatcgaccagtttccgggcgacaagcaggatcaaattcgcatgatgcttgccgaaagtctgcgcggcgtgatctgccagatgctctgcaaaagaataggcggcggccgcgtcgcggccatggaagtgctgatagtgaccccgtccgtctcaaacctgatccgcgaaaaaaagacctttatgatccagtctgtcatgcaaacgggaaagaacttggggatgtgcacgatgaacgacagcttcttggatttagtcaagaaaggaacggtcctcccgcaagaggcttacgcgaaggcgattgacaaaccgggactattggcaatgtttgagaagaacggaatagtgaccggatggctgaacgacaagactcagcaataa

SEQ ID NO: 68442 - protein, 467 aa, Unknown
  Obtained from environmental sample
  DOMAIN (96)...(376): Type II/IV secretion system protein
  misc_feature (1)..(467): Xaa is any amino acid
MQALCRSCGFSGMFDPAKAPDQPFVIKCPQCGGAIQMPGRIAAQAAGQAAAQPPPAQILSDASRVVSAKTGKTISTPPGVASVQTAPQTVPAMFAPPPPPGALRIDALLRVMVDLKASDLHLSSECQPMIRKDGEMVAISGWPVFSAGEVKDLMWPIAPERNREQFEECHDTDFAYEIEGLARFRVNLFMDMKGIGTVLRVIPSKIITAEDLNLSNEILGLCKLPKGLVLVTGPTGSGKSTTLCAMVDYVNRNRKDHMITIEDPIEFVHANKNCLINQREVHEHTGSFKNALRAALREDPDIVYIGEMRDLETISIAIETAETGHLVFGTLHTSTAPSTVDRIIDQFPGDKQDQIRMMLAESLRGVICQMLCKRIGGGRVAAMEVLIVTPSVSNLIREKKTFMIQSVMQTGKNLGMCTMNDSFLDLVKKGTVLPQEAYAKAIDKPGLLAMFEKNGIVTGWLNDKTQQ

SEQ ID NO: 68443 - DNA, 480 bp, Unknown
  Obtained from environmental sample
  misc_feature (1)..(480): n is a, c, g, or t
atgagagtttatcacggcacaaactgtttgtttgaagaggtagatatgtcaaaatccaaggatagaagggatttcggcaggggcttctacacgacgacgatcaaagaacaagcggagtcttgggcgcaggcggtttttgaccgatatgacggggagggcaagttcgtttacgaatttgagtttgacccggataacagcctaaacataaagcggtttgaggaggccgataaagcgtggttggaatttgtggcggcgaacagaaacgagggtggtgtttggcatggctttgacgtggtaaaggggccggtggctaatgataaaacaaacagaacgattgccctctataccgcaggaatttatacggtggatgtggcgttagagttgctgaaacataacaaattgaacgatcaggttagctttcacacggaaagagcgctttcttttttgacgatgatcgggagagagatagatgttcgctaa

SEQ ID NO: 68444 - protein, 159 aa, Unknown
  Obtained from environmental sample
  misc_feature (1)..(159): Xaa is any amino acid
MRVYHGTNCLFEEVDMSKSKDRRDFGRGFYTTTIKEQAESWAQAVFDRYDGEGKFVYEFEFDPDNSLNIKRFEEADKAWLEFVAANRNEGGVWHGFDVVKGPVANDKTNRTIALYTAGIYTVDVALELLKHNKLNDQVSFHTERALSFLTMIGREIDVR

SEQ ID NO: 68445 - DNA, 750 bp, Unknown
  Obtained from environmental sample
  misc_feature (1)..(750): n is a, c, g, or t
atgccggtggatttccaacaggaatctgcattcaccgcctcctttgacagccagataaaccttgcgctcaatatggcggaatcgccgcttatacgcgcccaccttaaaaaccccggcgatgcggaactcgcgcggcttgccttcagggaattcagcgcgaaccggatatcgttttccggcaacaatattttctggataagcgacgtcgacaagaggtattacttcaatgataaatattcgtacaccctcgatcccgaggatccggaaaacgtctggtacgcgccaaccttgaatcagaaagaccgtttttcatttaacgtcaattttgacattgggattgaaagaactttatgctggatcaacgtgcctgtgtacgatgacaataaaacccccgtcggcatcgtcggaacgggaatcgatctgaccgattatatcaatatccttttcacaggtctaggcgaggatgtaacgcttttgcttttcaacagcctgggcgaaataaccggcgccgaagacatttcctatatggaaagaaagatactgataagcgacgcgtgggaagacggccagcaggtcttctttgaggcccagtcttcccaagagggggcgtcgaaaatatttgagattaataaccatgcttatgccgtgagtaaaatcccccggttaaactggtatatcgcggtatcccggcccatgacacgaagcctaaaacaattaattgaattttcatcacgcagagagaattcctaa

SEQ ID NO: 68446 - protein, 249 aa, Unknown
  Obtained from environmental sample
  misc_feature (1)..(249): Xaa is any amino acid
MPVDFQQESAFTASFDSQINLALNMAESPLIRAHLKNPGDAELARLAFREFSANRISFSGNNIFWISDVDKRYYFNDKYSYTLDPEDPENVWYAPTLNQKDRFSFNVNFDIGIERTLCWINVPVYDDNKTPVGIVGTGIDLTDYINILFTGLGEDVTLLLFNSLGEITGAEDISYMERKILISDAWEDGQQVFFEAQSSQEGASKIFEINNHAYAVSKIPRLNWYIAVSRPMTRSLKQLIEFSSRRENS

SEQ ID NO: 68447 - DNA, 1695 bp, Unknown
  Obtained from environmental sample
  misc_feature (1)..(1695): n is a, c, g, or t
atgcattacaaaaattttgttacggccacatacgcgccggcgggttatctgaatgacaattcgcttgagcagataaaggctgacattgaaaaagtccgcagatatatcaagctggacaagatctatcttgaaacgtaccgttcggaaattttaatagaacgcgcaaaaatggaagccgtaaaagccttgtttgccaaaaagggctatacggtatccggcgggattacaaccacggtgaaacgcacgctgatgggaagcatgtgttttacggacccggaaaaccgcaaaaggttaggtgaaattgccgcgtacaccgcggagctttttgacgaactcatactggacgatttttactttaccaactgccgctgcgagtcctgcatcaaggcgaaaggcgagcgcgactgggcggcattccgcctcgagctgatgaacgacatttccgaaaacgtgataatcaaaaacgcgaaagcggcgaatccgaaggtgaattgcattatcaaataccccaactggtacgacagttttcaggccaacggctataaccttgaagacgaatcaaaaatatttgacatgatctacaccggaaccgagacccgcgatccccattacacgcaccagaatttgccgcgatacctgagttttttccttccacgcctgatggaacacgtcaagccggggaagaacggcggcggctggtacgacctttttgaatgttcgctggaagactatgtacagcaggcgtatttgactcttttttcaaaatgccgcgaacaaatgctgttctgttttcccttgctcgccaacgccccgctttacaccgccgccgcgggcgcgttctacgacgaggcggatacgttcatggacaagattggagaacccgtgggtatcgcctgttacaagccgtatcactcctgcggcgagaggctgcttcatgaatttatcgggatgtgcggcgttcccctggatccctacccttattatccggcggacgcgaagacggtattttctacggccgacgccgcatgggacaaagaaattgtaagcaaaattaagcaaagcctgttaaaaggaagcaatgtttttattacaagcgggctgtatgaaaaattgtcgggcaaaggaatcgaagatatattagttcttgaaattacaaacaggaaaattaccacggacgtttttaccaacagcgcttttggcagcggcaactgcggctatgtaaaagccgcggcgcccataaccctgagccatgtcgcttacaatgaaaacgatatatggccgctttcggcggctcttaccccacattcaagccacgcgctgctgttatgcggcgcctacggcaagggcagactctatgtgctgacaattcccgacgctttcgccgatctgtacaagctgcccgccgaaacgctcgctctcctgcgcagggagtttgacctgcccataacgctggaatgtcagggccgcgtgtcgctgttcccctatgacaacgatacttttattttgcagtcattccttgacaggccggagcgggtgcgcgtccgcattaacaggccgggcgtgtcgcttacgccgctgctgaagccgagaatgcgcccctttgacattgtccgttccggcgagaaagaaagcgtgtttgacattcacataatgcctgggcattacatggcgtttaaggttgaagtcaggaattag

SEQ ID NO: 68448 - protein, 564 aa, Unknown
  Obtained from environmental sample
  misc_feature (1)..(564): Xaa is any amino acid
MHYKNFVTATYAPAGYLNDNSLEQIKADIEKVRRYIKLDKIYLETYRSEILIERAKMEAVKALFAKKGYTVSGGITTTVKRTLMGSMCFTDPENRKRLGEIAAYTAELFDELILDDFYFTNCRCESCIKAKGERDWAAFRLELMNDISENVIIKNAKAANPKVNCIIKYPNWYDSFQANGYNLEDESKIFDMIYTGTETRDPHYTHQNLPRYLSFFLPRLMEHVKPGKNGGGWYDLFECSLEDYVQQAYLTLFSKCREQMLFCFPLLANAPLYTAAAGAFYDEADTFMDKIGEPVGIACYKPYHSCGERLLHEFIGMCGVPLDPYPYYPADAKTVFSTADAAWDKEIVSKIKQSLLKGSNVFITSGLYEKLSGKGIEDILVLEITNRKITTDVFTNSAFGSGNCGYVKAAAPITLSHVAYNENDIWPLSAALTPHSSHALLLCGAYGKGRLYVLTIPDAFADLYKLPAETLALLRREFDLPITLECQGRVSLFPYDNDTFILQSFLDRPERVRVRINRPGVSLTPLLKPRMRPFDIVRSGEKESVFDIHIMPGHYMAFKVEVRN

SEQ ID NO: 68449 - DNA, 921 bp, Unknown
  Obtained from environmental sample
  misc_feature (1)..(921): n is a, c, g, or t
gtgttaatcgcggctattttcgcgtttgtcggccccgattacgccgaaatttgccgccgcaccaagcgtgccgaagaagccgaatacgcggaaaaagaaattacaaaaatgattgaaacgataaaccagcacggctgggacggggactggtttgtccgcgcctatgacgcgtacggtaaaaaaatcggcagccgcgaatgtgaggacgggaaaatatttatagaatcaaacggcttcgcggtaatggcggacatcggcgttacagacgggcgcgcgaaaaaagccctcgactccgtgaaggaacatcttgattcaaaatacggcattgtcctgttacagcccgcttataaggattaccatgttgagttaggcgaagtttcctcgtatccgcccggatacaaggaaaacgccggcatcttctgccacaacaatccctgggttacgatagcggaaaccaggctgggcagggggaacagggcctttgagacttacacaaaaatctgccccgcctaccgcgaagacgacagcgatctgcgccgcctggagccctatgtgtacgcgcagatggtagccggaaaagacgcggttaaccacggcgaggcgaaaaattcatggcttacggggaccgcggcatggacctttgtcagcatttcgcagtacatcctcggggtgcggcccggttttgacggccttatactcgacccctgcattccctcaaacatgaagggctttgccgtcacgcgccatttccgcggcgcggattaccacataacggtggacaacagcgcgggtgtggaaaagggaataaagtccataacggttgacggcaagcagatggaaggcgttgcgttaaagagcgcggtactgccagtttttggcgataataaagtacataaagttgttgtaactttagggaaataa

SEQ ID NO: 68450 - protein, 306 aa, Unknown
  Obtained from environmental sample
  misc_feature (1)..(306): Xaa is any amino acid
MLIAAIFAFVGPDYAEICRRTKRAEEAEYAEKEITKMIETINQHGWDGDWFVRAYDAYGKKIGSRECEDGKIFIESNGFAVMADIGVTDGRAKKALDSVKEHLDSKYGIVLLQPAYKDYHVELGEVSSYPPGYKENAGIFCHNNPWVTIAETRLGRGNRAFETYTKICPAYREDDSDLRRLEPYVYAQMVAGKDAVNHGEAKNSWLTGTAAWTFVSISQYILGVRPGFDGLILDPCIPSNMKGFAVTRHFRGADYHITVDNSAGVEKGIKSITVDGKQMEGVALKSAVLPVFGDNKVHKVVVTLGK

SEQ ID NO: 68451 - DNA, 1515 bp, Unknown
  Obtained from environmental sample
  misc_feature (1)..(1515): n is a, c, g, or t
atgcaatatggacattttgacgataacgagcgggagtatgtaattacccgccccgacacgccttatccgtggattaattatttgggctgcgaggattttttcgggcttttttccaatacatcgggcggttattgtttttaccgcgacgcgcgtatgctgagactgacgcgttaccgctacaataatgttcctactgacgcgggcgggcgttatttttacctgcgggacgaaggcgacgtgtggactccttcatggatgccgatgaagtccgcgcttgaccgctatgagtgccgccacggaatgggctattcaaaaatttcttcgtcgcgtaacgggttggctttttctcaggtttcgtttgtgccgttacacgacacctgcgagatacataaggttacgttgaccaacgagtcaaatattgataaacgcattgatatgttttcttttattgaattttgcctgtggaacgccaacgacgatatgaccaacttccagcgcaatttcagcatcggcgaggttgagattgacggttcgcgcatttatcacaagactgaataccgcgagcggcgcaatcattacgcggtgtgggcggtaaatgttccggtcgaaggcttgacacgggacaggcagacattcttaggtctttacaacgggtttgatcatccgcaggcggtttntgcgggagagtcgaaaaaatccgtcgcttccggttgggctcctatcggctcccaccacatcaaggcgcggcttgcgccgaatgaatctaaaacttttgtttttgttctcggttactgcgaaaatcccgaagatcaaaaatgggagaaacagggcgtaataaataaaaaaccggcaaacgcgctccttgaaaaatacggaacatccgaagcggcggacaaggctcttgccgcgcttaacgagtactggaaaaatcttttggggcgtttcactgtggaagcggaagataaaaaaatggcgcgtatggccggcatttggaaccagtaccagtgcatggtaacgtttaatatgtcacgcagcgcgtcttattttgaatcgggaatcggacgcggcatgggtttccgcgattcaaatcaggatttattgggttttgttcatcttgttcctgaacgcgcccgcgccagaattctggacatcgccgcgacacagtttccggacggaagcgcgtatcatcagtaccagccgcttacaaagcgcggcaataacgaaatcggttcaggctttaacgacgacccgctgtggctcatctgcggagtagcggcgtacatcaaagagacgggcgactatggcatacttgatgaaaaagtgccgtttgacaacaacgaatcgttagctgacactctttttgttcacttaaaacgttcttttgattacaccgtaacgcataaaggcccgcacggccttcccttaatcggacgcgccgactggaacgactgccttaacctcaactggcttttccaaaacacccggcgaatcttttcagaccacggccaactttga

SEQ ID NO: 68452 - protein, 504 aa, Unknown
  Obtained from environmental sample
  DOMAIN (182)...(270): Glycosyltransferase 36 associated family
  misc_feature (1)..(504): Xaa is any amino acid
MQYGHFDDNEREYVITRPDTPYPWINYLGCEDFFGLFSNTSGGYCFYRDARMLRLTRYRYNNVPTDAGGRYFYLRDEGDVWTPSWMPMKSALDRYECRHGMGYSKISSSRNGLAFSQVSFVPLHDTCEIHKVTLTNESNIDKRIDMFSFIEFCLWNANDDMTNFQRNFSIGEVEIDGSRIYHKTEYRERRNHYAVWAVNVPVEGLTRDRQTFLGLYNGFDHPQAVXAGESKKSVASGWAPIGSHHIKARLAPNESKTFVFVLGYCENPEDQKWEKQGVINKKPANALLEKYGTSEAADKALAALNEYWKNLLGRFTVEAEDKKMARMAGIWNQYQCMVTFNMSRSASYFESGIGRGMGFRDSNQDLLGFVHLVPERARARILDIAATQFPDGSAYHQYQPLTKRGNNEIGSGFNDDPLWLICGVAAYIKETGDYGILDEKVPFDNNESLADTLFVHLKRSFDYTVTHKGPHGLPLIGRADWNDCLNLNWLFQNTRRIFSDHGQL

SEQ ID NO: 68453 - DNA, 462 bp, Unknown
  Obtained from environmental sample
  misc_feature (1)..(462): n is a, c, g, or t
atgaaaacgttagccatgtaccgcccaaacacaattcaaaacgccctgagcgattttgatcgttattttgaatctttttttggcgactcgcttttatctcccgccgcgaggatgttcatccatattccggcagtagacattcaagaaaccgagaacagctatgttcttgatatggaactgcccggctacgatgaaaagaacatcgaagttcatgtagacgtttcaagcctgacgatctcttccaaagaagaggatacgcgcgaggagaaaaagaacgatgataacgcggggacttacattcttcgtgaacggaaagtaaattcttttacccgttccttcaaactgccggaaaatgccgattcatcggcggtaaacgcgtcatttaaaaacggtattctgaatttgcaaattaagaaacgcgccgagacgcagaaaagggcgattcagattaacgccgcgtaa

SEQ ID NO: 68454 - protein, 153 aa, Unknown
  Obtained from environmental sample
  DOMAIN (46)...(151): Hsp20/alpha crystallin family
  misc_feature (1)..(153): Xaa is any amino acid
MKTLAMYRPNTIQNALSDFDRYFESFFGDSLLSPAARMFIHIPAVDIQETENSYVLDMELPGYDEKNIEVHVDVSSLTISSKEEDTREEKKNDDNAGTYILRERKVNSFTRSFKLPENADSSAVNASFKNGILNLQIKKRAETQKRAIQINAA

SEQ ID NO: 68455 - DNA, 825 bp, Unknown
  Obtained from environmental sample
  misc_feature (1)..(825): n is a, c, g, or t
atgacagatcggccgagatatagggcaacctgggctcagttccaaacaaaccagagaaagaaaaacagccatcggaaattaagaataccaaataaaaaattaaggcgttttatccagaaacagttagaggatggatattcaccggaaataattgccgttatggcttttgaaaaaaatgaaagatggaaaactaattatgagacaatttaccaatggatatacaacgacagaaaagatttaataccgtttctcacaaaatgccatagaatcagacgaaaaagagggtctgcaaaccaaaaaagatgtcccaaaataccaaaccgtacaacgattgataaaaggccagattatgtaaacctacgttgtgaaacaggccattgggaaatagatacggcaatatccagaaaaagcaaggcggcaattatggttctggtggaaagaaaaacaagatatgtaattattaaaaagcttcaagcaaaaacagcatattttatgcataatgctacagtaaaaagcctaaaggattatccaattaaaacaaggcaaagtattacttatgataatggaactgaaaatactttacacgaacttactaacaaagtgcttggaactaaatcatatttttgtaatccataccacagttgggaaaaaggaaccgttgaaaatatcattggcattgttagaaggtattaccctaaaaaaactgactggaaaaatattacccaatgggacttgaataagatcgcaagattcattaataataggcctatgaagctgttaggcttcaaaacaccttatcaggccttcgttgcacttgcatcttga

SEQ ID NO: 68456 - protein, 274 aa, Unknown
  Obtained from environmental sample
  DOMAIN (119)...(270): Integrase core domain
  misc_feature (1)..(274): Xaa is any amino acid
MTDRPRYRATWAQFQTNQRKKNSHRKLRIPNKKLRRFIQKQLEDGYSPEIIAVMAFEKNERWKTNYETIYQWIYNDRKDLIPFLTKCHRIRRKRGSANQKRCPKIPNRTTIDKRPDYVNLRCETGHWEIDTAISRKSKAAIMVLVERKTRYVIIKKLQAKTAYFMHNATVKSLKDYPIKTRQSITYDNGTENTLHELTNKVLGTKSYFCNPYHSWEKGTVENIIGIVRRYYPKKTDWKNITQWDLNKIARFINNRPMKLLGFKTPYQAFVALAS

SEQ ID NO: 68457 - DNA, 924 bp, Unknown
  Obtained from environmental sample
  misc_feature (1)..(924): n is a, c, g, or t
atggagatcgaagttccccgtgaccgggacggagacttcgagccccgaatagtcgggaaacaccaaagggaatggcgcgggttcgatgacaaaatcctcgcgatgtacagtcatggaatgtcaacgcagagcatccaggcgacaatcaaagaaatttacaacgttgatatatcagcggaactggtaagccgcgtaacggacgaagtgaaagggctggttgacgaatggcgtaaccgcccccttgaagcgttttatccggttatattttttgacgccctgcgggtaaacatccgtgatgaagggcatgtgggcaaaaaagcggtgtatttggcgcttgcgatacgtctggacgggcaaaaagagctgttgggcatgtggatagagaaaaatgaaggctcaaaattctggatgggaatcttgaacgaactgaaaaacaggggtgttcaagacatattgttggcggcggtggacgggcttaccggatttcccgacgcaattaacgccgtatttaaaaaaacggaagttcaattgtgtatagtgcacatggttcgcaactcggtgaaatacgtcccgtacaaagaccgcaaggcggttacaacggacctcaaagaaatttaccttgccccgtcagaggacgcagcaagcgccgcgttggaatgtttcgcggaaaaatgggatcggaaatatcccgccatttccaaatcgtggcgcggccggtggacggagataattccgtacatgaaattttcccctgaaatacggaaagctatttatacgactaacgccattgagtctgttaattacacgctccagcggaacttgaaaacccgccaatcatttcccaatgacgaggctgcgatgaaattgatttatatgatgcggcgttggatctcaaaaggggggccaattccgataggaaattga

SEQ ID NO: 68458 - protein, 307 aa, Unknown
  Obtained from environmental sample
  DOMAIN (1)...(299): Transposase, Mutator family
  misc_feature (1)..(307): Xaa is any amino acid
MEIEVPRDRDGDFEPRIVGKHQREWRGFDDKILAMYSHGMSTQSIQATIKEIYNVDISAELVSRVTDEVKGLVDEWRNRPLEAFYPVIFFDALRVNIRDEGHVGKKAVYLALAIRLDGQKELLGMWIEKNEGSKFWMGILNELKNRGVQDILLAAVDGLTGFPDAINAVFKKTEVQLCIVHMVRNSVKYVPYKDRKAVTTDLKEIYLAPSEDAASAALECFAEKWDRKYPAISKSWRGRWTEIIPYMKFSPEIRKAIYTTNAIESVNYTLQRNLKTRQSFPNDEAAMKLIYMMRRWISKGGPIPIGN

SEQ ID NO: 68459 - DNA, 1095 bp, Unknown
  Obtained from environmental sample
  misc_feature (1)..(1095): n is a, c, g, or t
gtggccgtggtcgccacggcggacgagtcgatgcgcacctgggaacgccccgccgccgccgcgcccgccgccgcggtcgaggacatccccaagatggcgataatggccgacaaactcgagccgtcggtgcggacgatcagcctgctcggaataggggcgtacctgccggacagaatcgtcaaaaacgaggagcttctggcggagttccccgacatcaccgccgactacatcttcaaggtgaccggaataaaggagcgccgctgggcggcggccgacgtcaagccgtcggatatggcctacgaggcgtctaaaaaagcgatagagaacagcgggctaagaccctccgacatcaacgcaatcatcgtatccaccacaacgcccgacgtggtgatgccctccaccgcctgcatactgcaaggaaaactcggcatacgcggcgcgccggcgtttgaccttaacgcggcctgttcgggatggctctacggcttatccgtggcgcgtggcctcatcctctccggcatagcgaaaaacgtcttggtggcaagcgtcgacatgcagtcgcgggtgctcgacaagagcgacaaggacacctacttcctcttcggcgacggcgccggggccacggtgctgagcggcgtggaaaagggccacgtcatcaaagacgaaattctaagcgccgactccctgggcctcaacatggcgaggcgcggctaccccggctacgaggtacccgtgaattcgtcaactttcgacccgtggctgcgcttggacggcaaggcgctcttccgcttcgcaaccgaaagtttctcggcgatggttcgtgaactcatcatcaagagcaaatggacgccggaagaggtgcgctgggtggtcccccaccaagccaacggacggataatcagagcggccgcgcagaagagcggagtgcccttcgaacgcttctatctgaacatagaccgagtaggcaacacgtcaagcgcaagcattccagtagcgttatcggagatacaaaacggcatgcagaaaaaagacaaagtcatattctgcacagtaggcgcgggaatcacagcggcgggattatcgttagagtggtaa

SEQ ID NO: 68460 - protein, 364 aa, Unknown
  Obtained from environmental sample
  DOMAIN (150)...(228): 3-Oxoacyl-[acyl-carrier-protein (ACP)] synthase III
  misc_feature (1)..(364): Xaa is any amino acid
MAVVATADESMRTWERPAAAAPAAAVEDIPKMAIMADKLEPSVRTISLLGIGAYLPDRIVKNEELLAEFPDITADYIFKVTGIKERRWAAADVKPSDMAYEASKKAIENSGLRPSDINAIIVSTTTPDVVMPSTACILQGKLGIRGAPAFDLNAACSGWLYGLSVARGLILSGIAKNVLVASVDMQSRVLDKSDKDTYFLFGDGAGATVLSGVEKGHVIKDEILSADSLGLNMARRGYPGYEVPVNSSTFDPWLRLDGKALFRFATESFSAMVRELIIKSKWTPEEVRWVVPHQANGRIIRAAAQKSGVPFERFYLNIDRVGNTSSASIPVALSEIQNGMQKKDKVIFCTVGAGITAAGLSLEW

SEQ ID NO: 68461 - DNA, 798 bp, Unknown
  Obtained from environmental sample
  misc_feature (1)..(798): n is a, c, g, or t
ttgttgacacgctcaaacgcctggaagaaaacggctgcgtcgtccccggcagagcataatgatcataccgtgcgccaacaactactccatgaacatcggcaagcgtttctggactatggacaacaccgacatcaaccgtatgttccccggctacgatcaaggcgagacgacgcagcgcatagcggacgggctgttcaaagccatcagagactacgtttacggcatacagatggcgagcttctaccgcgagggcgacttcctgccgcatatcaaggtgatggacaccgactacggaaagatcgaaacctacgagtcgctctccgatttcggcctgccctacggcctgctcagaacgccgcacccgtacgacaccaccacgctaaactacaattggcaggtgtggggctgccgcgcctactcgctcttctctacatacacagaccacgtcggcaaacaatccatgcagaccgcagtaaacgcgacgctgcgcttcctgatcgccaaaggcatactcaaatggtcgctgcaccgcggtatgcacacccgcatactgaacgaagaatctataagaaccgtcaaagcgagctgcgccggaatgctgaaaaaacacgtcgccgtgggagacgaggttgccgagggcgacctcatctgcgaggtgatccaccccttggaaggcaacaccataaacctgatagaatcgcccgtggatgggacggtgttcttctcctacaacaaacagctggttatggagcacaccgacgtgttcaacatcgtaccgttttccaatgtgtgacgtga

SEQ ID NO: 68462 - protein, 265 aa, Unknown
  Obtained from environmental sample
  misc_feature (1)..(265): Xaa is any amino acid
MLTRSNAWKKTAASSPAEHNDHTVRQQLLHEHRQAFLDYGQHRHQPYVPRLRSRRDDAAHSGRAVQSHQRLRLRHTDGELLPRGRLPAAYQGDGHRLRKDRNLRVALRFRPALRPAQNAAPVRHHHAKLQLAGVGLPRLLALLYIHRPRRQTIHADRSKRDAALPDRQRHTQMVAAPRYAHPHTERRIYKNRQSELRRNAEKTRRRGRRGCRGRPHLRGDPPLGRQHHKPDRIARGWDGVLLLQQTAGYGAHRRVQHRTVFQCVT

SEQ ID NO: 68463 - DNA, 735 bp, Unknown
  Obtained from environmental sample
  misc_feature (1)..(735): n is a, c, g, or t
atgatcataccgtgcgccaacaactactccatgaacatcggcaagcgtttctggactatggacaacaccgacatcaaccgtatgttccccggctacgatcaaggcgagacgacgcagcgcatagcggacgggctgttcaaagccatcagagactacgtttacggcatacagatggcgagcttctaccgcgagggcgacttcctgccgcatatcaaggtgatggacaccgactacggaaagatcgaaacctacgagtcgctctccgatttcggcctgccctacggcctgctcagaacgccgcacccgtacgacaccaccacgctaaactacaattggcaggtgtggggctgccgcgcctactcgctcttctctacatacacagaccacgtcggcaaacaatccatgcagaccgcagtaaacgcgacgctgcgcttcctgatcgccaaaggcatactcaaatggtcgctgcaccgcggtatgcacacccgcatactgaacgaagaatctataagaaccgtcaaagcgagctgcgccggaatgctgaaaaaacacgtcgccgtgggagacgaggttgccgagggcgacctcatctgcgaggtgatccaccccttggaaggcaacaccataaacctgatagaatcgcccgtggatgggacggtgttcttctcctacaacaaacagctggttatggagcacaccgacgtgttcaacatcgtaccgttttccaatgtgtga

SEQ ID NO: 68464 - protein, 244 aa, Unknown
  Obtained from environmental sample
  DOMAIN (1)...(241): Succinylglutamate desuccinylase / Aspartoacylase family
  misc_feature (1)..(244): Xaa is any amino acid
MIIPCANNYSMNIGKRFWTMDNTDINRMFPGYDQGETTQRIADGLFKAIRDYVYGIQMASFYREGDFLPHIKVMDTDYGKIETYESLSDFGLPYGLLRTPHPYDTTTLNYNWQVWGCRAYSLFSTYTDHVGKQSMQTAVNATLRFLIAKGILKWSLHRGMHTRILNEESIRTVKASCAGMLKKHVAVGDEVAEGDLICEVIHPLEGNTINLIESPVDGTVFFSYNKQLVMEHTDVFNIVPFSNV

SEQ ID NO: 68465 - DNA, 303 bp, Unknown
  Obtained from environmental sample
  misc_feature (1)..(303): n is a, c, g, or t
ttgcgccgtgcgaaggcttgctgtttacgctcagggaatacccggtcgtattcggcggctcgcttttggcgaggattatggaggacacaaaaaatggttaaagacatcatatattcgattaaatcgccctatcgtcagagcatggatattatagggtacacattcggctcaggcgaacgctcatgctgtgtagtaggcgcgcttcgcggcaacgagatacagcagatggcaatctgcgcccaacttgttgacacgctcaaacgcctggaagaaaacggctgcgtcgtccccggcagagcataa

SEQ ID NO: 68466 - protein, 100 aa, Unknown
  Obtained from environmental sample
  misc_feature (1)..(100): Xaa is any amino acid
MRRAKACCLRSGNTRSYSAARFWRGLWRTQKMVKDIIYSIKSPYRQSMDIIGYTFGSGERSCCVVGALRGNEIQQMAICAQLVDTLKRLEENGCVVPGRA

SEQ ID NO: 68467 - DNA, 939 bp, Unknown
  Obtained from environmental sample
  misc_feature (1)..(939): n is a, c, g, or t
atgattaaacatgtgtctgtggcggcgctgccagtcgcggaggacttcattatacagaagaaccgcattgagaataacgcggcaaagggcagtaagcgcgtctgcatcgttacagggacccacggcgacgaattggaggggcagtatgtctgcgcgcagttggcgaagatcctgaacgacgggaaacaaaaactttccggaatcgtggacatctatccggctgtaaatccgctggggatcgataccgttacacggnggtttccgatgttcgacctggacatgaaccgcatatttcccggctcgtcgtcgggatcgcttgcggaagtcgcggcatacgatgtcatccgcgacattgaaggcgccgatatgtgcatagacatacattccagcaacatctttttgcgcgagatacctcaggttcgcgtgagcgaacagaacgaggccgcgcttctgccttacgccgtgatgctcaacgtcgatctcgtgtggatacacgcgtcggcgaccgtactggaatcgacgctggcgcactctcttaacacacgcggcgtgaagacgctggtagtcgagatgggcgtcggaatgcgcataacagaaaaattctgcgctcagctggtggacggaatattgaacctgctgactgaactcggcatgtggagcggaacgtccggacggacgcgtccgcctcttgtatcaaaggatcacagcgtcggctttttgaactcggacgccggcgggatatttattccgcgcgccgtgcacggcaaccacataaacgccggcgactgcatcggcatggttatagacccgctcacaggaaccgtcgtcgaggaaacggttgcgccgtgcgaaggcttgctgtttacgctcagggaatacccggtcgtattcggcggctcgcttttggcgaggattatggaggacacaaaaaatggttaa

SEQ ID NO: 68468 - protein, 312 aa, Unknown
  Obtained from environmental sample
  DOMAIN (30)...(308): Succinylglutamate desuccinylase / Aspartoacylase family
  misc_feature (1)..(312): Xaa is any amino acid
MIKHVSVAALPVAEDFIIQKNRIENNAAKGSKRVCIVTGTHGDELEGQYVCAQLAKILNDGKQKLSGIVDIYPAVNPLGIDTVTRXFPMFDLDMNRIFPGSSSGSLAEVAAYDVIRDIEGADMCIDIHSSNIFLREIPQVRVSEQNEAALLPYAVMLNVDLVWIHASATVLESTLAHSLNTRGVKTLVVEMGVGMRITEKFCAQLVDGILNLLTELGMWSGTSGRTRPPLVSKDHSVGFLNSDAGGIFIPRAVHGNHINAGDCIGMVIDPLTGTVVEETVAPCEGLLFTLREYPVVFGGSLLARIMEDTKNG

SEQ ID NO: 68469 - DNA, 396 bp, Unknown
  Obtained from environmental sample
  misc_feature (1)..(396): n is a, c, g, or t
ttgggcgtgagaggagaattttgcgacaagcaaagcattatgggattaatcgacgcagtaaagttcaacgatgccggcttagtcaccgccgtagctcaagacattaagacgaaccaagtcctgatggtcgcctacatgaaccgcgacaccctcgccgaaaccatcgacagcggcgacatggtctattggagccgcagccgccaaaagcggtggaagaagggcgagacctcgggccatgtccaaaaggtgcgcgaggtgtacatagactgcgacggcgacgctctgctgttcaagatagagcagtccggcgcggcctgtcacgagaactatttttcatgtttcttccggcagagcgccggcggcgagtggaaggtcatcgccgagaaaatggagtga

SEQ ID NO: 68470 - protein, 131 aa, Unknown
  Obtained from environmental sample
  DOMAIN (42)...(116): Phosphoribosyl-AMP cyclohydrolase
  misc_feature (1)..(131): Xaa is any amino acid
MGVRGEFCDKQSIMGLIDAVKFNDAGLVTAVAQDIKTNQVLMVAYMNRDTLAETIDSGDMVYWSRSRQKRWKKGETSGHVQKVREVYIDCDGDALLFKIEQSGAACHENYFSCFFRQSAGGEWKVIAEKME

SEQ ID NO: 68471 - DNA, 1161 bp, Unknown
  Obtained from environmental sample
  misc_feature (1)..(1161): n is a, c, g, or t
atgagcgtccaacgtccgctgtactcaccgtacgtagaggtctctctcgacaatctgctccataacatggcgcagattcgccgaaaactgccgcaagaagtcggcgtcatcgccgtggtcaaggacagctcatacggttgcggcagcgtgcagatcgccaaggcgctcgaacaaagcggcagtgtcgcgttttttgcggtcgctaggactattgaggcggtggttcttcgtaagcgcgggataacgctcccgattctggttttggggatggccaccgaagaagggctgcgcttcggggcggagaacaacatcgtttttgcgttaaacgatttgagcgatattgacaggtgggaatcttacggcgtgagcgtgaacttccacttgggcattgataccggcatgagccgtatggggtttctgccgcaagagattgatacgttggtcgaaaaactgaacgcggcgaagaacatacatataggcggagccttcacccacatggcgaacgcggacgagccgaacacgcaaaccgtggccggccaattggaaaaattccgtgacgctgtcaataaactgcgtaacggcggacacccgccggcgcacgtccactacgggaacaccgccacattcctgcgtttcccattaagcgattgcactttggcgcgcccggggattgcgctctacggttgcaagcccgatccggcgcagggattcgatatagaccttaaaccggtcgcatcattgatttcgcatgtcgtcaagatgaaaaagatccccgccgggacccctgtctcatactgcggaaattacgtcacccccgcagaaacatgtatcgcgacgatacccctaggctatgcccacggtctgccgcgataccttaacggcaaaggttcggtactgataggcgggacgcgttaccgcatagccggaaacataacgatggactacataatggtagacgccggcgcaaatccgtccatatccgtaggcgacgaggcggtggccataggaacgcaaggcggcgagtccatcacgccggacgacattgcggttatcggcaacactatcggatacgaggtactgtgcaacttggggacgacgatagaccggttctacacgcaagacgggaaggttgttcaccatgagtcgggcgccatatattaa

SEQ ID NO: 68472 - protein, 386 aa, Unknown
  Obtained from environmental sample
  DOMAIN (244)...(372): Alanine racemase, C-terminal domain
  misc_feature (1)..(386): Xaa is any amino acid
MSVQRPLYSPYVEVSLDNLLHNMAQIRRKLPQEVGVIAVVKDSSYGCGSVQIAKALEQSGSVAFFAVARTIEAVVLRKRGITLPILVLGMATEEGLRFGAENNIVFALNDLSDIDRWESYGVSVNFHLGIDTGMSRMGFLPQEIDTLVEKLNAAKNIHIGGAFTHMANADEPNTQTVAGQLEKFRDAVNKLRNGGHPPAHVHYGNTATFLRFPLSDCTLARPGIALYGCKPDPAQGFDIDLKPVASLISHVVKMKKIPAGTPVSYCGNYVTPAETCIATIPLGYAHGLPRYLNGKGSVLIGGTRYRIAGNITMDYIMVDAGANPSISVGDEAVAIGTQGGESITPDDIAVIGNTIGYEVLCNLGTTIDRFYTQDGKVVHHESGAIY

SEQ ID NO: 68473 - DNA, 1965 bp, Unknown
  Obtained from environmental sample
  misc_feature (1)..(1965): n is a, c, g, or t
atgagaaagtttcaaataaggctcgataagctggagaaaaaatcggcaagttgggcgaaaaatcgaaaagttctcatggagttccacataaaccgcgatgtccgtaaagagtatgatttaaaggacagccttttcgcccttaccggaaatgtggttcttgccgacctgaaacaaacgcgtgagctggcggcgaagttcaatgcaaaacaagaccccgcccaccccgaacgttatataaaagccggtcatctttacgcgatggggctaatcgacgaaatccttcactttgtagtcgctctttaccgcgaagaagttcaaggcgatgtatttgaacttgcgctggacaggctggatactaacctgggcgaaaaacagacaagcggtcttttaaaaactttttccgatcaattccctccccgaccggtttataaaggcgagaaaaaaattgacgaatatttaaagagcaaggaaaaaggcgaaagctgccgcgctctatctatcgaagaaaccatgctcctttctatagcgaatcttaatccggcttttagaccgttcaaatttttatttgacgataaagacctcgttaaaaaaactgtctaccctgtcgctatcgaagaattaaaagcgcacttaaaagaaatgcctgtcttcggtcccgacggaatgaacctttgggatttccttcgctcccccgccattgtctgccccgattccctctttggtcaacttgaatatatgcggaaacattgggggcttctcatttccaaattcatggcgcgtctgctcatggctctcgacgtaataaacgaagaagaaaaacccagtttcttcggaccgggaccaagcgaagttttaactttcgcgggtcttgatgaatacgagaaattcagtcccgatcaggactggatgcccaagacggttctgattgcaaaaagcacgcttgtctggctttttcagatgtcacaaaaatacggaagaaatataacccgccttgatcaaatccccaatgaggaacttgacgagttggcaaggagaggttttacggggctgtggctaatcggtctttgggaacgaagtcaggcgagcaagacgataaaacaatggacgggcaatcccgaagcggcggcttccgcttacagtttgcacgattatgatattgccggcgaactcggcggttggggcgcgcttgccaatttgcgtgaacgctgcatgaggcgcggcatccgccttggttcggacatggttcccaaccacacaggcatagacagcaaatggatgatagaacatcccgaccgtttcctccagcttccgtatccgcccttcccgacttacaactacaactgcggcaacctttccggcagggacgacattaccgttcagattgaagaacattatttttcgcgtaacgacgccgccgtcgtgttcaagcgcattgacaaccgcaccggcgacacgcgctacatctaccacggcaacgacggaacctcaatgccctggaacgacaccgcgcagattgacttcctcaacccagaagcgcgcgaagccgttattcgcacaattatcggcgtgtgccagcagttctccattgtgcgcttcgacgcggcgatgactctcgcaaagcggcacattcagcggctttggtatcctgtgccgggaagcggaggggcaatcgccagcagagccgaacattcaatcagcaccgaggaatttaacaagcgcatacctaatgaattctggcgcgaagttgttgaccgctgcgctaatgaagcgccgcacaccttgcttcttgccgaagctttctggatgatggaaggttattttgtccgcactttgggaatgcaccgcgtttacaattcggcttttatgaacatgctgaaaaacgaagagaacgcgaaataccgcgccaccataaaaaacacgatggaatttgatcctgaaatcttaaaagcgctttgtcaactttag

SEQ ID NO: 68474 - protein, 654 aa, Unknown
  Obtained from environmental sample
  DOMAIN (312)...(647): Alpha amylase, catalytic domain
  misc_feature (1)..(654): Xaa is any amino acid
MRKFQIRLDKLEKKSASWAKNRKVLMEFHINRDVRKEYDLKDSLFALTGNVVLADLKQTRELAAKFNAKQDPAHPERYIKAGHLYAMGLIDEILHFVVALYREEVQGDVFELALDRLDTNLGEKQTSGLLKTFSDQFPPRPVYKGEKKIDEYLKSKEKGESCRALSIEETMLLSIANLNPAFRPFKFLFDDKDLVKKTVYPVAIEELKAHLKEMPVFGPDGMNLWDFLRSPAIVCPDSLFGQLEYMRKHWGLLISKFMARLLMALDVINEEEKPSFFGPGPSEVLTFAGLDEYEKFSPDQDWMPKTVLIAKSTLVWLFQMSQKYGRNITRLDQIPNEELDELARRGFTGLWLIGLWERSQASKTIKQWTGNPEAAASAYSLHDYDIAGELGGWGALANLRERCMRRGIRLGSDMVPNHTGIDSKWMIEHPDRFLQLPYPPFPTYNYNCGNLSGRDDITVQIEEHYFSRNDAAVVFKRIDNRTGDTRYIYHGNDGTSMPWNDTAQIDFLNPEAREAVIRTIIGVCQQFSIVRFDAAMTLAKRHIQRLWYPVPGSGGAIASRAEHSISTEEFNKRIPNEFWREVVDRCANEAPHTLLLAEAFWMMEGYFVRTLGMHRVYNSAFMNMLKNEENAKYRATIKNTMEFDPEILKALCQL

SEQ ID NO: 68475 - DNA, 2127 bp, Unknown
  Obtained from environmental sample
  misc_feature (1)..(2127): n is a, c, g, or t
atgacacaaaaagtaacactccaaattgccggtaaggatttgattcttgaaaccggaagaatcgcgaagcaagccaatggttctgtttttgctcagtatgcgggatcagctgttattgctacagtctgttcttcgtccgaaccactggaaggtcttaactatgtgccgcttactgttgaatacaatgaaaaatattatgcggctgggaaaattcccggcggtttcataaaaagagaaagccgtcccaaggacaaggaaatattggtttcccgcctcattgataggccgatgagaccgctttttgaaaaaagtttcgggcgtgagatacagttgattcctacaactctttcaacagatcaggttaatcctcctgacattctggcgatcatcgcgtcgtccgccgctgttcatatttcagatattccgtttaacggacctattgccggagtaagagtctgtcaggttaacggagagctaattgtaaatcctacttatgaacaaattgaaaattccacgctggaaatagttgttgcaggaactaaagacggtattacaatggtagaaggcggcgcgaatgaagtcagcgaggagctgatgctcgaagcgcttggcaaagcccatgctgtaatacgcgaattttgtacgcttcaagaaaaactaagagagcttgcgggaaagaaaaaacttccgctggttgtaccttcatattcgttggaaaacgccgacgcaatacgtaaagatggcttttcaaaactgggaaaaagcttgtttccttccacaaaacatgaaaggcacgacggcattaaagctgttaaaaccgaattggcggctcagcacgccgctcagcttgaagatgaaaaccagaaaaaacttttcgacgcattattcgaagatatgcagtatgaaattctgcgctcttcaattttgaataacggaaagcgcgtagacggaaggggattggaagatatccgcagcattacctgcgaagtaggaattttacagcgcactcacggttccgcgctctttacgcgcggcgaaacacaggcgcttgcggtaacaacgcttggaactgtttttgacgaacagatttttgacgacatcgaaggcgataagcgcgaaaactttatgttgcattacaacttcccgccgtattcagtcggcgaagtcggcagaacaggtacggggcgcagagagataggacacggacaccttgcccagcgttcattaaaggcgatgattccctcaaaagatgaattcccgtatacagtccgcgttgtctcggaaatcatggagtctaacggctcttcttcaatggcttcagtttgcggcggaactctttccatgcttcacgcgggcgtcccgatgaaaaaacccgtagcgggaatagcgatgggtcttatcacggaaggaaaagccggtcccggcgacagattcgcggtgttatccgacattctcggcgaagaagatcaccttggagacatggattttaaagttgccggaaccaaagacggaataacaggctttcagatggatataaaaatcgccggagtcagtcaggaaatcatgcgtaaagcgctggatcaagcgaaacgcggaagaatgcatatcctttcaataatgaatcaatgtctggataaacccgttgaggaaatcagcgaatacgcccccaaaattgttactttgcgtattgatattgataaaatcggagcccttatcggtcccggcggaaagaatatcaaggcgttatgtgaacaatattcggttaagattaacacggaagacgacggcactgtaacgattttcggcaaaagcacaaaggacgcggaagacgcgaaagcggcggtcgtaggaattgcctgtgacccggaaattgacaaggtatacaacggcactgtaaagcgcataatggactttggcgcgtttgtggagattctccccggcaaggaaggacttgtacacataagcaaactttcaagacagagaatcgaaaaagttaccgacgtgttaaaagaaggtcagcagatacccgtcaaattgcttgaaattgacaaacagggtcgtctcaatctttcatacatagacgcgattgatccctcgggcgcacccggcggtcagcgcaaaaattaa

SEQ ID NO: 68476 - protein, 708 aa, Unknown
  Obtained from environmental sample
  DOMAIN (242)...(319): Polyribonucleotide nucleotidyltransferase, RNA binding domain
  misc_feature (1)..(708): Xaa is any amino acid
MTQKVTLQIAGKDLILETGRIAKQANGSVFAQYAGSAVIATVCSSSEPLEGLNYVPLTVEYNEKYYAAGKIPGGFIKRESRPKDKEILVSRLIDRPMRPLFEKSFGREIQLIPTTLSTDQVNPPDILAIIASSAAVHISDIPFNGPIAGVRVCQVNGELIVNPTYEQIENSTLEIVVAGTKDGITMVEGGANEVSEELMLEALGKAHAVIREFCTLQEKLRELAGKKKLPLVVPSYSLENADAIRKDGFSKLGKSLFPSTKHERHDGIKAVKTELAAQHAAQLEDENQKKLFDALFEDMQYEILRSSILNNGKRVDGRGLEDIRSITCEVGILQRTHGSALFTRGETQALAVTTLGTVFDEQIFDDIEGDKRENFMLHYNFPPYSVGEVGRTGTGRREIGHGHLAQRSLKAMIPSKDEFPYTVRVVSEIMESNGSSSMASVCGGTLSMLHAGVPMKKPVAGIAMGLITEGKAGPGDRFAVLSDILGEEDHLGDMDFKVAGTKDGITGFQMDIKIAGVSQEIMRKALDQAKRGRMHILSIMNQCLDKPVEEISEYAPKIVTLRIDIDKIGALIGPGGKNIKALCEQYSVKINTEDDGTVTIFGKSTKDAEDAKAAVVGIACDPEIDKVYNGTVKRIMDFGAFVEILPGKEGLVHISKLSRQRIEKVTDVLKEGQQIPVKLLEIDKQGRLNLSYIDAIDPSGAPGGQRKN

SEQ ID NO: 68477 - DNA, 444 bp, Unknown
  Obtained from environmental sample
  misc_feature (1)..(444): n is a, c, g, or t
gtgaatgaggtacttgtaaaagtagtaaaaaatgctccgcgcgcgattcttcctcagtacgaaacaagggggtccgccggcatggacttgcgcgccttccttgacgccgatatttccgtaccgccccttggaagggtaaaagtccccacaggtcttaaaatcgaaatccccgaaggctatgaggggcaggtgcgtccgcgctcaggcttggcgataaaaaaagggctaacggttcttaattcgcccggcacgatagactccgattataggggagatttagacataattttaataaatttgggttcggaagatattataattaaagatggagagcgaatcgctcagcttgtaatcgcccctgtttgtaaggcggacattacggaggttaatgttttaagtgaaacggcgagaggcggcggcggttttgggtctaccggagcgtaa

SEQ ID NO: 68478 - protein, 147 aa, Unknown
  Obtained from environmental sample
  DOMAIN (13)...(146): dUTPase
  misc_feature (1)..(147): Xaa is any amino acid
MNEVLVKVVKNAPRAILPQYETRGSAGMDLRAFLDADISVPPLGRVKVPTGLKIEIPEGYEGQVRPRSGLAIKKGLTVLNSPGTIDSDYRGDLDIILINLGSEDIIIKDGERIAQLVIAPVCKADITEVNVLSETARGGGGFGSTGA

SEQ ID NO: 68479 - DNA, 1398 bp, Unknown
  Obtained from environmental sample
  misc_feature (1)..(1398): n is a, c, g, or t
gtgaaacggcgagaggcggcggcggttttgggtctaccggagcgtaagatggcgttggatatattaaagaaaataaaaaattatattatttcggtaattgattattttcagacgaggaatttaagtcctcttgaaagcagacgttttatttccaaaaccatatataaatatatactgagcgaaatgttttttgcttttgtaatttgtttttgttttttcttttttatcttttttgtaaaccagatacttcttatggcaaagcaagttcttgagaagcatgtgccttttaatcaggttgcgcttttaattctttattccctgcctacggtaatcgcaatgtcggctccgtttgcgtgtcttgtcggtacgcttatgactgtagggcgtttaacgtcggacaatgaaatccttgttatgctttcttccggtctgtcgtataagaatgttttttttcccgccattacggtggggataataatttctcttttatcgtttcttacaaacgacgtactgcttccggctggcaccgttcaatttaacaaattgtggcgaaagatactggtctctactcccgcgctggaaatggaagctaactctgtaaaaaaattcaaggataccgtaattgttacgggcggcgtaaaagataatataatagaaaacctgcttattatggataagacagaaaacggcgagcgcaggattatattggcaagcagcgcggaattaaaagacggcggaaaagagggtttaagtcttaaccttgattccgcgtttgttcattcgtcaaaggaaatagcgagagaggattacgattacgccaatacggaaagtttgcagtactgggtttccaatgaaaatattattcaacaaattataagcgtaagcccaagagagatgagttcaagagacgttcataccgctattaaaggcaaaaaagcggatctggctatgaaactaaacgacagaaaaataaaaatgataaataacgcggcaggcttggaaaatattttaagaaccggtccctcaggggaaggttggaaccgcagaacgacaaccgttactacttttgagaaggatattgaatctcttaacgcaatgatgagggacagatctcttattattcatgtaatcgagatatacagaaaattttccgttcctcttggcgcgttttgttttgtttttcttgccgtctctctcggtttaatggcgaaaaaaagcgggcagactgtaggatttattttcggcaatattatcgccgtaatatattggtctatgctttttatagggcagactatgggtttgcgcacgggaatgtcgccatttgtatcaatgtggtctcctaatattttctttttaactataggcattgttcttgccattattaaggtgcgcaaatga

SEQ ID NO: 68480 - protein, 465 aa, Unknown
  Obtained from environmental sample
  DOMAIN (56)...(461): Predicted permease YjgP/YjgQ family
  misc_feature (1)..(465): Xaa is any amino acid
MKRREAAAVLGLPERKMALDILKKIKNYIISVIDYFQTRNLSPLESRRFISKTIYKYILSEMFFAFVICFCFFFFIFFVNQILLMAKQVLEKHVPFNQVALLILYSLPTVIAMSAPFACLVGTLMTVGRLTSDNEILVMLSSGLSYKNVFFPAITVGIIISLLSFLTNDVLLPAGTVQFNKLWRKILVSTPALEMEANSVKKFKDTVIVTGGVKDNIIENLLIMDKTENGERRIILASSAELKDGGKEGLSLNLDSAFVHSSKEIAREDYDYANTESLQYWVSNENIIQQIISVSPREMSSRDVHTAIKGKKADLAMKLNDRKIKMINNAAGLENILRTGPSGEGWNRRTTTVTTFEKDIESLNAMMRDRSLIIHVIEIYRKFSVPLGAFCFVFLAVSLGLMAKKSGQTVGFIFGNIIAVIYWSMLFIGQTMGLRTGMSPFVSMWSPNIFFLTIGIVLAIIKVRK

SEQ ID NO: 68481 - DNA, 720 bp, Unknown
  Obtained from environmental sample
  misc_feature (1)..(720): n is a, c, g, or t
atgtcgagctttaatcagagcgtcgccgtgcagaacatcggaataccctccgatcgtcattttatgattcgagtagaagacaaagccgacgaacgggtaaaatcggatgaaatcgtacaggttcttgaaactcgtttcggcacaggcggcgttgccgttatgcgatccgactatgtcggctcaagccagtccaaaaaacttattgatcaggtattttacctaataccgcttactttgctcttaattttaatttacctgattatccgctttaaaatacaatacgccgttggcggcgtaatcgccattttacacgacttacttgtaataatcgcgtatctggtttgggcgagaatggagtttaacaccacgacaatcgcggcgattcttaccattcttggttattctatcaacaacacaatcattttatttgaccgcgtaagggaaaatatccgcgtgtatcccgataacacattcaccgatattatgaatatttcattaacaggtattttagggcgttctattataacaacattgacgacaatgctcgccgtattatccctgtttatttttacaacaggttcaatgaaagattttgcccttgtgctgttaataggaatgacatccggcacatacacgtcgctctttatcgcttccggttttgtaaacttctgggaaaacagcaagagaaaacaggcaaagaaaaaagcggtaacggcatag

SEQ ID NO: 68482 - protein, 239 aa, Unknown
  Obtained from environmental sample
  DOMAIN (41)...(227): Protein export membrane protein
  misc_feature (1)..(239): Xaa is any amino acid
MSSFNQSVAVQNIGIPSDRHFMIRVEDKADERVKSDEIVQVLETRFGTGGVAVMRSDYVGSSQSKKLIDQVFYLIPLTLLLILIYLIIRFKIQYAVGGVIAILHDLLVIIAYLVWARMEFNTTTIAAILTILGYSINNTIILFDRVRENIRVYPDNTFTDIMNISLTGILGRSIITTLTTMLAVLSLFIFTTGSMKDFALVLLIGMTSGTYTSLFIASGFVNFWENSKRKQAKKKAVTA

SEQ ID NO: 68483 - DNA, 879 bp, Unknown
  Obtained from environmental sample
  misc_feature (1)..(879): n is a, c, g, or t
atgacaataatccgcgcccgcgtacttggtttctgcatgggagtcaggcgggcggtggaacttacgatagcgcaggcaaaggaagcggcggaggaaaactccgccgtttacactctgggacacctgattcacaatcctaaagtattagccgatcttgaaaagcagggggttattgcgttaaagcaaaacgctcttgagcaaataagtgaaaaaggtaaaaactgctgtgtaattatccgcgcgcacggaataagtccccaagcggaagaagaattgcgcggcatggaatgtaaaataacagacgcaacctgtcccaatgttaaaaaaaaccagttaaagacacaagagctttcccgcgcgggttacagtttatttctcgccggtgaatccgcgcacgcggagatagagggaatcacaggttacgctggttccgcttctttttgcaaggcggtaatgaatacggatcaggcgcgggaagccgcagccgctttgcgtgaaacaaacagtaacgcccaaaacgctcttatcgggcagacgacaatttcgcaggacgaataccgcggcataggcaatgaaattaaaaaatacttccccaatcttgaaattgtaaacaccatctgctcagccactgcagaacgccagcaggcgttacgcgaacttttaatcgccgcggacgcggtaataatcgccggcggcaaagaatccgccaatacccgccgcctgctgctgatagcccgggaaagcggcaaaccctgcgccatggcagaacgcgttgaagaaatacccgaaaatttttacagttataacacagtaggcatctccgccggcgcgtccactccggattctttgattgatgagattgaattggctcttaaataa

SEQ ID NO: 68484 - protein, 292 aa, Unknown
  Obtained from environmental sample
  DOMAIN (3)...(292): LytB protein
  misc_feature (1)..(292): Xaa is any amino acid
MTIIRARVLGFCMGVRRAVELTIAQAKEAAEENSAVYTLGHLIHNPKVLADLEKQGVIALKQNALEQISEKGKNCCVIIRAHGISPQAEEELRGMECKITDATCPNVKKNQLKTQELSRAGYSLFLAGESAHAEIEGITGYAGSASFCKAVMNTDQAREAAAALRETNSNAQNALIGQTTISQDEYRGIGNEIKKYFPNLEIVNTICSATAERQQALRELLIAADAVIIAGGKESANTRRLLLIARESGKPCAMAERVEEIPENFYSYNTVGISAGASTPDSLIDEIELALK

SEQ ID NO: 68485 - DNA, 648 bp, Unknown
  Obtained from environmental sample
  misc_feature (1)..(648): n is a, c, g, or t
gtgcttgccgccctgcttacggtatcagaacttgtaaaacgtcatgttcgggatatcgcccagtttgtaaaatttttaaaacctgtaaggggcaggatgacttccgtcaataaaaatcagccgtttgaggttgtcgtagattatgcgcataccccgtcttcttttcaggcaatctttcccccgcttcgcgcaaggcttgataaaacaggacacaggataataagcctctttggttccgccggagagcgtgacacgcaaaaaagggctgaacagggaaaaatagccgcccactacagcgattttattattcttaccgatgaagacccccgcggcgaaaaatccatggacattctggaagagattgaaaaaggcgtatatctggatcaagggcaaaaagcagttgaaaattccgaacatccggaaatgagaatagaacagaacagaacggtctttgaacgcgataaaaatcttttcctgatacccgacagacccgccgcaatcagaaaagctctctctcttgcgcaaaaaggcgatcttgtgcttcttttaggcaaaggccacgagaactcaataatttacgccaattatgtaatgccctttgatgaaatcgccgagaccgagaaggcgcttgaggaaattaatttttaa

SEQ ID NO: 68486 - protein, 215 aa, Unknown
  Obtained from environmental sample
  DOMAIN (29)...(118): Mur ligase family, glutamate ligase domain
  misc_feature (1)..(215): Xaa is any amino acid
MLAALLTVSELVKRHVRDIAQFVKFLKPVRGRMTSVNKNQPFEVVVDYAHTPSSFQAIFPPLRARLDKTGHRIISLFGSAGERDTQKRAEQGKIAAHYSDFIILTDEDPRGEKSMDILEEIEKGVYLDQGQKAVENSEHPEMRIEQNRTVFERDKNLFLIPDRPAAIRKALSLAQKGDLVLLLGKGHENSIIYANYVMPFDEIAETEKALEEINF

SEQ ID NO: 68487 - DNA, 765 bp, Unknown
  Obtained from environmental sample
  misc_feature (1)..(765): n is a, c, g, or t
atggaactgcgtctttcgcaattttttacaaaagacacggcggaaaagtgcggacttgttaccgcaaacggaacatcagaccctattgtaaattctcttgaatatgattcgcggaaagtaaaaccgggaagcctgttttttgccttgcccggacttcatacagacggcagtctttatattgacgatgccgtaaaaaacggagctgcggcaattgtgcatgaaaacgatattacaaaaatgctcgacggcatagtctatttaaaagtgaaaaacgcccgtaccgcgatgtctcccatttccgccgccttctacggttatccctcccagcgtttgctcgtaacgggagtgacaggcactgagggcaaaagcaccacggtgtatttaatctggcagctattaacattgctgggcaaaaaagcgggatttatttctaccgttcagcattgtttgggcggcgaagttttaaacaatattgagcatcagaccactcccgaagctcccgttattcagcggcttctgtgtgaaatggcagataacggctgcgaatacgccgtattggaggcaagttcccacgggctttcttcaaaaacaaaccgtcttggagacgtanatttttgctcccgcgttttaacaaacataactcacgaacacatggaatttcacggaacgtgggagcaatacaggcatgacaaggcgatcttttccgcgccgttgacaattatatacagcaggacgacgttactttttttgaaccgtttggcgtaa

SEQ ID NO: 68488 - protein, 254 aa, Unknown
  Obtained from environmental sample
  DOMAIN (114)...(254): Mur ligase middle domain
  misc_feature (1)..(254): Xaa is any amino acid
MELRLSQFFTKDTAEKCGLVTANGTSDPIVNSLEYDSRKVKPGSLFFALPGLHTDGSLYIDDAVKNGAAAIVHENDITKMLDGIVYLKVKNARTAMSPISAAFYGYPSQRLLVTGVTGTEGKSTTVYLIWQLLTLLGKKAGFISTVQHCLGGEVLNNIEHQTTPEAPVIQRLLCEMADNGCEYAVLEASSHGLSSKTNRLGDVXFCSRVLTNITHEHMEFHGTWEQYRHDKAIFSAPLTIIYSRTTLLFLNRLA

SEQ ID NO: 68489 - DNA, 1704 bp, Unknown
  Obtained from environmental sample
  misc_feature (1)..(1704): n is a, c, g, or t
ttgaatgtccggaaaaggatggaacaggtgctgatcttcataaaaaaagaacaggagctgctccgtatccaaaagaaaattcaaagagaaataaacgagaagatcgaaaaatctcagcgtgattatttccttaaagaagaactaaaggcaattaaaaccgagctggggatgaccaccgacgccaagagctctgagtacgcgcggtttaaggagaagctggattccttcaagtttgagggggagataaaagagaccgtagagcaggagcttgaaaaattcagtctcatggatcccaattcggcggaattcatcgttagccgtaattaccttgacgttattgcgagtctgccgtggggagagcctgcgcctgagaatttggagcttaagaaagcccaggaaattcttgaagccgatcattacgggttaaaagacgtaaagaccagaatcgtggaacacctcgctgtcagaaaactcaggaaggatacgaagggttcaatcatctgccttgtggggccgccgggggtgggcaagacttctgttggccgctcaatcgcgcgttcgttaggcaaggcgtttttccgcttttccgtgggcggcatgcgggatgaggctgagataaagggccaccgccggacttacattggcgctcttccggggaagatcatacaggggcttaaaattgtaaaagcgaaagaccctgtttttatgatcgatgagatcgacaagatgggacagagttaccagggagatccggccagcgctctgcttgaagtccttgacccggaacaaaattacaatttccgcgatcattacctggatcttccctttgatgtttcccatgtgttttttattgttactgcgaataccctggatactattcccagcccgcttattgacagaatggagatcatccagctccccggttacatcgactcggaaaaacttgaaatagccaagcattaccttattcccaaaagccttgaaaaaaacgggctaaagaaaagccaggtcaagtataatcaggaatccctgctttacattgccaacggttacgcaagggaagcgggggtgaggaattttgaaaagaacctggacaagatacaccggaagattgcgaagcagattgttgacgccgaagaagcttctgttggctctgcgccgtcaaagtttgcaatagacaaaaaagttattgaggaacatctcggcaagccgattttcccggaaggagaaattaaaagggccgacaggccggggatgtctgtaggtttggcctggacaagcatgggcggggacacgctggtaatcgaagctacgtcagtacccggcaaagagggcctgacccttaccggcaagatgggcgacaccatgaaagagagtgccgccatcgcgatgaccatggcacagaaacttggaacagaacgctatggaattgaagcttcatggtttgaaaaaaaccatatccaccttcacatccccgaaggcgctactcccaaggacgggccatccgccgggatcactatggcgacagcgctgctttccctggtacggaacaaaactattgccgatcgcgtggtgatgaccggggagcttagtcttacagggcaggtgctttctatcggcggcctaaagagaaaaccatcgcgccccagaggacaaggccaagcacataatcattccaaaacaaaatctgcgcgatctggatga

SEQ ID NO: 68490 - protein, 567 aa, Unknown
  Obtained from environmental sample
  DOMAIN (166)...(309): ATPase family associated with various cellular activities (AAA)
  misc_feature (1)..(567): Xaa is any amino acid
MNVRKRMEQVLIFIKKEQELLRIQKKIQREINEKIEKSQRDYFLKEELKAIKTELGMTTDAKSSEYARFKEKLDSFKFEGEIKETVEQELEKFSLMDPNSAEFIVSRNYLDVIASLPWGEPAPENLELKKAQEILEADHYGLKDVKTRIVEHLAVRKLRKDTKGSIICLVGPPGVGKTSVGRSIARSLGKAFFRFSVGGMRDEAEIKGHRRTYIGALPGKIIQGLKIVKAKDPVFMIDEIDKMGQSYQGDPASALLEVLDPEQNYNFRDHYLDLPFDVSHVFFIVTANTLDTIPSPLIDRMEIIQLPGYIDSEKLEIAKHYLIPKSLEKNGLKKSQVKYNQESLLYIANGYAREAGVRNFEKNLDKIHRKIAKQIVDAEEASVGSAPSKFAIDKKVIEEHLGKPIFPEGEIKRADRPGMSVGLAWTSMGGDTLVIEATSVPGKEGLTLTGKMGDTMKESAAIAMTMAQKLGTERYGIEASWFEKNHIHLHIPEGATPKDGPSAGITMATALLSLVRNKTIADRVVMTGELSLTGQVLSIGGLKRKPSRPRGQGQAHNHSKTKSARSG

SEQ ID NO: 68491 - DNA, 399 bp, Unknown
  Obtained from environmental sample
  misc_feature (1)..(399): n is a, c, g, or t
atgcttggctatttcaagtttttccgagtcgatgtaaccggggagctggatgatctccattctgtcaataagcgggctgggaatagtatccagggtattcgcagtaacaataaaaaacacatgggaaacatcaaagggaagatccaggtaatgatcgcggaaattgtaattttgttccgggtcaaggacttcaagcagagcgctggccggatctccctggtaactctgtcccatcttgtcgatctcatcgatcataaaaacagggtctttcgcttttacaattttaagcccctgtatgatcttccccggaagagcgccaatgtaagtccggcggtggccctttatctcagcctcatcccgcatgccgcccacggaaaagcggaaaaacgccttgcctaa

SEQ ID NO: 68492 - protein, 132 aa, Unknown
  Obtained from environmental sample
  misc_feature (1)..(132): Xaa is any amino acid
MLGYFKFFRVDVTGELDDLHSVNKRAGNSIQGIRSNNKKHMGNIKGKIQVMIAEIVILFRVKDFKQSAGRISLVTLSHLVDLIDHKNRVFRFYNFKPLYDLPRKSANVSPAVALYLSLIPHAAHGKAEKRLA

SEQ ID NO: 68493 - DNA, 1092 bp, Unknown
  Obtained from environmental sample
  misc_feature (1)..(1092): n is a, c, g, or t
gtgcttatggaatacagggaatacggcaaaacggggaaaaaagtttcgctgcttggttttgggggaatgcgtttcgccaatgtggacgatcatgacgaatgtatccgaatgatggtcaccgccgccgaaggcggggttaattattttgacacggcgcccggctactttgaaaccagaagcgaggcagcgtatggcaaaggcttcgccgagctgcggcgcaggaaactcccctattactgcgccactaaaactttcgccaccacagaacacgatatccgaaaagagcttgaaacgcagctaagacgcatggacattcaggcggttgacttctaccatatttggtgcatcaccacccttgataactggcaggcaagaaaaaaaagcggtgttttggaaactttcagaaagctcaaagaagagggccttatccgccacatctgcgtctcaagccatcttataagggatgatataaaagagctgcttttagaaggggttttcgagggcgtactcttcggctactctgcatacaactttaaaacgcggcaggccgcctttgacgccataagggaaaagaagcttggcgctgtcgtgatgaaccccctgggcggcgggcttattccccggcatcctgaacgctttgactttctaaagcgggaggaaggcgaggatactgtcgcagcggccctgcgcttcctctgggatcataaggaaataagcgttacccttgttggttttgatacgcttaaacatgtgaagcaggcccttgacgctatggaaggctacaagcccagaacagaagcggagctggcgtcgcttaaggaaagcgtccacgcttctcttgaaggaatctgtacaggctgcgcctactgtgataactgtccccaaaacattcccattcccatgttcatggacgcctacaatcaaaagatcttttgcgagccggataaacaagaccctattggagatcgattgaagtggcactggaatcttgagcgctcagttgccggtacctgcgtcgcctgcgggaattgcgagaaagcctgcacccagcacatcaacatcattgagcggctcaaggaaatagcgggataa

SEQ ID NO: 68494 - protein, 363 aa, Unknown
  Obtained from environmental sample
  DOMAIN (9)...(277): Aldo/keto reductase family
  misc_feature (1)..(363): Xaa is any amino acid
MLMEYREYGKTGKKVSLLGFGGMRFANVDDHDECIRMMVTAAEGGVNYFDTAPGYFETRSEAAYGKGFAELRRRKLPYYCATKTFATTEHDIRKELETQLRRMDIQAVDFYHIWCITTLDNWQARKKSGVLETFRKLKEEGLIRHICVSSHLIRDDIKELLLEGVFEGVLFGYSAYNFKTRQAAFDAIREKKLGAVVMNPLGGGLIPRHPERFDFLKREEGEDTVAAALRFLWDHKEISVTLVGFDTLKHVKQALDAMEGYKPRTEAELASLKESVHASLEGICTGCAYCDNCPQNIPIPMFMDAYNQKIFCEPDKQDPIGDRLKWHWNLERSVAGTCVACGNCEKACTQHINIIERLKEIAG

SEQ ID NO: 68495 - DNA, 480 bp, Unknown
  Obtained from environmental sample
  misc_feature (1)..(480): n is a, c, g, or t
atggataaaataggaaactgctctgacgccggagaccgggagaagctctgtaacgaggctgcggcatcacattccgcgctcatacgcaaggtacgggatatatgcgattttctggttctgccggattttcgctttcagggccttagtgaggcattacggcggctctgctttgattacggaaaacgcaccggaattgactgccgtatcgacattgcgaagaacttgatgctgggcagcctgagcgaagaaaagcagcttcaaatttttcgcatagtacaggaagctttaacgaatgtggagaaacactccagcgccacggaggcgattgttataatgcattccggttccgataaaagtctttttgacggtatctcagatgacggcaagggctttatgccgcatacagaccgcgctcaaattgggcgcttccggttacattcccaaaaccgggagcaaggccgaattgttaagggccattga

SEQ ID NO: 68496 - protein, 159 aa, Unknown
  Obtained from environmental sample
  misc_feature (1)..(159): Xaa is any amino acid
MDKIGNCSDAGDREKLCNEAAASHSALIRKVRDICDFLVLPDFRFQGLSEALRRLCFDYGKRTGIDCRIDIAKNLMLGSLSEEKQLQIFRIVQEALTNVEKHSSATEAIVIMHSGSDKSLFDGISDDGKGFMPHTDRAQIGRFRLHSQNREQGRIVKGH

SEQ ID NO: 68497 - DNA, 2244 bp, Unknown
  Obtained from environmental sample
  misc_feature (1)..(2244): n is a, c, g, or t
ttgtctatctatactacgccgacagcgttaagcaccactatcggggacttaacatcaggcgtacatatagaccccgtcaacgagaggccgctacaggtcggcgacttggctatctctacccatgagggcagcaaggggactcttggaatcataaccgagatcctgctggagactacccaagacatagccaccgtaaacgcccctgaaaataacatttacacgggcatagctgcaggcggcggggtgacgcttgccgtctctaggaacgggacgcacaagatcatgcgctctacagactacggtaggagttgggcccctgttaccgtggggcttccggggacgactaactccgcgtggaggaacgtagcctacggagacggtacttttgtagccgtttctaatgcagggacagttagagcgatggtgtctcaggacgggctagattggcatcccacaacgggctttgacaatacaaaagaatggttgaaagtagcctacggtgacggtgtttttgtagcgatagactacactggagaaattcaccgtagcgtaccgcctgggacgtttaattggcagttaggttgggaggacacggtacatcctactgtaaacgcggtagagacgataggctacggaaacggcgtctttgtagcgactgcgagagtaggtaatccgtcgcgtcttgtaatactgcggtctacggacggcggtgcaaactggtcgttggtagaaacgaataccccgcataccgattggttatctactgatatcgcctacgggaaaggcgtctttttagttacgtgtaccgctttgggcagtaaccagccactgataatgcggtcaacagactacggcttgacgtggacttatcaagtgctcgcacagcatgattggctcgctgtagcttatggcgagggcgtgttttatgctacggcgggtagttactacgcaactgtcgacgctaaagtgcttcgttccgacgacttaggcatcacttggcaacccataactgacatgcctactaacggtgttgaaaacctgacttacgtcggtaaaggaacgtttgtcgggacgtcaagtctcaactcaaatgcagtatttgtgctgatcagtctccgttatggaatcaccgtgcggacggtgtcgaatttgctggacggcttagggggcggttgcgactgcgatgatactgtagattggggcgatataacaaatatcccttcatgggttgaacaaatccccttcggacgatgccgcattggtggtctttatgacgagaaattggtagacgtggggaattttacgctaaggataggggctgtcgtagcggtctggtttgaaagcgacaattacacccaacgaccactactcaacgtttcaggcacaggtgcgtttaggatactctacactacgtgggccgagggactgcttgcggctgacaccacccatctcttcatatttgaagggacatactggcgtttgctgaatccgtcacccaagtttgatttgccagtttttgcggagtgccgtacgggtggaggcgtaggtccaaaagtcgcgaccgttttctcttacaatccacaactaggtaaggggtcgaacgcgaacccaggcaatattgtcggagtggtttttgactacgtcaacacgcacggtgcccccggtcttaccataacccccggggggagctccctttcgatgaattatcgcgggacgtttgtcaagccaggaatgcttggtgcgggggtgttgcacttcttcatgcgtgcaagagatggttgggaactgcttaaccctgacaaagcctacacggaagccgaaatccgcgaattaataacggcagaggcgacggcaagagaaagtgcggatgacgctctaaacaaccgtatagacaccttagaaagtggaggcggaggcgactacctgcccttagcaggaggcaccatgacaggccctatcgcgttcgacgaccccaacgatatgcacttcacgactccagtaaacgtaagcggtcagcttacggcaacagggaccgtcagcggaagggacttgactgggatgacgcttaacgtctctcgactacacgttggcgctatgagcaattcaggtattaccataggcgactggggtatatttgtgaatgccgtatcaggcgggacgtctactgaattatcgttccgtcaatttgacggcagtgcttgggtagagaagaagaaactacttcctaacgggaattgggcgtag

SEQ ID NO: 68498 - protein, 747 aa, Unknown
  Obtained from environmental sample
  misc_feature (1)..(747): Xaa is any amino acid
MSIYTTPTALSTTIGDLTSGVHIDPVNERPLQVGDLAISTHEGSKGTLGIITEILLETTQDIATVNAPENNIYTGIAAGGGVTLAVSRNGTHKIMRSTDYGRSWAPVTVGLPGTTNSAWRNVAYGDGTFVAVSNAGTVRAMVSQDGLDWHPTTGFDNTKEWLKVAYGDGVFVAIDYTGEIHRSVPPGTFNWQLGWEDTVHPTVNAVETIGYGNGVFVATARVGNPSRLVILRSTDGGANWSLVETNTPHTDWLSTDIAYGKGVFLVTCTALGSNQPLIMRSTDYGLTWTYQVLAQHDWLAVAYGEGVFYATAGSYYATVDAKVLRSDDLGITWQPITDMPTNGVENLTYVGKGTFVGTSSLNSNAVFVLISLRYGITVRTVSNLLDGLGGGCDCDDTVDWGDITNIPSWVEQIPFGRCRIGGLYDEKLVDVGNFTLRIGAVVAVWFESDNYTQRPLLNVSGTGAFRILYTTWAEGLLAADTTHLFIFEGTYWRLLNPSPKFDLPVFAECRTGGGVGPKVATVFSYNPQLGKGSNANPGNIVGVVFDYVNTHGAPGLTITPGGSSLSMNYRGTFVKPGMLGAGVLHFFMRARDGWELLNPDKAYTEAEIRELITAEATARESADDALNNRIDTLESGGGGDYLPLAGGTMTGPIAFDDPNDMHFTTPVNVSGQLTATGTVSGRDLTGMTLNVSRLHVGAMSNSGITIGDWGIFVNAVSGGTSTELSFRQFDGSAWVEKKKLLPNGNWA

SEQ ID NO: 68499 - DNA, 1287 bp, Unknown
  Obtained from environmental sample
  misc_feature (1)..(1287): n is a, c, g, or t
ttggccgagcatagacatacagaacggcaaagtcgttcagttaaactaggcgaggagctggtattacagcgtgaaaattctcttgaactggcgtcagaatttgaccgttacggcgaagtcgctgttatagacctcgacgccgcgatggggaagggaagcaacctcgaaatgataaaaccgctcttgcggagagccgagtgcagggtaggcggcggcatcagaacgccccagcaggcgcaggaactggtcagccttggagcgcgaaaaataattatcgggtcaggcgcttttcgcattcccgaaaaaaaaggcgccgggatcgcgggcggtgagttcgcggtaaatatccccttcctcgaagccatgtcaagaaaaatagggcgtgagcgtttaatagttgcagtagacgcgcgcaacggagaagttgttgtagacggctggaaaacccacacaggtcttaatattgtagaagcggcaagacaggttgagtcttttgcgggcgaattgctttttacctgcgtcgagcgtgagggcacaatgtccggtcttgatattgctccggcgctaagattacgcgagttggtttcatgtaaagttaccgtcgcgggcggcgtttcaaccttagctgaagttgaagaaatcgccgccataggctgtgatatacagcttggtatggcgctttacaccggaaaaataaatctggcggacgcctttgtcctgtctcttaattgggagaaagatcaaaatgccctcctccccgtaatcgtccagtccacggacggacaggtaatgatgacaggctttaccgacaggcaggcgttagccgaaacttttaaacgcggcaatgtctgtttccacagccgcacccgcaacagactctggatgaaaggcgaaaattcccggcacgtgttaaaacttgtcaagttgagagccgattgcgacagagacgcgttgctggcgacagcggaacccgcaggtcccgtctgccatacaggagcgtggtcatgttttgccactaacagagattatacattgcaatttttgcagaatataataaaggagcgttttcgcaaccctgcgcccggttcgtatacagccacacttgacgacgatcttgtgcgtgaaaaagtcatggaagaggcgcaagagttatgcgacgcaaaaacccgtgatgaaattatctgggaagccgctgatcttctttatttttctaccgtattgatgacaagagccggagtaaccgttcaggaaatacttgacgagcttgatcggaggcacaaaaagtaa

SEQ ID NO: 68500 - protein, 428 aa, Unknown
  Obtained from environmental sample
  DOMAIN (265)...(339): Phosphoribosyl-AMP cyclohydrolase
  misc_feature (1)..(428): Xaa is any amino acid
MAEHRHTERQSRSVKLGEELVLQRENSLELASEFDRYGEVAVIDLDAAMGKGSNLEMIKPLLRRAECRVGGGIRTPQQAQELVSLGARKIIIGSGAFRIPEKKGAGIAGGEFAVNIPFLEAMSRKIGRERLIVAVDARNGEVVVDGWKTHTGLNIVEAARQVESFAGELLFTCVEREGTMSGLDIAPALRLRELVSCKVTVAGGVSTLAEVEEIAAIGCDIQLGMALYTGKINLADAFVLSLNWEKDQNALLPVIVQSTDGQVMMTGFTDRQALAETFKRGNVCFHSRTRNRLWMKGENSRHVLKLVKLRADCDRDALLATAEPAGPVCHTGAWSCFATNRDYTLQFLQNIIKERFRNPAPGSYTATLDDDLVREKVMEEAQELCDAKTRDEIIWEAADLLYFSTVLMTRAGVTVQEILDELDRRHKK

SEQ ID NO: 68501 - DNA, 1095 bp, Unknown
  Obtained from environmental sample
  misc_feature (1)..(1095): n is a, c, g, or t
atgagcgatttttggaacagccgaataaaaaaactttctccgtatacccccggcgaacaacctaaggacaggcagataattaaacttaacaccaacgaaaacccctatcctgtttctcccaaagttatagaagcgattaaaaacgccgcagacgagcgtcttcgcctgtatcccgatcctgaatgtacggcgttccgtgaagccgccgccgtccgttacggcgtaagagagcaggaagtttttgcaggtaacggctccgatgaaattttagcgttcgctttcggcgctttttttgaaagcggcgaaaaagcggcgcagatactttttcccgacatcacctacagtttttatcctgtttacgctaagctttgggaaatatcgtaccgtacaatcgctcttacgcaagatttttcaattaacataaaagattataaaaccccttgcggcggcgtaatatttcccaacccaaacgccccaacagcggtcgccctgccgttagacgatattctgtctcttgccgaataccttgaaaaacaaggaaaaatccttattgttgacgaagcctacatagcgttttcaggttcaagcgatgtaaaatcggcagttggctccataaaaaatcaccctaatctgttaaccgtgcatacaatgtcaaaatccgcttctcttgccggtttgcgttttggtttcgccgtcggcaatgaaaagttaatcgaaggtctttgcagaatacgcgattcgtttaattcctacaccgtcgattttcttgctcttgcgggagcaacggcggcagtctccgatgcggcgtattacgaagaaattaaccgccgtgttattgccacacgggaacggacagcggaagctttgcgcaatcttgggtttacagttctgccgtcgtcggctaatttcctatttgtaaagcctcccaatatcggcggcgctgaatttttcgccgcgttaagaagcaggaatattctggtacggcatttcaacaaagacagaattgcggactttttgcgtatcagtatcggaacagacgctgacatggataaagttcttgaggcggcaaaagatatattaaaaggtggaaaatga

SEQ ID NO: 68502 - protein, 364 aa, Unknown
  Obtained from environmental sample
  DOMAIN (24)...(356): Aminotransferase class I and II
  misc_feature (1)..(364): Xaa is any amino acid
MSDFWNSRIKKLSPYTPGEQPKDRQIIKLNTNENPYPVSPKVIEAIKNAADERLRLYPDPECTAFREAAAVRYGVREQEVFAGNGSDEILAFAFGAFFESGEKAAQILFPDITYSFYPVYAKLWEISYRTIALTQDFSINIKDYKTPCGGVIFPNPNAPTAVALPLDDILSLAEYLEKQGKILIVDEAYIAFSGSSDVKSAVGSIKNHPNLLTVHTMSKSASLAGLRFGFAVGNEKLIEGLCRIRDSFNSYTVDFLALAGATAAVSDAAYYEEINRRVIATRERTAEALRNLGFTVLPSSANFLFVKPPNIGGAEFFAALRSRNILVRHFNKDRIADFLRISIGTDADMDKVLEAAKDILKGGK

SEQ ID NO: 68503 - DNA, 1323 bp, Unknown
  Obtained from environmental sample
  misc_feature (1)..(1323): n is a, c, g, or t
atgaaaataattgaaagcgtaaatttcgattcctattggaagaacgaaacaaaacgctccgaagatacaaagacggaaaaagccgtcaaaaatataatagcggaagtacgagcgaaaggagacgccgctgtcagaaaattcgcgtccaaattcgacaaatcttctccgcagaaacttgaagtccccctctccgaagcaaaacacgctcttgaacagttacgcgcaaatgaaccgtctcttgcccaagcgcttgaactttccgcaaagcacataaaacgcttttcggaaaaacaacgggaacaatttgccgattttgaatttgaaatggagcaggggcttgttactggtcagcggatacttcccgttgaaagagcggcggtttatgttcccggcggacgcttccccctgttttcatcagtccttatgtgcatgatccccgcgttttgcgcaggcgtggaagaagtgatattttcatcacctccgacgcaagacggtctgcccgataaaaaaatactcgccgccgccgcaatcgccgctgaaattgttaatagtaataatattcgcattttcgctataggcggcgcacaggcaatagcagctcttgcgcttggcacggaatccgttcctcgcgttgacgttatcgccggacccggcaacaaatttgtcgctgccgccaagcggatactattcggcgaagtagggatcgattttatcgcgggacccaccgatgtactggttatcactgacgacnaagacggcgatattgaaaaaacagccgatcttgccgcggcggatatgctaagtcaggcggagcatgatccggacgcgcgagcaagggcattagttcccaacaaagagcttgccgaaaaaattgccgcggctgcagagagaaggcttaaaactctgccaacggaaaaaaccgcccgagcttctttggatgcaggcggacttattattgtttatgaaacacaggaagacgcaatccgaatagccaacacaattgcgcctgaacatcttgaactccaaaccgccgacgctgacaattggattcccaaattgaaaaattatggttcgctttttacaggcgcgcttagcgcggaagtcctcggcgattattccgccggaataaaccacaccctgccgacaaaaacaagcgcccgttttacaggcggcctgtccgtgcgccactttttaaaaaccgtaacaacgctgcgctgcgccaaaggcgaaggctttgaaaaagcgcgtaacgccgctgaaacgctggcccgcgccgaaggattggaaggccacgcgcagagcgcggcggcaagaaaaaattaa

SEQ ID NO: 68504 - protein, 440 aa, Unknown
  Obtained from environmental sample
  DOMAIN (13)...(440): Histidinol dehydrogenase
  misc_feature (1)..(440): Xaa is any amino acid
MKIIESVNFDSYWKNETKRSEDTKTEKAVKNIIAEVRAKGDAAVRKFASKFDKSSPQKLEVPLSEAKHALEQLRANEPSLAQALELSAKHIKRFSEKQREQFADFEFEMEQGLVTGQRILPVERAAVYVPGGRFPLFSSVLMCMIPAFCAGVEEVIFSSPPTQDGLPDKKILAAAAIAAEIVNSNNIRIFAIGGAQAIAALALGTESVPRVDVIAGPGNKFVAAAKRILFGEVGIDFIAGPTDVLVITDDXDGDIEKTADLAAADMLSQAEHDPDARARALVPNKELAEKIAAAAERRLKTLPTEKTARASLDAGGLIIVYETQEDAIRIANTIAPEHLELQTADADNWIPKLKNYGSLFTGALSAEVLGDYSAGINHTLPTKTSARFTGGLSVRHFLKTVTTLRCAKGEGFEKARNAAETLARAEGLEGHAQSAAARKN

SEQ ID NO: 68505 - DNA, 918 bp, Unknown
  Obtained from environmental sample
  misc_feature (1)..(918): n is a, c, g, or t
ttgttttttctttgtgttctttgtgtactcagtgcctctgtgagagtctctttcgtgtatgctgcggaaaattcgctaagcttaacttctgaaattacccggctggaaaagcttggcgctagccttgtgtcttcacaggaacggcacaacgcttttttggctcttgccaggctttatcagctttcggggaataacgaggcggcccttaaagcctgggaaaacgcgcttaaaatcaacagcagcgacggacacgcgcttttggaaagggggcggcttttaatttctctgggggaatacgaaagggcacttgagcctttgacggcaattttttcaggcagctacagtaaagatcttctgcttgaggcccgctttctgattgcccagcttgaagcgtttcgttccggcaacttacgcccgcttaccgccctggttgacgaaagtgattttgccggataccgcccgtcaatttactataccctctggaaaattgaacaaaacccggcatggaagacccttcttaccaaagaatttccctcgagccctgaagcaaagattgccaatagtaccgcgcatcaaacccagacgccgctatggatactattccccggcagggaagatattggcttaaccagccccacgcagtcagcttcgccagtggcggcggccataccgactccggctcagcctcaggcggcaatcgggacggttcttcaggccggccttttcagccgggaagaatacgctcgcgctctttccgataaaataaacaaagccggcttccggagcattgttcaaataaagccgcaaaacaacgccacttactgggttgtctatgttccgtacggctccgacatgaacgcgatgattaaaaagctaaaagacgccggcttcgagtcgtttcctgtaacgctgaactaa

SEQ ID NO: 68506 - protein, 305 aa, Unknown
  Obtained from environmental sample
  SIGNAL (1)...(21)
  DOMAIN (49)...(82): Tetratricopeptide repeat
  misc_feature (1)..(305): Xaa is any amino acid
MFFLCVLCVLSASVRVSFVYAAENSLSLTSEITRLEKLGASLVSSQERHNAFLALARLYQLSGNNEAALKAWENALKINSSDGHALLERGRLLISLGEYERALEPLTAIFSGSYSKDLLLEARFLIAQLEAFRSGNLRPLTALVDESDFAGYRPSIYYTLWKIEQNPAWKTLLTKEFPSSPEAKIANSTAHQTQTPLWILFPGREDIGLTSPTQSASPVAAAIPTPAQPQAAIGTVLQAGLFSREEYARALSDKINKAGFRSIVQIKPQNNATYWVVYVPYGSDMNAMIKKLKDAGFESFPVTLN

SEQ ID NO: 68507 - DNA, 951 bp, Unknown
  Obtained from environmental sample
  misc_feature (1)..(951): n is a, c, g, or t
atggatttagaaatgctgcgcgagcgggcgcggattataaggcaggtacggtcgttttttgacgcgaagaattatcttgaagttgacacgccccttttgtcgcctgacttgattccagaatcctgccttgaggtttttgaaacaaaacgcgtaacgccgggaagcggtgttaccccttattggctgatcccgtcgcctgaaatctggatgaaaaaaattatcgcaaaatactatacaaatgtttatcaaatttgcaaatgtttccgcaacggggagtcctccggctttctccacagccctgaattcaccatgctggaatattacactatgaacgctgactacatggattcgctcgcgctgacggaggaactattccgcaatctttcaggcccttcgccccttggccttcccttcgagcgcgtaacagtggccgaggctttttcccgttacgccggttttgaccttttcgccgcggtggaaactgttggcggactggaaaatgaagcccgcaggctcggccttgacccggtgcgggggcaaaacatcgacgcgttatacgatctgatttttatccacgcggtggaaccgaatctcaaacaggaccatgtaatagccctgctggactacccttgttttgtcccgaccctggcgaaaaaaagcgccgacaacaaaaccgtggaacgctgggaactgtattacaacggcatagagcttgccaactgttattccgaggagacggatccgcggcgcgtgcgtgagttttttgaaagcgaagctgcggcaaaagaacggcaggcaatggttaaacatgcggtagaccatgattattggaaaatattcgaaaagcctggtttccccgcctgttccggagcggcccttgggcttgaccgcctgataatggccgtttgcgggcgggcaaacattgacggcgtgttacccttcccggcttag

SEQ ID NO: 68508 - protein, 316 aa, Unknown
  Obtained from environmental sample
  DOMAIN (1)...(316): tRNA synthetases class II (D, K and N)
  misc_feature (1)..(316): Xaa is any amino acid
MDLEMLRERARIIRQVRSFFDAKNYLEVDTPLLSPDLIPESCLEVFETKRVTPGSGVTPYWLIPSPEIWMKKIIAKYYTNVYQICKCFRNGESSGFLHSPEFTMLEYYTMNADYMDSLALTEELFRNLSGPSPLGLPFERVTVAEAFSRYAGFDLFAAVETVGGLENEARRLGLDPVRGQNIDALYDLIFIHAVEPNLKQDHVIALLDYPCFVPTLAKKSADNKTVERWELYYNGIELANCYSEETDPRRVREFFESEAAAKERQAMVKHAVDHDYWKIFEKPGFPACSGAALGLDRLIMAVCGRANIDGVLPFPA

SEQ ID NO: 68509 - DNA, 315 bp, Unknown
  Obtained from environmental sample
  misc_feature (1)..(315): n is a, c, g, or t
atggcaagaagaaatgtagtccgtcatatcgattcggtaattggcgaaattataaagatactggataaaaaaaacggtgtaatcaaagttatggcggaatacgcctttgagcctgaaaaagattttacatccaaattaaaagaatcaataaaaaaacagaccggcgcggcaagtgtggaattaacagggcaggtaaatacggaacttctcgggggatacaggctaaagataggggatgagacaattgacgccagtgtccgccgtcaattgatgaaaatggaagcctgtctgaccgccgcggatggaggaagttaa

SEQ ID NO: 68510 - protein, 104 aa, Unknown
  Obtained from environmental sample
  misc_feature (1)..(104): Xaa is any amino acid
MARRNVVRHIDSVIGEIIKILDKKNGVIKVMAEYAFEPEKDFTSKLKESIKKQTGAASVELTGQVNTELLGGYRLKIGDETIDASVRRQLMKMEACLTAADGGS

SEQ ID NO: 68511 - DNA, 1506 bp, Unknown
  Obtained from environmental sample
  misc_feature (1)..(1506): n is a, c, g, or t
atggcaaattacggagatttgaccagggtcctggaagaacaaataaaaaactggaacagtacagccgtaaacgagacaacgggattggtggtacaggcgggatacggagttgtaaccgtacacggactttccagggcaatttacggggaacttctggaatttgcttccggagctgccggtatcgcccttaaccttgaagaaaacggagttggatgcgttttactttcgggggaagacggagtaaaggacggagaagaagttaagggcacaggacgagtggcgtccgtgccgtcaggcgattccttgattggcagggtgttaaacccgcttggcgaacccatagacggtaaagggccaatccaggctgacgaatggctgccggttgaagccccggcggcaccggtgatagaacgcggcactgtggatacgcccatgcagaccggcatcctttcggtagactcaatgatccccatcggacgcggacagagagaacttataataggcgacaggcagaccggcaaaaccgccctcgccatcgacgccattgtcaaccaaaaggacaagggcatgtattgcgtttactgcgccatcggtcaaaagtcatcgtctgttgccgcgattataaaaaatctggaaaaagccggagccctagattatacctttgtggtacttgcttcggcttcggattcggcggcacttcaatacctggccccttattcggcggtagcaatggccgaacactttatgcataaaggcaaggatgtacttgtcgtttacgatgacctttctaaacacgcggtggcataccgggccataagccttcttttgcgcagaccgccgggccgtgaggcttttccgggcgacgtgttctacctgcactccaggcttttggaaagggcggcaaagctttcgccggcgaggggcggcggttccattaccgccctgccaatcgtggaaacccaggccggagatatttcgtcttatattcccaccaacgtaatttcaataacagacgggcagatctttttggacacggagctttttaattccggtttccgtccggccattgatgtcggcctttcggtcagccgggttgggggttcggcgcagtttaaagccattcgcaaaatagcgggcaggctcaggctggatttggcgcaatacagggagatggcggcctttgcccagttcggaagcgatcttgacaaagcaacccagacaaaactggcccagggggaacggcttatggaagtactcaagcagctacagttctctccttatgatacggctcagcaatacattatcctctatacagctgtaaacggtcatcttatggatgtggcgacaaaagacatcccttcctttatcaaaggctttctggatcatatgaccataaacaatcagacaattttggtagaccttaataaaagcggcgaatcctctgttgaaacagatcaggtaataactgaagcccttgaaagttataaaaacgccaataagaagtaa

SEQ ID NO: 68512 - protein, 501 aa, Unknown
  Obtained from environmental sample
  DOMAIN (23)...(91): ATP synthase alpha/beta family, beta-barrel domain
  misc_feature (1)..(501): Xaa is any amino acid
MANYGDLTRVLEEQIKNWNSTAVNETTGLVVQAGYGVVTVHGLSRAIYGELLEFASGAAGIALNLEENGVGCVLLSGEDGVKDGEEVKGTGRVASVPSGDSLIGRVLNPLGEPIDGKGPIQADEWLPVEAPAAPVIERGTVDTPMQTGILSVDSMIPIGRGQRELIIGDRQTGKTALAIDAIVNQKDKGMYCVYCAIGQKSSSVAAIIKNLEKAGALDYTFVVLASASDSAALQYLAPYSAVAMAEHFMHKGKDVLVVYDDLSKHAVAYRAISLLLRRPPGREAFPGDVFYLHSRLLERAAKLSPARGGGSITALPIVETQAGDISSYIPTNVISITDGQIFLDTELFNSGFRPAIDVGLSVSRVGGSAQFKAIRKIAGRLRLDLAQYREMAAFAQFGSDLDKATQTKLAQGERLMEVLKQLQFSPYDTAQQYIILYTAVNGHLMDVATKDIPSFIKGFLDHMTINNQTILVDLNKSGESSVETDQVITEALESYKNANKK

SEQ ID NO: 68513 - DNA, 885 bp, Unknown
  Obtained from environmental sample
  misc_feature (1)..(885): n is a, c, g, or t
atggcgaatttaagggatgttcgcctcaggatgcgcgccattgggcagaccctgcaggtaacaaaggcgatgaatttaatctcaaccgcaaagctgcgaaaaggccgtcgcacactacaggatgtagaaccttttttcaacagaattcaaaagtcaatgtttgatatacttgcgggggccagaatggaaaaaagtaaattcctttttgcgaatgaaaaggaagaaacatcccgcaccgcaataatcgcgataaccagcgacaagggccttgcgggcggttacaacgcgaatattttcaggcaggtggacatgctttgtaaaagggttaagaaccctgttctcattttggttggcgcaatcggatacaggtactttatccattccccctggcttgtcatagaaaatttttcttttaaatccaggctgccggagctggatgaggcaaaagaaatcgccgactatattatttcccaattccaatggggtatttttgacgaagtccatatcgtttatacgcacatgtacagctccatcaagctcgttccgagggagaggcagattttgcctctcaatcctgaaagtatgcaggaagaatttgaaagaatcggtgggaagcggcagaagctccaatttgaatatgtgccttcgaaagaagaggtgtttgaggccctgattcccatgtatgtaaaaggtataatatacggttcccttgtgcagtcctatgtgagcgaacaaagcgcccgcatgtccgcaatggacgaggccagcaaaaacgccgaagaaatgctcgccagtttaaaaatacactataacagggccaggcaggcgggcattacccaggagatgacagaaattgtcggcggcgccgaagcgttgagcgaataa

SEQ ID NO: 68514 - protein, 294 aa, Unknown
  Obtained from environmental sample
  DOMAIN (2)...(292): ATP synthase
  misc_feature (1)..(294): Xaa is any amino acid
MANLRDVRLRMRAIGQTLQVTKAMNLISTAKLRKGRRTLQDVEPFFNRIQKSMFDILAGARMEKSKFLFANEKEETSRTAIIAITSDKGLAGGYNANIFRQVDMLCKRVKNPVLILVGAIGYRYFIHSPWLVIENFSFKSRLPELDEAKEIADYIISQFQWGIFDEVHIVYTHMYSSIKLVPRERQILPLNPESMQEEFERIGGKRQKLQFEYVPSKEEVFEALIPMYVKGIIYGSLVQSYVSEQSARMSAMDEASKNAEEMLASLKIHYNRARQAGITQEMTEIVGGAEALSE

SEQ ID NO: 68515 - DNA, 480 bp, Unknown
  Obtained from environmental sample
  misc_feature (1)..(480): n is a, c, g, or t
gtgttcggtggctatgttccggatcagctccatgatgagcacggttttaccaaccccggcgccgccgaaaagccctattttgccgcccttggcatacggagctataagatcaatgacctttatgccggtttcaaaaacttcggtcgccggcttctgatcggcaaagtccggtgcgcttcgatgaatggaagcgtactgtttggcgttgaaagtccctttatcgtcaatggatttgcccgttacattgaacatccttcccagaatttcatcgcctaccggaacctgaatcgggtgtcctgtgtcgcttacttccataccgcgggaaagcccttccgttgcttccatggcgacgcagcggacacggtgatcaccaatgtgctgcagaacctccagcacaaccttcctgtcaccgccggatctgctatccgcttttacctccagggcgttaagaattccgggaacggattccgtgccgcctga

SEQ ID NO: 68516 - protein, 159 aa, Unknown
  Obtained from environmental sample
  misc_feature (1)..(159): Xaa is any amino acid
MFGGYVPDQLHDEHGFTNPGAAEKPYFAALGIRSYKINDLYAGFKNFGRRLLIGKVRCASMNGSVLFGVESPFIVNGFARYIEHPSQNFIAYRNLNRVSCVAYFHTAGKPFRCFHGDAADTVITNVLQNLQHNLPVTAGSAIRFYLQGVKNSGNGFRAA

SEQ ID NO: 68517 - DNA, 1335 bp, Unknown
  Obtained from environmental sample
  misc_feature (1)..(1335): n is a, c, g, or t
ttgacaaanacgctaacaaaggaaaaaaacgtgatcaagatagaggctactacggaaactatagaaagtaaaggcggactgatccttgccgggaaaatcgcgaagaaagccgggcttggggccataaagagcctgattgtaaagaacgcaggaattattatagccggcgtgttcggcctattggtagaaggaaaaagcgactttgaaagcatgggggaaaaacgggggagcctgtttttcaaagaggcgcttgggctgccttacgtgtacgcgaaagaaacagtaaggctttacctggggaagatggcggaagacgccgacgggattatcgaacagttaagggaaagctcatcaaagataatacgccaggcgccgctgcacgggctttggatacaagggaaacactatcttcctgtggatgtggacactacagcaatggacaactcgaagacaaagaaagaaggggtgagccggacgtaccaggggttcgacgggtttcatccgataatggcgtatgtagggaaagaagggtacctgctggacttggaattgcggcccggcagccagcactgccagaaagggacggcagcatttattgaaaggttaaatgcgcgccttgggggcataaaatcaggcgggcgtttattgttccgcctggacagcggcaacgattctttcgatacccttaaagccgtgacagggaaagggcgttattgcgtcataaaacggaacaaacgaagggagaacgacgaaaaatggcttaaaagggctaaacggcacgggaaacgggttgtgtccaggaaagggaaaaaagtctggataggaaccgtgcggatgcaccccaagagaaaaggcgaagtccttgaggaggtcatatgcgtgttcgaggttatagagcggaagaccgacagccaggggaaccggtatttatttcccgaaatagaggtaaacagctggtggactaaccttgcctgcggggcggaaaaagttatagaactatatcgtggccatgccacaagcgagcagtttcacagcgaattgaaaagcgacatgggagttgaaaggctgccgtccgggaagtttgcggtaaacaaaatagtgctggcagtggcgatgaatgcttataacgcgctgaagatgcttggccaaaaatccatggagaagggaaacggcaaaaaagtgaaacgcaagcggctggggaaggtaatccgcgatttgatatgcgttgcggggaaattagtaaagcatggcagggaactgatattcaaaattaacgagaaagatcctgtgctgcctgtgtttttgcggttgaatgctgcgttggactgttcgtag

SEQ ID NO: 68518 - protein, 444 aa, Unknown
  Obtained from environmental sample
  DOMAIN (138)...(377): Transposase DDE domain
  misc_feature (1)..(444): Xaa is any amino acid
MTXTLTKEKNVIKIEATTETIESKGGLILAGKIAKKAGLGAIKSLIVKNAGIIIAGVFGLLVEGKSDFESMGEKRGSLFFKEALGLPYVYAKETVRLYLGKMAEDADGIIEQLRESSSKIIRQAPLHGLWIQGKHYLPVDVDTTAMDNSKTKKEGVSRTYQGFDGFHPIMAYVGKEGYLLDLELRPGSQHCQKGTAAFIERLNARLGGIKSGGRLLFRLDSGNDSFDTLKAVTGKGRYCVIKRNKRRENDEKWLKRAKRHGKRVVSRKGKKVWIGTVRMHPKRKGEVLEEVICVFEVIERKTDSQGNRYLFPEIEVNSWWTNLACGAEKVIELYRGHATSEQFHSELKSDMGVERLPSGKFAVNKIVLAVAMNAYNALKMLGQKSMEKGNGKKVKRKRLGKVIRDLICVAGKLVKHGRELIFKINEKDPVLPVFLRLNAALDCS

SEQ ID NO: 68519 - DNA, 1353 bp, Unknown
  Obtained from environmental sample
  misc_feature (1)..(1353): n is a, c, g, or t
ttggatttagtccttatcattgaccgaagcggctcaatgacgggtacggaacgcggtattatcttggggcaccaaaggataattgacgctttaaagaaaaccggcaaaaatgttacgttaacgactattttttttgatgatgatattgtcattgaatgtgacggcaaacgcgtcctcattgatgaaataaaaaaaataaaatataaacccgacggaaccaccgccctttttgacgcttggggcgcctcaatcacccatgtaaacgagcgcaaaaaagacaagaataatccctaccccaacgccgatgttttgtatcttacggtaacagacggcgaagaaaactccagtaccgtatttgacatgccaaaaatcagaaacctgatgatgagggaaagggagcgttccaatgaaggacacggcgtaagggaatttgccactgtgcgtgaattcggtattgattatgaacaatttgtgaaggacgccaaactcggtcaaaataaaactcaaattttctatcgctcagacgcgggtattgaagtattgttcaagattattgaactggcggctgacaatatgattcaaaaccgtcaaattaccgggcaatggatagagcaaagcgacaaactgaaaattggcagttatactctggctcaattaaagaaaatgacaaaagaacctgaaaaagtgttggcaagattggaaaaaacatacatggaattattaaggattgcggataatggcttaacaagtgaattttgggcggcttatgcgcaatacggcaaagaattagaaaaattgaagctgcatacgggggacgccgaggttgatcacattcttaaattgtacataggaaaacaaggcgcaaatcaaaaagaagttttacaatacgcgaaaaataaaaccgttgaaaaagccgccatacaaagcgggttaaacctggggaaaatcagaaaaattgccgatagcaaactggcaacagactgggagctttatgacgctattaaggtgtataatgaaagcgttaataaactcgaactggttccagcgttaaacgtacaccttaacgatataagaatcattaattatatatctgacattatcgagaggcaaaaagaaagatatgaagaaattatttcaaccgctttcaagcggcgtactgaattactaaaaaaagcatttggcgcggaagatattaagacttttcggttgctggcatggttcacacgggaaccccttttttctttgattaaggatttccccgattataaagaattttgcaaatgggctgacacgttagatggggaaattctctcccgatctaaagacgaagattctcaaacacatagcccgtaa

SEQ ID NO: 68520 - protein, 450 aa, Unknown
  Obtained from environmental sample
  misc_feature (1)..(450): Xaa is any amino acid
MDLVLIIDRSGSMTGTERGIILGHQRIIDALKKTGKNVTLTTIFFDDDIVIECDGKRVLIDEIKKIKYKPDGTTALFDAWGASITHVNERKKDKNNPYPNADVLYLTVTDGEENSSTVFDMPKIRNLMMRERERSNEGHGVREFATVREFGIDYEQFVKDAKLGQNKTQIFYRSDAGIEVLFKIIELAADNMIQNRQITGQWIEQSDKLKIGSYTLAQLKKMTKEPEKVLARLEKTYMELLRIADNGLTSEFWAAYAQYGKELEKLKLHTGDAEVDHILKLYIGKQGANQKEVLQYAKNKTVEKAAIQSGLNLGKIRKIADSKLATDWELYDAIKVYNESVNKLELVPALNVHLNDIRIINYISDIIERQKERYEEIISTAFKRRTELLKKAFGAEDIKTFRLLAWFTREPLFSLIKDFPDYKEFCKWADTLDGEILSRSKDEDSQTHSP

SEQ ID NO: 68521 - DNA, 1821 bp, Unknown
  Obtained from environmental sample
  misc_feature (1)..(1821): n is a, c, g, or t
ttggccgagcggcacgagaccctcgacgcgtcgctgctcaccgagttcatagccgaggcgcaggagcacttcgcgaacgccgacgcggcgttgctcaggcttgaggtcacccccgccgacgtcgacatcataaacgagttattccgcgtcttccatactataaagggcgttgccggtttcctgtcgctcgacgccatacaggcgctcgcgcacgccacagagagcctcatggacaaggcgcgcgagaaggttttcgtgctcaacagcgcggccatagacctcatattctccaccgtggacaccctgaagaaagaggtggagtcgctcaccctggcgctcgaaaacaatacggcgtacgtggtccaagagatcatggaccagatcatatcctccgtgcacgccatgaacgaaagcctgctcaccaacaaacccatgcctaagctgggcgagatattgataaaagacggcaaagtttcgccggaggaagtggagtccgtcctgcacgagcaggagcgcaggcccggcacaaagatgggcgagatattggtcgagcgcggcgcggtcgcacccaccgacatttcgcaggctctcgaaaagcagggcaccgccgttactaagggcccggtcatcatcaaggagagcgtgaaggtcgacaccgataaactcgacaaactcgtcgacatgatcggcgagctggtcataacggaatctatggtgaccggcggtctcgcggggaaggatttgcagagcacgcgccttggcgtcaacgcccgacagctcacgaagatcacgcggcagctgcaggagatcgggctttcaatgcgcatgatgtccctcaaagccaccttcaacaagatggcgcgccttgtgcgcgacctagcgaggaaggccgacaaggagatcgcgtttgtgagcgagggtgaggacaccgagctggacaagtctgtaatagagcatatatccgacccgcttgtgcacatgatccgcaactccgccgaccacgggctggagcatcccgacgaacgcgaggcggtcggtaagtcgcgtaccggtacaattacgctaagggcctaccaaaagggcggctctatctgcgtcgaagtgcaggacgacggcaaaggcctcgaccgcgacgccatattcaaaaaggctgtggagaagggtttattagctcccgacgcgcagctgtccgacgccgagatccaccacatgatattcgcccccggtttttcaaccgcggcccaagtgaccgacatctcaggccgcggcgtgggtatggacgtggtcaagaagaatgttgagtcgctgcgcggacgcatagagataaatactaagccgggtcagggcaccacgttcgtcatccacctgccgcttacgctggcgatcatggacggcatgatagtctgcgccggggacgaacgctacatactccccacattctcggttgtggaaaacttcaaaccggcgaagaccgacctgacggacgttatgggcacccagaagatggtgatgtgccacggccagttgttgccgctctacagtttggcggaggttatgggcaagaagaacaccatatccatagataatggaatagtgatggtggtcgaggacgccggcaaacgtaccggcctgttggtagacaaaatcataggccagcagcagacggttatcaagaagcttggcgaaggcgtaggaaagatagacggcgtttccggcggcgcgatcatgccggacggcaaggtcagcctgatcatagacgtcgccgaaactgtaaagttggctatgaggagcggaagtacaatagaagatcccgagaattga

SEQ ID NO: 68522 - protein, 606 aa, Unknown
  Obtained from environmental sample
  DOMAIN (212)...(274): Signal transducing histidine kinase, homodimeric domain
  misc_feature (1)..(606): Xaa is any amino acid
MAERHETLDASLLTEFIAEAQEHFANADAALLRLEVTPADVDIINELFRVFHTIKGVAGFLSLDAIQALAHATESLMDKAREKVFVLNSAAIDLIFSTVDTLKKEVESLTLALENNTAYVVQEIMDQIISSVHAMNESLLTNKPMPKLGEILIKDGKVSPEEVESVLHEQERRPGTKMGEILVERGAVAPTDISQALEKQGTAVTKGPVIIKESVKVDTDKLDKLVDMIGELVITESMVTGGLAGKDLQSTRLGVNARQLTKITRQLQEIGLSMRMMSLKATFNKMARLVRDLARKADKEIAFVSEGEDTELDKSVIEHISDPLVHMIRNSADHGLEHPDEREAVGKSRTGTITLRAYQKGGSICVEVQDDGKGLDRDAIFKKAVEKGLLAPDAQLSDAEIHHMIFAPGFSTAAQVTDISGRGVGMDVVKKNVESLRGRIEINTKPGQGTTFVIHLPLTLAIMDGMIVCAGDERYILPTFSVVENFKPAKTDLTDVMGTQKMVMCHGQLLPLYSLAEVMGKKNTISIDNGIVMVVEDAGKRTGLLVDKIIGQQQTVIKKLGEGVGKIDGVSGGAIMPDGKVSLIIDVAETVKLAMRSGSTIEDPEN

SEQ ID NO: 68523 - DNA, 474 bp, Unknown
  Obtained from environmental sample
  misc_feature (1)..(474): n is a, c, g, or t
atgggggagctacagcacctgttagaacggggttgcatctacatcgcgaccggcgaaggcgccgttcagacggtgttagggagttgcgtctccgtgtgcctgtgggatccggaagcccattgcggcgggatgaaccacttcatatacccgcagaccatgcgtaaagatcaagccacgcccaagtacggtaacgtggccactatggcgctgataaagctgatgtgcgaagagggttgcagcataggcagcctgaccgcccatataataggaggcggccaccccgatggcgcgatggacagcaccggcatgcgcaacgttgaggtagccaggaaggttttgaacgaaaagggcataacgataatgtccgaagacgtgggcggcagggtaggccgcaaggtcgttttcgatttatcaacggggcaggtggcggtattgaaggtgacgaagctgcgggccgaggattggattaattga

SEQ ID NO: 68524 - protein, 157 aa, Unknown
  Obtained from environmental sample
  DOMAIN (37)...(156): CheD
  misc_feature (1)..(157): Xaa is any amino acid
MGELQHLLERGCIYIATGEGAVQTVLGSCVSVCLWDPEAHCGGMNHFIYPQTMRKDQATPKYGNVATMALIKLMCEEGCSIGSLTAHIIGGGHPDGAMDSTGMRNVEVARKVLNEKGITIMSEDVGGRVGRKVVFDLSTGQVAVLKVTKLRAEDWIN

SEQ ID NO: 68525 - DNA, 813 bp, Unknown
  Obtained from environmental sample
  misc_feature (1)..(813): n is a, c, g, or t
atggaaatggacatgaagacgttcgatgcgtttcgcaagctgatctacgacaagagcggcatcactctcggtgaaggcaaggaggcgcttgtttcagctcgcgtgggcaagcggttgcgcgctcttgggtacgatagttacaaggaatacctgcaatttctcaccggcgatggcgaggcgtcggaggcggagtttattgagtttctcgatgtgatctccacgaacgtcacctctttcttccgtgagaacgaccacttcgttttcatggcggatttcgtgaagaagatggtggcggaagggcaaaacagggtgcgtatctggtgcgcggccagctccagcggcgaggagccgtatacgctcgccatgactttcctcgaaaacgcccaaggcttccgcggagagtgcaagatactggccaccgacatatcaactcatatattggcgaaggcgaggaagggagagtattccgagtcgaagatgaacggggtcaacccgcagttgcgcgccaggtacttcaccgtccaggggtcgggatcgaacaaggtatataccgtgaacgacacgcttgcgggcatgattacgtttaaaaggctgaacctgtcgaagccgcccttccccatgaaaggcccgtttgacctcatcttctgccgtaacgtgatgatatatttcgacaatatagtcaggaagaggctcatggacgagttctctaggttgttgcggccgggcggctacctgatggtgggccactcggagagtatggcgggcatgctgtgcgacatggaaaccgtgcaaccgtcggtgtacgtaaaataa

SEQ ID NO: 68526 - protein, 270 aa, Unknown
  Obtained from environmental sample
  DOMAIN (174)...(247): Methyltransferase domain
  misc_feature (1)..(270): Xaa is any amino acid
MEMDMKTFDAFRKLIYDKSGITLGEGKEALVSARVGKRLRALGYDSYKEYLQFLTGDGEASEAEFIEFLDVISTNVTSFFRENDHFVFMADFVKKMVAEGQNRVRIWCAASSSGEEPYTLAMTFLENAQGFRGECKILATDISTHILAKARKGEYSESKMNGVNPQLRARYFTVQGSGSNKVYTVNDTLAGMITFKRLNLSKPPFPMKGPFDLIFCRNVMIYFDNIVRKRLMDEFSRLLRPGGYLMVGHSESMAGMLCDMETVQPSVYVK

SEQ ID NO: 68527 - DNA, 504 bp, Unknown
  Obtained from environmental sample
  misc_feature (1)..(504): n is a, c, g, or t
ttgactttatcggatgataagatgagcaatataactgtcggcatatcggattgggcgttgaccaagaacgcggatgatacgatcatcacgtattctttggggtcgtgcttgggggtgaccgtctatgacgcgggagcgcatatcggcgggatggttcactgccagttgccgaactgttcgaccgaagacaaaaccaaggccaagcagaatccggcgatgtttgtggataccggggtttcgttgcttttccagaaattttttgaggccggcggccaaaagtcgcgtatggtggtaaaggcggcaggttgcgccgcgattttggatcagaacggctttttcaggataggtgaacgtaacgtcacgcttttccgcaagttgctgtggaagaacgggatattactgaacggttcggaggtgggcggcgatgtttcccgtacgctcgtcctcgacatggctacgggaagaacactaatccgctctaaaggcgaagagagagaaatttag

SEQ ID NO: 68528 - protein, 167 aa, Unknown
  Obtained from environmental sample
  DOMAIN (56)...(167): CheD
  misc_feature (1)..(167): Xaa is any amino acid
MTLSDDKMSNITVGISDWALTKNADDTIITYSLGSCLGVTVYDAGAHIGGMVHCQLPNCSTEDKTKAKQNPAMFVDTGVSLLFQKFFEAGGQKSRMVVKAAGCAAILDQNGFFRIGERNVTLFRKLLWKNGILLNGSEVGGDVSRTLVLDMATGRTLIRSKGEEREI

SEQ ID NO: 68529 - DNA, 387 bp, Unknown
  Obtained from environmental sample
  misc_feature (1)..(387): n is a, c, g, or t
atggcgtacaatattttgattgtggacgattcgcagacgatgcgcgccgtgttgacgaagactatctgcatggccggtgtggagatcggatcggtcttcgaggctgagaacggcagggaggcgctcgctatccttgagagggagtgggtcgacctcgtcttcgctgacatcaacatgcccgttatgaacggcgtggagatggtccaagagatgaagaagctgggttacatggagtccacgccggtggtggtcatctccacggagggcagcaagaccaggctcgacgcgttacgggagatgggcgtgaagggcttcctgaggaagccggtcactccggagctcttcaagtctgtggtagacggcatactcttgggcaacgcggagtag

SEQ ID NO: 68530 - protein, 128 aa, Unknown
  Obtained from environmental sample
  DOMAIN (3)...(120): Response regulator receiver domain
  misc_feature (1)..(128): Xaa is any amino acid
MAYNILIVDDSQTMRAVLTKTICMAGVEIGSVFEAENGREALAILEREWVDLVFADINMPVMNGVEMVQEMKKLGYMESTPVVVISTEGSKTRLDALREMGVKGFLRKPVTPELFKSVVDGILLGNAE

SEQ ID NO: 68531 - DNA, 2583 bp, Unknown
  Obtained from environmental sample
  misc_feature (1)..(2583): n is a, c, g, or t
atgtcggtatacggcgaatcggttttccgccccctgcttcccgaatggacattcatgcaggaagggcacagaatggagtatcaaaacggaaaactttccattacaggcgtcgtctacaacgaaatgaaaggagcttattcatcgcttgatacttacgcgggtcattggtcggtaaaagcgattatgccgaacactccctacgattttgaatcgggcggcgatccgcaagcaattccgcaattaacatgggaaggtttaaaagaatttcaccgcagtcgttattcaccggctaattgcaaaatttttcttgcgggtaacattcccacggaaaaacagcttgcgttcttaaacgatgaatttttctccaaactggaaggcggtaaagcttgcgctccaatcgtaaaaacgcaacgctggaaagagccgaaaaaattccatgtgccctgccccgccggaagcgaacgtaaatcgacaatttttctttcatggctttgttccgatgttaccgacatttacgaaagccttgcgctggcggcgcttactgaaattcttttgggacacgacggctctccgcttacaagggcgttgatagagtcgggtcttggagaggacattactcccgtctcgggacttgaaagcgagatacgcgaaattttatttgttacgggattaaggggtgttaagggaaatataaaacaaaaaagcgaagcgatagaaaaattgataatgggggaattgcgcaggcttgcgaccgaaggcattccgccggaagaaatagaagccgctcttttggcgcttgaattttcccagcgggaaattcgccgctccggcggaccattctcgcttgtctggatgcgccgctctttacgcgcgtggcttcatggctgtaaaccgtgggaagggctgttaatttcttgtcagctaacgaaaatcaaagaagctctttcgcgcgataaaaaatattttgaatcattaattaaaaaatattatcttgataatccgcaccgcgctcttgtcattcttgaaccaaaagataacttcttgttaaagcaagaaaaagaacttttaaaagaattaaaaaatactcaaaaaaaattaagcaaagaagaacaacagcagattattgataaatccaaagaactggaaaaaatacaaagcgaggcggacagtccgcaggcgcttgcggcaatccctcatctttcgcgtaacgatcttgccgtttacgacgatattattccgcgccgtcaggaagatttaaaaggcgttccctctctgtgtcacgagctttacacaaacggcattacatatctggattttgcttttcccgtagatgttttccctcccgaagattatttatggctgccgtttttctccagagcgattacttccgtagggcttcccggcatggactacggggaagtgtcgagtttgcttgcccgcacagtcggcggctttaacgcggttcttcacacggcgacggctgtaaaaaatactccgccctttttgcaaacagcgtcgggcagttttgatctgtcgggacgcgattggctcttcctgcggttaaaatgccttgatgaaaaaatagcgccgtccgttgatcttgccatgcgtgtaatttgcgacgctgatttttcagaccgcaggagaataaacgatcttatccttgaaatgaaaaatgaaattaactccagtcttgcgccgatgggtcatatttattcttcaagcagaacatgccgatttaattcgcgttcaaaaagcgtggaagaaaaatactcaggcatttcacagattgaatttgttaatcagctttcaaaatatgatattggggaaataattaaaaaactgcaatacattcgggaaaaaattgttaagacgggattgattgtaaatatcacgggaaccgccgttaattcagccgttgcggaaatagcgcaaaggttcagccgctttggcgcgccttcaccccgactctccgtggagataagcggcaacaaacccgcacctgaagtttttacttcccgctccttgcaagtgggctttgcggcgctgacattaaatgccgcgccttatgacacattggaacaaaccgcagagattgttttgtctcatcagttgagtaccggggcgttgtgggaagttatccgcatgaagggcggcgcttacggagcgttcatcaacagcaacagccttgataactgcctgactttcgccacataccgcgatccaaatcctctgcgctcgttagatgttatatcatcaatttttaaagacaactcttacggaaaatgtacggaagactatcttgtaaaatcaataatcggctgttactcgaaagaaacgcgcccgcaaaccgccgcagaaaaaggattaatcgactttaacagattcctttacggcattgatgaaagttaccgcagaaaaagacttgagcgtttggtttctctttcaaccgccgacattgaatcaatttttaattctttcagttcaagactctcatcgccgcctgtaataatcgccgatgtaaaaaacgccgagcaagccgctaaagcgcttggcgttaatgtgcagatgttgaagatttaa

SEQ ID NO: 68532 - protein, 860 aa, Unknown
  Obtained from environmental sample
  DOMAIN (80)...(266): Peptidase M16 inactive domain
  misc_feature (1)..(860): Xaa is any amino acid
MSVYGESVFRPLLPEWTFMQEGHRMEYQNGKLSITGVVYNEMKGAYSSLDTYAGHWSVKAIMPNTPYDFESGGDPQAIPQLTWEGLKEFHRSRYSPANCKIFLAGNIPTEKQLAFLNDEFFSKLEGGKACAPIVKTQRWKEPKKFHVPCPAGSERKSTIFLSWLCSDVTDIYESLALAALTEILLGHDGSPLTRALIESGLGEDITPVSGLESEIREILFVTGLRGVKGNIKQKSEAIEKLIMGELRRLATEGIPPEEIEAALLALEFSQREIRRSGGPFSLVWMRRSLRAWLHGCKPWEGLLISCQLTKIKEALSRDKKYFESLIKKYYLDNPHRALVILEPKDNFLLKQEKELLKELKNTQKKLSKEEQQQIIDKSKELEKIQSEADSPQALAAIPHLSRNDLAVYDDIIPRRQEDLKGVPSLCHELYTNGITYLDFAFPVDVFPPEDYLWLPFFSRAITSVGLPGMDYGEVSSLLARTVGGFNAVLHTATAVKNTPPFLQTASGSFDLSGRDWLFLRLKCLDEKIAPSVDLAMRVICDADFSDRRRINDLILEMKNEINSSLAPMGHIYSSSRTCRFNSRSKSVEEKYSGISQIEFVNQLSKYDIGEIIKKLQYIREKIVKTGLIVNITGTAVNSAVAEIAQRFSRFGAPSPRLSVEISGNKPAPEVFTSRSLQVGFAALTLNAAPYDTLEQTAEIVLSHQLSTGALWEVIRMKGGAYGAFINSNSLDNCLTFATYRDPNPLRSLDVISSIFKDNSYGKCTEDYLVKSIIGCYSKETRPQTAAEKGLIDFNRFLYGIDESYRRKRLERLVSLSTADIESIFNSFSSRLSSPPVIIADVKNAEQAAKALGVNVQMLKI

SEQ ID NO: 68533 - DNA, 1482 bp, Unknown
  Obtained from environmental sample
  misc_feature (1)..(1482): n is a, c, g, or t
ttgcgcgtaacatcccatgagatcattataaagccggataaaccgggcgccttaaaacctctgtcgcaggttctgatagacgaagatggcaatgatgtttataaactggtaaaattccagcgcaccaaccaggacacctgctataaccagaggcctattatcaaggtgggcgagaaaattacggcagggcaggtaattgccgatgggcctgccacccagaacggggagcttgccctgggcaggaatattcttgtgggctttatgccctggaacggttacaactatgaagactcgatccttatctccgagcgcgtggttaaggaagacatgtttacctctatccatataaaggaatttccaaccgaggtaagggagaccaaactggggccggaaaaaatcaccgatgagattccgaatacttccgtaaaaagcctggacaacctggacaaggaaggcattatctgcgtcggcgcgagagtccgctccggcgatatactcgtaggaaaggtaacgcccaaaagcgaaaccgagacgacgccggaattcaagctcctcaattcgatcttcggcgagaaggccaaggaagtgcgcgattcttcactcacggtaccgcacggcgttgagggaacggtgattgatatacagaggctcaagcggtcggaaggggacgatctcagccccggcgttgacgaagtggtaaaagtgcttatcgccacaaagcgcaaactccgggaaggcgataaaatggcgggacggcacggcaacaagggcgttgtcgcgcgcatacttccggaagaggatatgccatacatggaagacggaaccccgcttgatatctgccttacaccgttaggtgttccttcccgtatgaatatcggacagcttttggaaacagaacttggctgggcgggatcaacgctgggcgaatggtactcatcgccggttttccagtccccttccaccgggcagattgaagaaaaactcaaagaggcaggactacccgttacgagtaagaccatgctgcgcgacggcagaaccggtgaatattttgtaaaccctgttttttgcggggtgatttacttcctcaaactccatcatcttgttgatgataaaatgcacgcccgcagtacaggtccctattcgctggttacacagcagcctcttggcggcaaggcgcagttcggcggtcagcgcctgggagagatggaagtctgggctttggaagcatacggtgcggcgcataccctgcaggaactgctgacgatcaagtcggatgatatgacagggcgttccaagatttacgaggccattgtaaagggtgaaccttccactacggcgggtattcccgaatcgtttaacgtactggtgcaggaactgagggggcttgcgcttgatctcgcaatttttgacaacaacagcaaacaaattccccttacggaaaaagacgaagagctgattacgaagtcgaagagtaatttctaa

SEQ ID NO: 68534 - protein, 493 aa, Unknown
  Obtained from environmental sample
  DOMAIN (395)...(471): RNA polymerase Rpb2, domain 7
  misc_feature (1)..(493): Xaa is any amino acid
MRVTSHEIIIKPDKPGALKPLSQVLIDEDGNDVYKLVKFQRTNQDTCYNQRPIIKVGEKITAGQVIADGPATQNGELALGRNILVGFMPWNGYNYEDSILISERVVKEDMFTSIHIKEFPTEVRETKLGPEKITDEIPNTSVKSLDNLDKEGIICVGARVRSGDILVGKVTPKSETETTPEFKLLNSIFGEKAKEVRDSSLTVPHGVEGTVIDIQRLKRSEGDDLSPGVDEVVKVLIATKRKLREGDKMAGRHGNKGVVARILPEEDMPYMEDGTPLDICLTPLGVPSRMNIGQLLETELGWAGSTLGEWYSSPVFQSPSTGQIEEKLKEAGLPVTSKTMLRDGRTGEYFVNPVFCGVIYFLKLHHLVDDKMHARSTGPYSLVTQQPLGGKAQFGGQRLGEMEVWALEAYGAAHTLQELLTIKSDDMTGRSKIYEAIVKGEPSTTAGIPESFNVLVQELRGLALDLAIFDNNSKQIPLTEKDEELITKSKSNF

SEQ ID NO: 68535 - DNA, 738 bp, Unknown
  Obtained from environmental sample
  misc_feature (1)..(738): n is a, c, g, or t
atggtcttactcgtaacgggtagtcctgcctctttgagtttttcttcaatctgcccggtggaaggggactggaaaaccggcgatgagtaccattcgcccagcgttgatcccgcccagccaagttctgtttccaaaagctgtccgatattcatacgggaaggaacacctaacggtgtaaggcagatatcaagcggggttccgtcttccatgtatggcatatcctcttccggaagtatgcgcgcgacaacgcccttgttgccgtgccgtcccgccattttatcgccttcccggagtttgcgctttgtggcgataagcacttttaccacttcgtcaacgccggggctgagatcgtccccttccgaccgcttgagcctctgtatatcaatcaccgttccctcaacgccgtgcggtaccgtgagtgaagaatcgcgcacttccttggccttctcgccgaagatcgaattgaggagcttgaattccggcgtcgtctcggtttcgcttttgggcgttacctttcctacgagtatatcgccggagcggactctcgcgccgacgcagataatgccttccttgtccaggttgtccaggctttttacggaagtattcggaatctcatcggtgattttttccggccccagtttggtctcccttacctcggttggaaattcctttatatggatagaggtaaacatgtcttccttaaccacgcgctcggagataaggatcgagtcttcatag

SEQ ID NO: 68536 - protein, 245 aa, Unknown
  Obtained from environmental sample
  misc_feature (1)..(245): Xaa is any amino acid
MVLLVTGSPASLSFSSICPVEGDWKTGDEYHSPSVDPAQPSSVSKSCPIFIREGTPNGVRQISSGVPSSMYGISSSGSMRATTPLLPCRPAILSPSRSLRFVAISTFTTSSTPGLRSSPSDRLSLCISITVPSTPCGTVSEESRTSLAFSPKIELRSLNSGVVSVSLLGVTFPTSISPERTLAPTQIMPSLSRLSRLFTEVFGISSVIFSGPSLVSLTSVGNSFIWIEVNMSSLTTRSEIRIESS

SEQ ID NO: 68537 - DNA, 777 bp, Unknown
  Obtained from environmental sample
  misc_feature (1)..(777): n is a, c, g, or t
atgatatccatggcggcggaaacggatgacgttcaaataatcaaggattaccttaaaaaggcgtacaacgcgggaaggcatgtactgggccttatcaatgatattcttgacatgtccaagattgaagcgaataaactggaactctcatgcgtcgattttaattttatggaaatgttgaccggaattgtcaatgaggcaagcgtccgcgccggggaaaagcagcagagcattatagttaacgtgaacgaaaatgtcccgccggttataaccggagatgaactgcgcctgtcgcagatcatcacgaatctgctgactaacgcgattaaatttactcctgacaacggacgtattgaagtaaaagcggataagacggacgagaaggacggggaaaccacccttagaatcgaagtagcggactcaggcatcggaatttcaccggaacagcaaataaaacttttcacatcttacaaccaggccaacagcggcatcgctcaaaaattcggcggtacagggcttgggcttgccatttccaaacggattatagaactcatgcggggaagaatatggatagaatctgaactgggtaaaggggcaaaattcatatttaccataaagaccggaaagggattggtcaaagccagtgaagagtcctcccgccaggacggatccggcgggtccgggttcaatttcaataaatataccatcctggtggcggaggatgatgaaatcaacagggaaattatgtccgcgcttctgggaaagatcggcattccttga

SEQ ID NO: 68538 - protein, 258 aa, Unknown
  Obtained from environmental sample
  DOMAIN (91)...(207): Histidine kinase-, DNA gyrase B-, and HSP90-like ATPase
  misc_feature (1)..(258): Xaa is any amino acid
MISMAAETDDVQIIKDYLKKAYNAGRHVLGLINDILDMSKIEANKLELSCVDFNFMEMLTGIVNEASVRAGEKQQSIIVNVNENVPPVITGDELRLSQIITNLLTNAIKFTPDNGRIEVKADKTDEKDGETTLRIEVADSGIGISPEQQIKLFTSYNQANSGIAQKFGGTGLGLAISKRIIELMRGRIWIESELGKGAKFIFTIKTGKGLVKASEESSRQDGSGGSGFNFNKYTILVAEDDEINREIMSALLGKIGIP

SEQ ID NO: 68539 - DNA, 522 bp, Unknown
  Obtained from environmental sample
  misc_feature (1)..(522): n is a, c, g, or t
atgagcaatgaacgggaaaaaattatcgcggtggacgataacctcgaaaaccttaccacccttaaaaatacccttaaagacctgtatgaagtatttccctgtccctccgccgcgaagatgttcaatctgcttgagcgtgtccggccggatttaattctgctggacgtggaaatgccggaaatgaatggttatgacgcggcaagaaaattgaaaaacgaatctcaaaccggcgaaatacccattatattcctgacttcaatgagcgacgcgcaaagcgaaatggaaggcttaaccatcggagccattgattatatccacaagccctttgtcgcccacttattgcttcagcgaataaaaacgcatctgtccattatggaacaggaaagggaaattaaacatctgattgaattaaaaactgaggaagtaaaactacgcgaagcggctgaacaggaagcggaaaacgcatcccgcgccaagggtgaattcctgtcgcacatgagccatgagataagatctccgtaa

SEQ ID NO: 68540 - protein, 173 aa, Unknown
  Obtained from environmental sample
  DOMAIN (6)...(119): Response regulator receiver domain
  misc_feature (1)..(173): Xaa is any amino acid
MSNEREKIIAVDDNLENLTTLKNTLKDLYEVFPCPSAAKMFNLLERVRPDLILLDVEMPEMNGYDAARKLKNESQTGEIPIIFLTSMSDAQSEMEGLTIGAIDYIHKPFVAHLLLQRIKTHLSIMEQEREIKHLIELKTEEVKLREAAEQEAENASRAKGEFLSHMSHEIRSP

SEQ ID NO: 68541 - DNA, 1683 bp, Unknown
  Obtained from environmental sample
  misc_feature (1)..(1683): n is a, c, g, or t
ttgagcaagcccaaacttcatgctaaacaaggaggaaataaattaatggccggtgatcgaaagaaaattatcgtagtagatgataatcccgaaaatctgaacgttttgaaaaataccatgaaagaattatacatggtatatccctgtccgtccgctgcggcgatgtttgaattattggaacatgtccagccagaattgatcctgctggacgttgaaatgccggagatgaacggatatgaagccataaaaaagctgaaagacgacgataaaaacaagaaaatacccgttatattcctgacctccatgaccggcgcgcaaagcgaactggaaggattaggttatggcgccgttgattatatccgcaaaccctttgtcgccccgctgttgatgcagaggataagaacccagctttccattcaggaacagcaggcggaaattaaacacctgcttgatttaaaaacagaagaagtaaaaatgcgcgaagcggcggaactggaagcggagagagcgtcccaggccaaaggtgactttctttcccacatgagccatgaaataagatccccgttaaacgccgtaataggcatgatatccatggcggcggaaacggatgatattcaaacgattaaggattaccttaaaaaggcctacaacgcgggaaggcatgtgttgggacttatcaatgatattcttgacatgtccaagatcgaagcgaataaacttgaactcgcgtacggcgaatttaattttagaaaaatgctggagggcattgttaatgaggcaagcgtccacgccggggaaaaataccaggacattgccgttaacgtgaatgaaaatgttccgcctgttataaccggcgacgaactgcgcctgtcgcagatcattacgaatctgataaccaacgcgattaaatttacccctgacaaaggccgcattgaagtgaacgccaaaaagctggacgagcgggacggtgaaatcaccctgcaaatcgaagtggctgacaacggcatcgggatttcaccggagcagcaaaaaaaacttttcacgtcttacaaccaggctgataacagcatcgcgcaaaaatacggcggtaccgggcttgggcttgccatttcaaagcggattattgagctcatgcggggagaaatatggatagaatcggaactgcacaagggctcgaaattcatatttaccataaaggccgggaagggaacggacaaggcctctgaagagtcttccctgcagacaaggtcaggcgagtccggtttcgatttcagtaaatataccatattggtttcggaggatgatgaaatcaacagggaaattatggccgcgcttctggaaaagaccggcattacaattttttttgccgaaaacggcaaactggccgtatccatgttccaggaaaatccggaaaaatacagcctgattctcatggacattcatatgccggaaatggacggatataccgccgcgcggacaatacgcgagcttgaattcgcaagggcaaagagcattccgataatagcaatgaccgcgaatgttttcagggaagacattcaaaaatgcctggattcgggcatgaacgatcatatcgccaaacctatttttccggatgatttatacgcgtcgcttaaaaaacatctgcagcccggcattgggaaatcacaaggagaaagtgtttaa

SEQ ID NO: 68542 - protein, 560 aa, Unknown
  Obtained from environmental sample
  DOMAIN (173)...(238): His Kinase A (phosphoacceptor) domain
  misc_feature (1)..(560): Xaa is any amino acid
MSKPKLHAKQGGNKLMAGDRKKIIVVDDNPENLNVLKNTMKELYMVYPCPSAAAMFELLEHVQPELILLDVEMPEMNGYEAIKKLKDDDKNKKIPVIFLTSMTGAQSELEGLGYGAVDYIRKPFVAPLLMQRIRTQLSIQEQQAEIKHLLDLKTEEVKMREAAELEAERASQAKGDFLSHMSHEIRSPLNAVIGMISMAAETDDIQTIKDYLKKAYNAGRHVLGLINDILDMSKIEANKLELAYGEFNFRKMLEGIVNEASVHAGEKYQDIAVNVNENVPPVITGDELRLSQIITNLITNAIKFTPDKGRIEVNAKKLDERDGEITLQIEVADNGIGISPEQQKKLFTSYNQADNSIAQKYGGTGLGLAISKRIIELMRGEIWIESELHKGSKFIFTIKAGKGTDKASEESSLQTRSGESGFDFSKYTILVSEDDEINREIMAALLEKTGITIFFAENGKLAVSMFQENPEKYSLILMDIHMPEMDGYTAARTIRELEFARAKSIPIIAMTANVFREDIQKCLDSGMNDHIAKPIFPDDLYASLKKHLQPGIGKSQGESV

SEQ ID NO: 68543 - DNA, 834 bp, Unknown
  Obtained from environmental sample
  misc_feature (1)..(834): n is a, c, g, or t
gtgctggtagttgacgatgtcctgaccaatctggacgtggcggcaggcctgttgcgcaaataccggatgcaggttgactgtctggataacggaccggccgcgattaagcggatacgaagcgggactccggtttataacgccatattcatggatcacatgatgcccgatatggatggcatagaagcggctgaccatattcgcgcgttaggtacggaatacgcaaaaaatataccgataatcgccctgactgccaacgccatccatggaacagaacagttgttttatgaacacgactttcaggcgtttatatccaaacccatcgacatagcggagttggatttggttatcagaaaatgggtgcgtgacgagacccgtgatgatgtgcctgttcttaacgcgccggtttataacgatccttctacgccaatagcaatagaaataccgggtgtagatacgaaaaaagggcttgccctgtacgccggtgataccggtgtttatctgactctgctgcgctcctatgttaccaacacgccggggcttttggacaagctgcggatcgtcacggaaaaaaccttgccaaaatataatgttaccgtgcatggattaaaaggcaccagcgccggcataggcgcggaattgatacgggaatcggcttttgaactggaaaaaatatccaaggaaggcgacttgcagggcgttttgtccaaaaacgacaaactcattgcggatacggaaatcattgtggccaatgtaaaaacgtggctgagaaaaaatgatgttcagggaagcaaaacccgcgcaaaaaaaaaacccgaccgggagctttctggttaa

SEQ ID NO: 68544 - protein, 277 aa, Unknown
  Obtained from environmental sample
  DOMAIN (168)...(243): Hpt domain
  misc_feature (1)..(277): Xaa is any amino acid
MLVVDDVLTNLDVAAGLLRKYRMQVDCLDNGPAAIKRIRSGTPVYNAIFMDHMMPDMDGIEAADHIRALGTEYAKNIPIIALTANAIHGTEQLFYEHDFQAFISKPIDIAELDLVIRKWVRDETRDDVPVLNAPVYNDPSTPIAIEIPGVDTKKGLALYAGDTGVYLTLLRSYVTNTPGLLDKLRIVTEKTLPKYNVTVHGLKGTSAGIGAELIRESAFELEKISKEGDLQGVLSKNDKLIADTEIIVANVKTWLRKNDVQGSKTRAKKKPDRELSG

SEQ ID NO: 68545 - DNA, 1182 bp, Unknown
  Obtained from environmental sample
  misc_feature (1)..(1182): n is a, c, g, or t
ttgatacaatccccgacatcctggttttgcaaggacgccgacttaaaatatacgcaatgcaacaagccctttgaacaattctggggcgttcgcgaggcggatatgctcggcaagacggatggggacagcaggtggttttctcccgatttggtacagaagatgcacaagacggaattttccgtaatgaaaaacgataaaacagttgtccgcgaattgccccagacatcgccgataacggggaaaaaagccgtttttgaatcggttttatccccgcttaaacagaacggcgaagttgtcggaatattatgcgtcgcgcgggacgtaaccatgcgtaaggcgatggagaatgaaatccgcgccgctttggagtccaagacgtctttcctcgcccatatgagccacgaactgagaaccccgcttaacgtggttattggccttaccgatttaatactggaagacggacatcttgacgtttctgtcaccaataatatattgaaaataaacaacgcgggaagcacgcttttaagcattgtaaactcaattctggacttttccaaaatcgagtccggcaagctggaaataacgccggttgagtattttacggcaagccttttgaacgacgtctctaccgttgttatcacgcgcctcggggaaaaacccgtaaagttcaacctggatattgaagccgatatgccggaaaggctgttgggcgacgaccttcgcgtgaaacagatattaatcaacctcctgaccaacgcggttaaatatacgcgcgagggaagcattgaattaaatatacgtcacacgcgtgaaggcaataccgtgtggctggatatcgccgtcagcgacaccggcatcggcgtacgcgaaaaagacctgaaaaaattgttcaatgattatgttcaggttgacaccattaccaaccgcaacattgaaggcacggggctgggcctgcccattaccaaaaaacttgtagagcttatgcgcggggaaatcagcgcggaaagcgagtacggcaaaggcacaaccttccacgtgaagttaagccagggctttgtcgataatgcgattctcggtccggacaatgcggataaactccgcagtttccagtatgccgaagaacagcgtatcgcgaacaagaagcttttacggctcgatttagttacgcccgtgtgctggtag

SEQ ID NO: 68546 - protein, 393 aa, Unknown
  Obtained from environmental sample
  DOMAIN (1)...(113): PAS fold
  misc_feature (1)..(393): Xaa is any amino acid
MIQSPTSWFCKDADLKYTQCNKPFEQFWGVREADMLGKTDGDSRWFSPDLVQKMHKTEFSVMKNDKTVVRELPQTSPITGKKAVFESVLSPLKQNGEVVGILCVARDVTMRKAMENEIRAALESKTSFLAHMSHELRTPLNVVIGLTDLILEDGHLDVSVTNNILKINNAGSTLLSIVNSILDFSKIESGKLEITPVEYFTASLLNDVSTVVITRLGEKPVKFNLDIEADMPERLLGDDLRVKQILINLLTNAVKYTREGSIELNIRHTREGNTVWLDIAVSDTGIGVREKDLKKLFNDYVQVDTITNRNIEGTGLGLPITKKLVELMRGEISAESEYGKGTTFHVKLSQGFVDNAILGPDNADKLRSFQYAEEQRIANKKLLRLDLVTPVCW

SEQ ID NO: 68547 - DNA, 450 bp, Unknown
  Obtained from environmental sample
  misc_feature (1)..(450): n is a, c, g, or t
ttgcaacgtgttgtttttccaaaaatgctgccatactggatttatcgacaaaaaacgcggttgggattatatatgaatggtacaaaagctgttattttggcgctttttacggcgtttttcttaaaaattttcttctttgactttataatagcccaggggagttcgatggaaccggcaattaaaagcggaaatctccttgtgatcagccgccttaggtacggatttcggcttccgtgggcgcaaagttatctttttcggtgggctaagccaaaaatcggggaaattgtggttttttacacgccgtccggagagttggcggtaaaacgctgtattgctcttgatgaaggcggctttatcgctcaaggtgataatcagaatgtatcttttgattcacgctcttacggacctgtccctattgataatataataggtaaggtgttgggatattaa

SEQ ID NO: 68548 - protein, 149 aa, Unknown
  Obtained from environmental sample
  DOMAIN (50)...(130): Peptidase S24-like
  misc_feature (1)..(149): Xaa is any amino acid
MQRVVFPKMLPYWIYRQKTRLGLYMNGTKAVILALFTAFFLKIFFFDFIIAQGSSMEPAIKSGNLLVISRLRYGFRLPWAQSYLFRWAKPKIGEIVVFYTPSGELAVKRCIALDEGGFIAQGDNQNVSFDSRSYGPVPIDNIIGKVLGY

SEQ ID NO: 68549 - DNA, 582 bp, Unknown
  Obtained from environmental sample
  misc_feature (1)..(582): n is a, c, g, or t
ttgcggtattcagcaagagttgtcgcgccgatacagcgaatctcgccgcgtgaaagaccgggtttaagcatattcgccgcgtcaagggttccctcagcgccgcccgccccgattatcgaatgtatctcgtctatgaaaaggataatatttccggcttggcttacttcgcgtaaaattttctttattcgctcttcaaactcgcctcggtattttgttcccgccactacaagccccatatcaaggcataaaatgcgtttaccgcaaagcgcgtcgggaacagcctcgctgacaaaaagctgggcaagcccttccacaatagcggttttgcctacgccgggttcgcccacaaggattggattgttctttgtacggcgcgccaaaatacggactgcgcggttaatctccgcttttcttcccacaacagggtcgatttttcccgctctggcaagcgccgtaagatcgcgggaaaatgtatccaatacgggagtaagtacggggaacggaaccggctttactctcggctggcgttctgttcccgcgctcgctctgtggtggactgcggttctttctttatttacataa

SEQ ID NO: 68550 - protein, 193 aa, Unknown
  Obtained from environmental sample
  misc_feature (1)..(193): Xaa is any amino acid
MRYSARVVAPIQRISPRERPGLSIFAASRVPSAPPAPIIECISSMKRIIFPAWLTSRKIFFIRSSNSPRYFVPATTSPISRHKMRLPQSASGTASLTKSWASPSTIAVLPTPGSPTRIGLFFVRRAKIRTARLISAFLPTTGSIFPALASAVRSRENVSNTGVSTGNGTGFTLGWRSVPALALWWTAVLSLFT

SEQ ID NO: 68551 - DNA, 2691 bp, Unknown
  Obtained from environmental sample
  misc_feature (1)..(2691): n is a, c, g, or t
atgtcaaacaatattaataaacagtcgcaacaaccgcaatcgcaatccgacctcgccgctttgcaaaaagagaatagagtgctcgcccgcaagctcaaagagaccgaataccttgtctcctcatacgagcagtacgccgtctttcagaagagtatctacgagtccataaagaagcagaagagcgagcaggacacctatctgcgcctgattttcggtaattcccccgatgtgattctcgtgctggacgcgaacttgatgtacgtgatgggcaccaagaacgctatgcgcgctttggggataaacaccgacgctctcaccgggcaggacgtctcggcggtgttcttgcagatcatgccggtggagtgggtgagttctcttacgagcgacctgcggggcgtgctgtcaacgggcgtcagcaagcggttcggtaagcttgtggttactactcgcggagtcgagtactactttgagactaccgtcatccccatcaaggacgacagaacgggcgttgtgacgggggtgatattgaccatgcacgacgagaccaccctgcacgaggcggtgctgagcgcggagcggtcgaacaaggcgaagacaaactttttggccaagatcagccacgagatacgcacgccgatgaacgccatcgccggaatggcggagctcatattgcgcgagcatacgtcggggcttgtccgcgagcatgcgttgagcatccggcaggccagcggtaatctgatggcaatcattaacgatatcttggacttctccaagattgagtcgggcaagcttgaaatcgtagagagcgagtatcagttcgcgtcgctcataaacgatgtgataagtataataaggatgcgcgtcatagacaagcagatattcttcacgacgaacatagactgcgacattccggggcgtctgataggcgacgagatacgtatgaggcagatactcctcaacctgctcagcaacgctttcaaatattgcgagcggggcttcatttccatccacgcgagttgcgaggagaccgaggacggcacggtgactatggtcttcgacatatccgacagcggcgtcgggataaaaccggaggatcacagcaggctcttcagcgattttgtgcagttggacaaggtctctcacaaggaggtggagggcacggggctaggccttgtgataaccaagagcctgtgcgaggcgatgggcggcagcatagatgtgtacagcgtctacggggagggcagcacgttcacggtgcgcataccgcagaagtttgccggttacgaacggttcgcgcgggtcgacgatcccgacggcaagaacgttttgatctacgagacgcgaaaagcgtattcaagttctataatatgttccatcgacgatcttggggtggggtgcacgctcgtgtcgaatcagtcgcaatttcttgaagaactcaataagaataaatacacgcacgtattcgtatcttcgttcctctttgagagcacggagaaaataattaagaacctaggtatagatattaccatcgttctcttggccgaatacggtgagagcgcggtgaacacggaaagggtgaagacgctcgagatgccggtgcattctatctccatagcgaacctattgaacggcgcttccgacgtcgtttacgcggataacccgcagggggccacgccgttcatggcgccgtccgcgcggatacttatcgtggacgacctgataacgaacttgcgtgtggcggagggtctcatgttgccctacaagatgcagatagacgtctgccagagcggcgcggaggctatagaacttgtgaaggggaaggcctatgatatagtattcatggatcacatgatgccggagatggacgggatagaggcggcgcagaagataagggctctgggcggcgacgagtacaagcgtttgcccatagtggcgctcacggcaaacgcggtgtccggcgtgcgcgagatgtttttgcagaatgggttcaatgattttttggcgaaaccgatagagatgatgaagctcaacgtgattttggacacgtggctgcccaaggagaagattacgccctacgtggccgaagagaaggacgacagcgcgccaaccttcgagatacaggggatagacgtgcgcgcgggcgtgcagatgacgggcggcaacgagcgcaactacttgcgcgctctctcggccttctacaaggacggcacggacaaactgtcgcagatctccgaaagttttgagcgcggggacacgaagacttatgccgcttgcgcgcacgcgattaaaggcgccggggcgagcgtcggcgccgtgaagctgtcgagtttcgcgaaggcgctggagttggcggcgaagaacgagaacatgaactatataaggaagaatcacgaaacgttcatagacgagttcagggcgctgctcggcaatatccgttatgtggtgtcgccggatgggaagcaggcgaacgccgtcgtgccggactcggagtttataaaagggcatctgaagaaattacgcgacgcgcttgtggagttcgacatagaggcggcggacaacacgctgtcggtgctgttaggagagcagttggacgcggcgaccggtgagatgctggagcgggtgtcgaacaagattctgatttgcgagtacgatcaagcgctggtaattgttgagagtatgttggggtgttga

SEQ ID NO: 68552 - protein, 896 aa, Unknown
  Obtained from environmental sample
  DOMAIN (71)...(186): PAS fold
  misc_feature (1)..(896): Xaa is any amino acid
MSNNINKQSQQPQSQSDLAALQKENRVLARKLKETEYLVSSYEQYAVFQKSIYESIKKQKSEQDTYLRLIFGNSPDVILVLDANLMYVMGTKNAMRALGINTDALTGQDVSAVFLQIMPVEWVSSLTSDLRGVLSTGVSKRFGKLVVTTRGVEYYFETTVIPIKDDRTGVVTGVILTMHDETTLHEAVLSAERSNKAKTNFLAKISHEIRTPMNAIAGMAELILREHTSGLVREHALSIRQASGNLMAIINDILDFSKIESGKLEIVESEYQFASLINDVISIIRMRVIDKQIFFTTNIDCDIPGRLIGDEIRMRQILLNLLSNAFKYCERGFISIHASCEETEDGTVTMVFDISDSGVGIKPEDHSRLFSDFVQLDKVSHKEVEGTGLGLVITKSLCEAMGGSIDVYSVYGEGSTFTVRIPQKFAGYERFARVDDPDGKNVLIYETRKAYSSSIICSIDDLGVGCTLVSNQSQFLEELNKNKYTHVFVSSFLFESTEKIIKNLGIDITIVLLAEYGESAVNTERVKTLEMPVHSISIANLLNGASDVVYADNPQGATPFMAPSARILIVDDLITNLRVAEGLMLPYKMQIDVCQSGAEAIELVKGKAYDIVFMDHMMPEMDGIEAAQKIRALGGDEYKRLPIVALTANAVSGVREMFLQNGFNDFLAKPIEMMKLNVILDTWLPKEKITPYVAEEKDDSAPTFEIQGIDVRAGVQMTGGNERNYLRALSAFYKDGTDKLSQISESFERGDTKTYAACAHAIKGAGASVGAVKLSSFAKALELAAKNENMNYIRKNHETFIDEFRALLGNIRYVVSPDGKQANAVVPDSEFIKGHLKKLRDALVEFDIEAADNTLSVLLGEQLDAATGEMLERVSNKILICEYDQALVIVESMLGC

SEQ ID NO: 68553 - DNA, 1470 bp, Unknown
  Obtained from environmental sample
  misc_feature (1)..(1470): n is a, c, g, or t
gtgggacgggtcggggtatccgcaaggccttgtcggggaggccattccgttgcaggggaggcttatggccatagccgacgtctacgacgcgctcatctcggaacgtccctacaagaaggcgttcacgcacgaggaggccgtgaagatcatatccgacggcagcgggtcgcacttcgatccgcaccttgtcaagttgtttctggagcgggagcaagagttcaagctgatttccaagagtatgaacggaaaggccgggttgcaggtatgataaagtcttacacggtggcggtcagggagatcgacgacggcgcggcggcggtcaagctggccgcggagggcgtagcgtctctgccgctgcttaaaaataccgtgggcgttatcaccgcgcatccggagtgcgtaccctccggcgtcttccgcgacgtggcgcgggcgctgccctttccaagcgttgggatgaccaccatagcgcactgcgccggcgccgaggccgacacctatatgctctcgattttggtgctgacgagcgacgactgcgccttttcctgcggcgcgagcgatccggtgccggagaattgcagcgtagaggcggctaagagcgccgttcgtaattgctacaaggagcttagcgggcatctgcccgccgaacccaagctggcgcttctctactcgcagttcttcctagctccgcgccagtaccagttcaccgccgcgatttcggaggtcgtcccgcggcttccggtattcggcgcggtggcgaatgacgacaagcaaaacgtgcggccgcagacgaacgcgcggatattggccggcggcgagctttacgacgacagaccggccttgcttttaatttccggcgaagtgtctcccagattttacatagcttccgtaacggaggacgcgataatcatgccgcgtgtaggggtgatcacaaaggcggacggaatcaaactgctgaaggtgaacaacgtaaatgcccccgattttttcaagcaaataggctttttgggcgaggagtccggcggttggcgtaacggcgaggagggtctgctttcgagccttttcgttttgcataccgacgacgggtgcggcggctccgcaaacatcacgcgcatcccgttcaaggtggacgccgaggccgtctactgcgcaggtccgctatttgagggcgtcgcgatgtcggtagctttcaacacgcgcgacggtgtggtggagaccgcgtcgcaattgtgcgaacagataaagcgcgacagcgccggcggaacggtgataatatactcctgcataggcaggcgcttcggtttgctgggagagccgatggcggagctctcggcgataataggccaattggcggacaattttgtctatacagccgcctacggttcgggggagatgtgtccaacaagggtgacggatgccaagtcgttcaatcaggatcacagccagacgattgtcgcgtgcgtactttga

SEQ ID NO: 68554 - protein, 489 aa, Unknown
  Obtained from environmental sample
  misc_feature (1)..(489): Xaa is any amino acid
MGRVGVSARPCRGGHSVAGEAYGHSRRLRRAHLGTSLQEGVHARGGREDHIRRQRVALRSAPCQVVSGAGARVQADFQEYERKGRVAGMIKSYTVAVREIDDGAAAVKLAAEGVASLPLLKNTVGVITAHPECVPSGVFRDVARALPFPSVGMTTIAHCAGAEADTYMLSILVLTSDDCAFSCGASDPVPENCSVEAAKSAVRNCYKELSGHLPAEPKLALLYSQFFLAPRQYQFTAAISEVVPRLPVFGAVANDDKQNVRPQTNARILAGGELYDDRPALLLISGEVSPRFYIASVTEDAIIMPRVGVITKADGIKLLKVNNVNAPDFFKQIGFLGEESGGWRNGEEGLLSSLFVLHTDDGCGGSANITRIPFKVDAEAVYCAGPLFEGVAMSVAFNTRDGVVETASQLCEQIKRDSAGGTVIIYSCIGRRFGLLGEPMAELSAIIGQLADNFVYTAAYGSGEMCPTRVTDAKSFNQDHSQTIVACVL

SEQ ID NO: 68555 - DNA, 1041 bp, Unknown
  Obtained from environmental sample
  misc_feature (1)..(1041): n is a, c, g, or t
ttggtaagaacgcccttctcggggcngtatagggttttcaccataccgtcgggcaagaaactctttgagatgctcgacaagaccgttccggacatgatcctgctcgacatcgagatgccggacatgaacgggtacgagatcataaaacagctgaaggcgaacgaagccaccgctcagataccggtgatcttcctcaccgcccgtagcgacagcgggtcggagctggaggggttgtcgctgggcgcgatagactacatctccaagcccttctcgccgccgctgctcctcaagcgcatagaggtgcacatgcttgtggaggagcaaaagcgagagctcgaaaactacagccgcaacctgcaagggatggtcgaggagaagaccaaaacggtgctcgacctgcaaaacgccatactgcggacggtggcggagctcgtggagtgccgcgacgacacgaccggcgggcacatcgagcgcacgcagagctaccttcagatactcgtggacgccctctggaccgacgatctgtatagggacgaggtgtcgtcgtggaacatagacttccttttgcagtcttcgcagttgcacgacgtgggcaagatcgccatcaaggacagcatcctccagaagccggcgaagctcaccccggaggagtttgaggagatgaagacgcacaccactttcggaataaaggtaatagagaagatacaggagaacacctcggaggctactttccttgagtatgccaagatattcgccggcgcgcaccacgagaagtgggacgggtcggggtatccgcaaggccttgtcggggaggccattccgttgcaggggaggcttatggccatagccgacgtctacgacgcgctcatctcggaacgtccctacaagaaggcgttcacgcacgaggaggccgtgaagatcatatccgacggcagcgggtcgcacttcgatccgcaccttgtcaagttgtttctggagcgggagcaagagttcaagctgatttccaagagtatgaacggaaaggccgggttgcaggtatga

SEQ ID NO: 68556 - protein, 346 aa, Unknown
  Obtained from environmental sample
  DOMAIN (2)...(100): Response regulator receiver domain
  misc_feature (1)..(346): Xaa is any amino acid
MVRTPFSGXYRVFTIPSGKKLFEMLDKTVPDMILLDIEMPDMNGYEIIKQLKANEATAQIPVIFLTARSDSGSELEGLSLGAIDYISKPFSPPLLLKRIEVHMLVEEQKRELENYSRNLQGMVEEKTKTVLDLQNAILRTVAELVECRDDTTGGHIERTQSYLQILVDALWTDDLYRDEVSSWNIDFLLQSSQLHDVGKIAIKDSILQKPAKLTPEEFEEMKTHTTFGIKVIEKIQENTSEATFLEYAKIFAGAHHEKWDGSGYPQGLVGEAIPLQGRLMAIADVYDALISERPYKKAFTHEEAVKIISDGSGSHFDPHLVKLFLEREQEFKLISKSMNGKAGLQV

SEQ ID NO: 68557 - DNA, 1887 bp, Unknown
  Obtained from environmental sample
  misc_feature (1)..(1887): n is a, c, g, or t
ttgggcgacgccctcttcgaccgcaaggacgaggccggcgctctgaccgcctaccgcgcggtgctcaaagccgacccgaacgctaagggcttcctcaagaggtacgtgggtcttgtaatgaaggccggcaacgaagccgagaagatggcggcgttcgcggcggcgatcaacgcgaacgaggccgacgtgggcgtgtacgcgcagctcggcgctctgcacaagtccaaaggcgagtttgccaaggccgcgtccatgtacgagcaggcttccaagctcgatcccagaaacgcggattatctcggcgagctcgccgactgccagctcaagtccggcaatctgggcggcgcgtcgcagaacttgcagcaggccataatgctcaaccccaaagcggtcaacgagtacaagacgctgggcgatctgtatatgcagcagaaccgcaaagatcaggcggttgacgcctacaagaaatttttggacaaggcgtccgactcaagagtcgcgcagattgtgggcgactactctttcgagaaaaagcagtacgccgatgcgttcaagtacctgtccatggttaaagacaacacgtcgacggactactactacgcgctgggcagaagcgctcaggaatcgaacaatccaaaggcggccatcgacgcgcttgaaaagttcaggatagtctcccgcggttccaagaccccggtgcccaataggagcgacgttatcagggcgctggcgctggcatacgagaaggagggcgacgacaacagggctgccgccgcgatagatgagtatctgaagggcccgcccccgattaaggaccaggaggccgcctacaagcgcgcccagttgattgagggcagggacggtaagaacgcggacgccgccataaggatttacgaggagaacgcgttggcctatccgcgcgaccaccgcaacttcctcaaggcgggtatctactactcgcgcaagaacaaccccgccaaggcgcagcagatgttcgagaagtgcgtagcaatttccgacaccatctcccgcgcgtggtacgaattgggtatgatgtacggttcgcagggcaaagacaaggagatgctcaaggcgttccagaagttcatctccatagaagcgaagaacgccgacgccattttgaaggccggcgagtatcttctcgtgacccgcaacatgcctgccgacgccatgatgttcttggaaatggcaaacgccctcaagcccaacgatcccaaaatcatgccgatgctggccagaggctatatgagaacgggcaggaacgacgagggtctgaagctcttggagagaatcaagagcaacacgagaggcgcgccggtcgacattgagatccgcatagcgttgggcgagggctatctcgctctaggcaggaacatggaggccgccgttgaatggaaggcggtcatcgatcagaagagggagccggcctatctaatcaaatacgccacggcgctggtcgccatgggcaataggaacgccgtggcggtgagcatcgccaacgagatactcgcgaagcagccggagagcatagaggggctgatgctgtcgggcagggttaaggtcgcctcgcgcaactttgaggacgctatggagattttcaagaaggtcggctacataaaccccaactacgctccggccctctacgaacgcggaaacatcttcctgatgcagcagaactacgagggcgccaaggcgttcttcgaaagggcgctgaagctggaacctcggtacgcgatggcggagctcggcttggcgagattggccaaggtgcagaagaatcagtcggagtaccagaggcacttgcagaacgccagcaagttggatccggggaatagggagatacaggaagagatgaagaggaggtag

SEQ ID NO: 68558 - protein, 628 aa, Unknown
  Obtained from environmental sample
  DOMAIN (63)...(96): Tetratricopeptide repeat
  misc_feature (1)..(628): Xaa is any amino acid
MGDALFDRKDEAGALTAYRAVLKADPNAKGFLKRYVGLVMKAGNEAEKMAAFAAAINANEADVGVYAQLGALHKSKGEFAKAASMYEQASKLDPRNADYLGELADCQLKSGNLGGASQNLQQAIMLNPKAVNEYKTLGDLYMQQNRKDQAVDAYKKFLDKASDSRVAQIVGDYSFEKKQYADAFKYLSMVKDNTSTDYYYALGRSAQESNNPKAAIDALEKFRIVSRGSKTPVPNRSDVIRALALAYEKEGDDNRAAAAIDEYLKGPPPIKDQEAAYKRAQLIEGRDGKNADAAIRIYEENALAYPRDHRNFLKAGIYYSRKNNPAKAQQMFEKCVAISDTISRAWYELGMMYGSQGKDKEMLKAFQKFISIEAKNADAILKAGEYLLVTRNMPADAMMFLEMANALKPNDPKIMPMLARGYMRTGRNDEGLKLLERIKSNTRGAPVDIEIRIALGEGYLALGRNMEAAVEWKAVIDQKREPAYLIKYATALVAMGNRNAVAVSIANEILAKQPESIEGLMLSGRVKVASRNFEDAMEIFKKVGYINPNYAPALYERGNIFLMQQNYEGAKAFFERALKLEPRYAMAELGLARLAKVQKNQSEYQRHLQNASKLDPGNREIQEEMKRR

SEQ ID NO: 68559 - DNA, 1380 bp, Unknown
  Obtained from environmental sample
  misc_feature (1)..(1380): n is a, c, g, or t
atgctaacaaaagaatatataacaaaaatgaagcacaaaggaagcgaagaaattttttctttaataaagactcagcgcgatgtgggcactatcaactatatccttgagaatttaggagctttgcctgatgatttcaatccccaatttttatatgaactgctggatcacaaccacgcgcaagttcggttaaatgccgtaaagaacattggaaaacttaacaggaaatcagacgctaagcgtctgtttgacttgtataaacgcgaaacaaatacaaatgtccgccgggagatagtatcttccattggcaggcaaagaaaaagtggaaacaaacgatacttatatatttttttaggcgataccgatccaaagattatttgtcaggcaatacgcggattgttggtctttgaagatgacaaagacgttgaaaaacgtttatgcccgctcgtgaaccacgaaaatgaaatggttcgaaccgtgatttacaaaaagtatttcgcaaaagaaaaaaagaatgaaaatacgataccgcatgccgaaacgcatgattttctcaaaaatgtcgtcgttaatgcggatgttttaaaggcattaaaatatgtttcagatgagagcgtgcatttaacgttcacttcaccgccatattacaacgctcgcgattattccatttacccgagttatttggcatatttgaaatttttagaaaaagtgtttattcaaacacatagaattacaaaagaaggacgatttttgatcgtcaatacctcacctataattattccgcgcgtaagccgatcacattcaagtaaaaggtacggtattccatttgatttgcacccatatttagtaaaaaacggatgggaattcattgatgatattgtttggctaaaacctgaagcgtccgtaaaaaatcgtgtcggtggttttatgcaacaccgtaaaccgttggcttacaaaccgaatccgataacggaatatttaatggtctatcggaagtcaaccgaaaaattattagactggaatatcagaagttacgaaagtaaaacgattaaggagagtaaagtcgcagatggttatgaaacgaccaatgtttggaaaattgacccatcttttgacaaaatacattccgctatttttccggttgaactttgtaaaagagtaatccaatattattcttacaagggcgatttggtttttgatccgtttgccggaagcggcacaatggggaaaaccgccaaaatgttaggccgtttctttttcctgacggaacaagatccgaagtattttgaatatatgaagtcaaaggaagatgacgacagattatttgaagagcgtcggacacgatttctaacgttaaaacaatttatggcggtagcaaaatga

SEQ ID NO: 68560 - protein, 459 aa, Unknown
  Obtained from environmental sample
  DOMAIN (205)...(433): DNA methylase
  misc_feature (1)..(459): Xaa is any amino acid
MLTKEYITKMKHKGSEEIFSLIKTQRDVGTINYILENLGALPDDFNPQFLYELLDHNHAQVRLNAVKNIGKLNRKSDAKRLFDLYKRETNTNVRREIVSSIGRQRKSGNKRYLYIFLGDTDPKIICQAIRGLLVFEDDKDVEKRLCPLVNHENEMVRTVIYKKYFAKEKKNENTIPHAETHDFLKNVVVNADVLKALKYVSDESVHLTFTSPPYYNARDYSIYPSYLAYLKFLEKVFIQTHRITKEGRFLIVNTSPIIIPRVSRSHSSKRYGIPFDLHPYLVKNGWEFIDDIVWLKPEASVKNRVGGFMQHRKPLAYKPNPITEYLMVYRKSTEKLLDWNIRSYESKTIKESKVADGYETTNVWKIDPSFDKIHSAIFPVELCKRVIQYYSYKGDLVFDPFAGSGTMGKTAKMLGRFFFLTEQDPKYFEYMKSKEDDDRLFEERRTRFLTLKQFMAVAK

SEQ ID NO: 68561 - DNA, 918 bp, Unknown
  Obtained from environmental sample
  misc_feature (1)..(918): n is a, c, g, or t
atgacaatcacagatcaggttgtgaaaaacataatcacaaaagtaatcaaatcgcaagattatcggattgaagttgaaaccccccaaacggcaatattcctgcaatttgtgatagatttccttaaaaaaattgcacatgcaaaaatgaattccaaagaaatgacgattgattggtacaaaaatacgcttatgagtgaaaaacttcctaaaacagacattcatataaatgccggattgaataacaaaacgctccgtaatatgtacggcaatgaaaaatggcatactgtaatcgaagtctcaaaaaaacattttgagatgctttggaatgacattcatgatcttgtagaaatggaaaaaggaattgacccgacgttgacaataaaaacaaaaaacgggagtgtggatttaaatttctgtgaaagtttgcttgtcataaatacattggcgactaaacatgccgcgcttcgaggcggttcgtggagttcggctggcaaacgtgccgaaaaatatttaatgcggacactatgcaaaatgtatcaagttcccgagaataattacaatgccgcaaattttgtaaaagacaaaggcaaaaaagttgatagagaagtagacttttatttgttgaatggcaatgaaaaatatcggtgtgaagtcaagctgatgggtaaaggaaaccccgagagcgcagatgcaataattgcaagagataccaatgtatttgtggctgatacgttatcacaacaaaataaagatcaatgtgataaattaggcataaattgggtggaattacgaaatacggacggatacaaacgctttggattgatattggctaagttaggtattccgtatactgactataatggagatttggatatagatttacctaagattttagaagaattgttttccaaacaataa

SEQ ID NO: 68562 - protein, 305 aa, Unknown
  Obtained from environmental sample
  misc_feature (1)..(305): Xaa is any amino acid
MTITDQVVKNIITKVIKSQDYRIEVETPQTAIFLQFVIDFLKKIAHAKMNSKEMTIDWYKNTLMSEKLPKTDIHINAGLNNKTLRNMYGNEKWHTVIEVSKKHFEMLWNDIHDLVEMEKGIDPTLTIKTKNGSVDLNFCESLLVINTLATKHAALRGGSWSSAGKRAEKYLMRTLCKMYQVPENNYNAANFVKDKGKKVDREVDFYLLNGNEKYRCEVKLMGKGNPESADAIIARDTNVFVADTLSQQNKDQCDKLGINWVELRNTDGYKRFGLILAKLGIPYTDYNGDLDIDLPKILEELFSKQ

SEQ ID NO: 68563 - DNA, 849 bp, Unknown
  Obtained from environmental sample
  misc_feature (1)..(849): n is a, c, g, or t
atgaaaaaaataatcagcgggaaagttagggaagtatacgaagtttcggacgacaagctggtcattgttacaacggacagaatctcagcttttgacgtggttttgtcaaagcctgtcgcgaacaagggaaaggttctaaacgccatttcactttattggtttaacttcacaaaaggcatcatccacaaccatattatctcaagcgatcttaaagatatgcctgagtttttccaaaaggacgaattcgaggggcgcacagttctggtaaagaagctaaaaatgctgccgtttgaatttatagtcaggggatatatgttcggcaatatgtgggaagcctattccaagggcgaaaaattctgcggccaaaagattgaaggcgattacaagcttgccgagaaactggccgtcccgctttttaccccttctacaaaagcgcgtgtcgggcatgacgagtatatctccattcaacacgttaaagacgtgattggcgcggagctggccggcaggatagaaacagtcagcctaaagctttacaacacctgctacaactacgcttacaacaaaaacataattatcgccgataccaaatttgaattcggccttgacgagcataacaagctttatgtcgcggacgaaatacttacgccggattcaagcaggttctggagccttttggattataaggcgggggttactccaaaaagttacgacaagcagttggtaagggactggctcacggaaaacaaaataaacggcgagatgcaatttgacaacgtaagcgacgaggttttaagaaaaacgtcggagatctacgcggaatgtctaacgaaaataacaagccttgtatga

SEQ ID NO: 68564 - protein, 282 aa, Unknown
  Obtained from environmental sample
  DOMAIN (1)...(263): SAICAR synthetase
  misc_feature (1)..(282): Xaa is any amino acid
MKKIISGKVREVYEVSDDKLVIVTTDRISAFDVVLSKPVANKGKVLNAISLYWFNFTKGIIHNHIISSDLKDMPEFFQKDEFEGRTVLVKKLKMLPFEFIVRGYMFGNMWEAYSKGEKFCGQKIEGDYKLAEKLAVPLFTPSTKARVGHDEYISIQHVKDVIGAELAGRIETVSLKLYNTCYNYAYNKNIIIADTKFEFGLDEHNKLYVADEILTPDSSRFWSLLDYKAGVTPKSYDKQLVRDWLTENKINGEMQFDNVSDEVLRKTSEIYAECLTKITSLV

SEQ ID NO: 68565 - DNA, 924 bp, Unknown
  Obtained from environmental sample
  misc_feature (1)..(924): n is a, c, g, or t
ttggcattctttacaacaccggcgaaggcggtctgcatgaggatttttataaatacggaaaaaatacaatcgtacaagtcgcgtcgggacgtttcggcgttcaccacgattattgaactcaggcgcggcggtgaaattaaaatgggtcagggagcgaagcccggtatcggcggacacctgccgggaacaaaaatagtaggagacatttcacgcaccagaatgattcccgaaggaaccgacgctatctctcccgcgccgcaccacgatatatactctattgaagatttgcgtcagcttgttttctctttgaaagaagctaccgattaccaaaaaccgattatcgttaaaatcgccgcggtgcataacgtcacagcgattgcgagcggtatcgcaagaagcggcgcggacataatcgccattgacggcttccgcggcggaacgggagccgcgccgacccgcatacgcgaccatgtcggtattccaatagagcttgcccttgccggcgttgacaaaaggttacgcgacgagggaatccgcgataacgtggccattgtcgtaggcggaagtatccgctcaagcgccgatattgtaaaagctctcgctctcggcgcagactgcgtatacatagcgacatccgcgttgatagcgcttggctgccacctttgcagaagctgtcacggcggcaaatgcaactggggtatcgcgacgcaggttcccgaacttgttaaacgccttaatcccgacatcggatacaagcggctcgtcaatttattgacagcgtgggatcatgaaataaaagaaatgatgggcggcatgggaattaactcgattgacggattaaaaggaaacagacttatgcttcgcggagtcggcttaaacgaaaaagagctggaaattttaggaattaaacacgccggagaataa

SEQ ID NO: 68566 - protein, 307 aa, Unknown
  Obtained from environmental sample
  DOMAIN (1)...(275): Conserved region in glutamate synthase
  misc_feature (1)..(307): Xaa is any amino acid
MAFFTTPAKAVCMRIFINTEKIQSYKSRRDVSAFTTIIELRRGGEIKMGQGAKPGIGGHLPGTKIVGDISRTRMIPEGTDAISPAPHHDIYSIEDLRQLVFSLKEATDYQKPIIVKIAAVHNVTAIASGIARSGADIIAIDGFRGGTGAAPTRIRDHVGIPIELALAGVDKRLRDEGIRDNVAIVVGGSIRSSADIVKALALGADCVYIATSALIALGCHLCRSCHGGKCNWGIATQVPELVKRLNPDIGYKRLVNLLTAWDHEIKEMMGGMGINSIDGLKGNRLMLRGVGLNEKELEILGIKHAGE

SEQ ID NO: 68567 - DNA, 696 bp, Unknown
  Obtained from environmental sample
  misc_feature (1)..(696): n is a, c, g, or t
atggcattgaatttattataccccgaatatgaaatgataaggaattacgacagatgtatcacctgccgcgcctgcgaacgccaatgcgccaacgaagcgcacgagtttctggaagaagaaaacaaaatgttatgcgacgattcaaaatgcgtaaattgccaccgttgcgtctctctctgccctacccgcgcactgaaagttgaaaaatgcggcaacacttacaaacacaatatgaactggagcaacaaaacgatagacgaaatctacaaacaggcaaactcaggcggcgtactgctctccagtatgggtaatcccgaaaattatcccgtgtactttgataaaatacttttaaacgcctcgcaggttactaatccgtccatcgacccgttacgcgaacctatggagacaagaatatctttgggcgcgaaaccggaaagaatagaaagagacagcaaaggaaggattatcaacaacctgccgcctcaactgcatttatctatgcctgttatgttctccgcaatgagttacggttccataagttacaacgcgcatgaaagtttagcgcgcgccgccgaagagcttggcattctttacaacaccggcgaaggcggtctgcatgaggatttttataaatacggaaaaaatacaatcgtacaagtcgcgtcgggacgtttcggcgttcaccacgattattga

SEQ ID NO: 68568 - protein, 231 aa, Unknown
  Obtained from environmental sample
  DOMAIN (106)...(230): Conserved region in glutamate synthase
  misc_feature (1)..(231): Xaa is any amino acid
MALNLLYPEYEMIRNYDRCITCRACERQCANEAHEFLEEENKMLCDDSKCVNCHRCVSLCPTRALKVEKCGNTYKHNMNWSNKTIDEIYKQANSGGVLLSSMGNPENYPVYFDKILLNASQVTNPSIDPLREPMETRISLGAKPERIERDSKGRIINNLPPQLHLSMPVMFSAMSYGSISYNAHESLARAAEELGILYNTGEGGLHEDFYKYGKNTIVQVASGRFGVHHDY

SEQ ID NO: 68569 - DNA, 1122 bp, Unknown
  Obtained from environmental sample
  misc_feature (1)..(1122): n is a, c, g, or t
ttggagcctttttttttggagggttgcggattgatgaatgaagggcaggtgcggataccgtccggctgcgccatatcgggtattatcgacaagtccgggcggcgaatgagcggcgaggcgatcatcaattccatcgccattatgcatgaccgttccaacgggctgggcggcggttttgccgcttacggaatctacccggaatataaagattattatgccttgcatttattttacgactccgtgtccgcgaaaaaagaatgtgaggaatttctggaaaagcattttgacatcatcaacctttccaagatcccgacaagaaaaatgaaagaaattaccgatgagccgttgatttggcgttacttcgttacacccctgccgacaaaactcagcgaaagccagcttgacgaacgggagtttaccgccaaatgtgtgttccgtgtcaacacacaaattaaagacgcttatgttttttccagcgggaaaaatatgggtgtgttcaaggctgtcggctttcccgaagacgtagggcgtttctacaagctggaagaatatgaaggttggtgctttactgcgcacgggcgctacccgacaaatacgccgggctggtggggcggcgctcatcccttcgccttgcttgattattcagttgtacataacggcgaaatatcttcctacgacactaaccggcgctcaatcgaaatgtacggttataaatgctcgcttcagacagataccgaagtaatcacttatataatagattatctgcacagaaaacaaaaactttcctttgatgaaattgccctggttgtggcggctccgttttggcagaccattgagcatcaggcagccaaagaacgggaacttaatgaatatttgcgcgtaatgttcagcgctcaattaataaccggcccgttttcaattcttgtaggttttgatggcggacttatggcgttaaacgacaggttgaaactgcggagtatggtagtcggagaaaaagacgatatggtttatgtggcgagtgaagaggcggctattcgtatcattgaaccgaaccttgacacggtgtgggctcccaggggcggacagccggtaatcgtcaacataaacagaggtaaagcataa

SEQ ID NO: 68570 - protein, 373 aa, Unknown
  Obtained from environmental sample
  DOMAIN (143)...(342): Glutamine amidotransferases class-II
  misc_feature (1)..(373): Xaa is any amino acid
MEPFFLEGCGLMNEGQVRIPSGCAISGIIDKSGRRMSGEAIINSIAIMHDRSNGLGGGFAAYGIYPEYKDYYALHLFYDSVSAKKECEEFLEKHFDIINLSKIPTRKMKEITDEPLIWRYFVTPLPTKLSESQLDEREFTAKCVFRVNTQIKDAYVFSSGKNMGVFKAVGFPEDVGRFYKLEEYEGWCFTAHGRYPTNTPGWWGGAHPFALLDYSVVHNGEISSYDTNRRSIEMYGYKCSLQTDTEVITYIIDYLHRKQKLSFDEIALVVAAPFWQTIEHQAAKERELNEYLRVMFSAQLITGPFSILVGFDGGLMALNDRLKLRSMVVGEKDDMVYVASEEAAIRIIEPNLDTVWAPRGGQPVIVNINRGKA

SEQ ID NO: 68571 - DNA, 1101 bp, Unknown
  Obtained from environmental sample
  misc_feature (1)..(1101): n is a, c, g, or t
atggccgagagccntggnaatgcgacaaaccaatcagtgtggtggactaccagcgatcccaagatcgtaaagtttcataataagaatagtagtaatattgttgcgcttaatcccataaagccgggaacagcaaccattaccgctactacaatagacggcgattacaaggcgagatgcgaagtaaccgtatactccgttcccgtaaccggcgtaaccctgagcgacacaaagatcgatctaaccatccatgagaatagttcgcatccgccatcttcttttgtgtacgctaatgttttatctaacgaagataatcaggcgtcgaaccaaaaagtggcatggaaatccagcaataccaatgtcgcaacagtgtcttctgatcactctattgggggtactagtttgcttgttacctatgcgggtaatactattcgagttacccccgtggcggaaggaacaacgaccattaccgctaccaccgaggagggcggctacacggcaacgtgcgccgtaaccgtaacctacagtacagaagagcctaagccgccccccgagttcgccggcacaccggggcttaagtttcaaatgcttgacgcggagggaaatcccgtcagtgatcctttgagatgcgtcgcgtatcgagtcattcaaggcactgctatcagcggcgatgtggttatacctcccactcgcagcggcttgcccgtaacgcaaatcggcagcgacgcattcaggaacaccgcctttatcagcataatcatacctaacagcgttaccagcattgagtttgcggctttttccgattgtaccggccttaccagcgtaatcatacctgacagcattaccagtatttcggccaggacttttagcggctgcgccagccttgccagcgtaaccataggaaacaacgttaccggcattcaggaggaagctttttctggttgcaataaccttaccagagtaacatttcaaggcacgattacttcaagcaacttcagttattacttattccccggagatttacgcgacaaatatcttgcgagcgatggcggtcccggaacatatgccagatttgtcaatggcttatcatggagaaaacaatag

SEQ ID NO: 68572 - protein, 366 aa, Unknown
  Obtained from environmental sample
  DOMAIN (67)...(170): Bacterial Ig-like domain (group 2)
  misc_feature (1)..(366): Xaa is any amino acid
MAESXGNATNQSVWWTTSDPKIVKFHNKNSSNIVALNPIKPGTATITATTIDGDYKARCEVTVYSVPVTGVTLSDTKIDLTIHENSSHPPSSFVYANVLSNEDNQASNQKVAWKSSNTNVATVSSDHSIGGTSLLVTYAGNTIRVTPVAEGTTTITATTEEGGYTATCAVTVTYSTEEPKPPPEFAGTPGLKFQMLDAEGNPVSDPLRCVAYRVIQGTAISGDVVIPPTRSGLPVTQIGSDAFRNTAFISIIIPNSVTSIEFAAFSDCTGLTSVIIPDSITSISARTFSGCASLASVTIGNNVTGIQEEAFSGCNNLTRVTFQGTITSSNFSYYLFPGDLRDKYLASDGGPGTYARFVNGLSWRKQ

SEQ ID NO: 68573 - DNA, 1233 bp, Unknown
  Obtained from environmental sample
  misc_feature (1)..(1233): n is a, c, g, or t
ttgaagtcttacccgcggcttccggacgaccgtgtggacttcgggggggtaatagccgccaaggagaggctcttccgccgggctttcgcgagtttctccgatacgcccgattttaccaaattttgcgccgcggaagccggctggctcgacggttacgcgctcttccgcgtagtcaaggcgatgcacttggagcggccttggtgggagtgggaggcgccgtacaagttgcgcgaccccggcgccctcgattccgccgccgaaaagtacgccgacgacctgcggtaccacaagttcctgcagtacatatttcacctgcagtggcggaatctgcgggcgtttgccgccgaaaaggggatctcgctcatcggcgatgtgcccttttacaccgcatacgacagctccgacacgtggacggagccctcgcagttcctctttaataaagacgtcaagcccatagcggtcgccggggtgccgccggattacttcagcgagaccgggcagctttggggcaacccgctgtaccggtgggacgccatgaaggaggacaactactcgtggtggcgccgccgcatagagaaggcgctgcatcttgccgactacatccgcatcgaccacttccgcgcctttgacagttactgggcgatcccctacggcagcccgaccgccgtcaagggcaaatggcgcaaaggccccgggcggcacttctttgacgccataaaggaggcgcttggcgttctgccgttcatagcggaggacttgggcgacatcaccgccggcgtcataaagctgcgcgacagcatcaaagcgccggggatgaagatactgcagttcgccttcgacgccaattttaacaacccgtacttgccgtataacataaccaaggacagcgtgacctacaccggcacgcacgacaacgacacgtcgctcggctggttttcaacgctctcggtggagggcaaggagcgggtttgcggctacctcggctgcgcggagacggagaaagagttttgggaggcgttcatccgctgcgccatggcctcgtcttcgtggctgtgccttatccccatgcaggatgtgctcgcactgggcgcagggcataggatgaatatgcccgggacgatgtgggggaactggcagtggcggatgacgcaggagatgccaataagcgagaacatggcgcgtttggccgagtggacgcgggtttacggcagggcggcggactccggtaaatga

SEQ ID NO: 68574 - protein, 410 aa, Unknown
  Obtained from environmental sample
  DOMAIN (1)...(402): 4-alpha-glucanotransferase
  misc_feature (1)..(410): Xaa is any amino acid
MKSYPRLPDDRVDFGGVIAAKERLFRRAFASFSDTPDFTKFCAAEAGWLDGYALFRVVKAMHLERPWWEWEAPYKLRDPGALDSAAEKYADDLRYHKFLQYIFHLQWRNLRAFAAEKGISLIGDVPFYTAYDSSDTWTEPSQFLFNKDVKPIAVAGVPPDYFSETGQLWGNPLYRWDAMKEDNYSWWRRRIEKALHLADYIRIDHFRAFDSYWAIPYGSPTAVKGKWRKGPGRHFFDAIKEALGVLPFIAEDLGDITAGVIKLRDSIKAPGMKILQFAFDANFNNPYLPYNITKDSVTYTGTHDNDTSLGWFSTLSVEGKERVCGYLGCAETEKEFWEAFIRCAMASSSWLCLIPMQDVLALGAGHRMNMPGTMWGNWQWRMTQEMPISENMARLAEWTRVYGRAADSGK

SEQ ID NO: 68575 - DNA, 2808 bp, Unknown
  Obtained from environmental sample
  misc_feature (1)..(2808): n is a, c, g, or t
atgcacacttttatcatagaaaacgaagctcttgagggcgttaaaagaatcgccgggaaagtcgcggcggattttgagagggtctgcggttcgcttccctcaattacggataagcctgaaaacagcgggaacgcggttcttttcgcgactttggggcacagcccgcttcttgacacgctggcaaaagcgggagaattcgacccgtctttgctccagggcaaaagagaaatataccagatcaagtttatcgaagctccgttccccggaaccgcgaaaatcctgctcatctgcgggagtgacaagcgggggaccatctacggaatgttcgcgctgtcggaatttatcggggtttcgcccctgcatttctggggggatgtagagccgttaacccgtgataaaattaagttaacaaccgaaatcgaaacaatctcaaaagagccaagcgtcaaatacaggggcttttttatcaacgacgaatggccatgtttcgggaactggacttttgagcgtttcggcggctttacggcggaaatgtacgatcatgtgttcgagcttttactgcgcctgaaggggaattacctctggcccgcgatgtggacttcttctttcccgctggacggcccgggaagccttaacgaggagttagccgacatctacggtgttgttatgggcgcttcccaccacgagccctgcctgagagccagcgaggaatgggacaaggtccgcggaaaggactccgtgtacggaaacgactggaactattacaaaaacaaggacgggcttttacgctactgggaggacgggcttaaaagaagcggaaaatacgaaaagatcatcacgataggaatgcgcggggaacgtgacagttccatgctcggcgacgcgacactaaaggacaacatcgacgtattaaaagacataattacaaaccaacgggtgttaataaaaaaacacgttaatcaaaaccttgacgaggtcccgatggtcctggcgatatacaaagaagtcgaggaatattattacggcgatgaaaagacagccgggcttaaggactgggacaagcttgatggcgttatctgcatgttctgcgaggacaatttcgggtttatgcgctcccttccatcggaggatatgcgcgggcgcaagggcggcttcggaatgtactaccactttgattatcacggggggccggtttcttatgagtggatgccctcaatttcttttgagagaacatgggaacagatgtgcatggcttatgattacgggataaaggacatttggattgtcaatgtcggcgatttgaaattcaacgaagtccccctcgcttattttatggagcttgcctttgattttgaaaagtgggggaccaattcgcctaacagcatagatcaatatacaaagatatggctggaaaaaaccttcccgcggacggacgctaatgttcgtgaaaagctcgcgtatgtccttcacggatatatacggatgaacgccatgcgccgccccgaggcgctgaactcaggcgtttaccacccctgccattaccttgaggctgacaggatgctggacattgccgcgagtattgagaaaacaaacaaggaagtttattccgcgttagccgcaaatgaaaaagacgcgtattacagcatgatatactttcccgctaaggcgagcgtcaatctgataagaatgcatctgtacgcgggaaaaaacctccatctggcgaaacagggaaagggaatcgcaaatatattttccacactggtggctgaatgcatcgaaaaagaccgcagtctgcacaaagagtttgcctcgtttaaaaacggaaaatggaagggcatggagcttgaacagcacataggatttgtcaaatggaacgaagataattacagatatccgctgatggtgacagttgaacccgcccataagccccgtatgtccgtttccagaaaagacagggaagaagtttattccaaaacctatggcagcccgatgacggtttacatagacgatttcctttacgacggtaatgacgaggttatcctcgaaatcgccaacgacggaatcggcatttttgattatgtaatcgagccggagcgggaatatagctggctgagcataagccccatgaagggaacggtcgtgttccaggaagaaatagtcctgcgctgtaacaggatgactaataatataacgagcgcccggctgttaatcaaagacaaggaaactacggtcgccgtcgaaataagagccaggaaacagtatacagacaaactgccgcccatgacttttttggagaacaacggagtaatcgttattccggcgaaccgtttctgcggaaaaaaagacgttcaggccggcaaatttatagagttgaaaaactacggcagaagcggggttggaatgaaagtttttcccacgaccgcctgttttacggaaaatgacgacgtaccttccctctgctaccgctttttaatagaggatgggggcaattatacggctgaagtatggacgaccccgacaaattcaacgcaaaacaaacgcccccttcgtttcctctttgaaagcactcagggaaggcaaatcattacggccgtgcccgccgattttatggcgggcagcccttcggaccaaagatggtgcgagggggtccttaacaatatacgtatcagcaaaatttccttaactcttgaagagggagtgcaggaaatctcaatcggcgccctggaaccggctcttgtgcttgaaaaagtgcttatctacaaagagggcaggggcccgctggcgtcgtatctggggccgcccacttga

SEQ ID NO: 68576 - protein, 935 aa, Unknown
  Obtained from environmental sample
  misc_feature (1)..(935): Xaa is any amino acid
MHTFIIENEALEGVKRIAGKVAADFERVCGSLPSITDKPENSGNAVLFATLGHSPLLDTLAKAGEFDPSLLQGKREIYQIKFIEAPFPGTAKILLICGSDKRGTIYGMFALSEFIGVSPLHFWGDVEPLTRDKIKLTTEIETISKEPSVKYRGFFINDEWPCFGNWTFERFGGFTAEMYDHVFELLLRLKGNYLWPAMWTSSFPLDGPGSLNEELADIYGVVMGASHHEPCLRASEEWDKVRGKDSVYGNDWNYYKNKDGLLRYWEDGLKRSGKYEKIITIGMRGERDSSMLGDATLKDNIDVLKDIITNQRVLIKKHVNQNLDEVPMVLAIYKEVEEYYYGDEKTAGLKDWDKLDGVICMFCEDNFGFMRSLPSEDMRGRKGGFGMYYHFDYHGGPVSYEWMPSISFERTWEQMCMAYDYGIKDIWIVNVGDLKFNEVPLAYFMELAFDFEKWGTNSPNSIDQYTKIWLEKTFPRTDANVREKLAYVLHGYIRMNAMRRPEALNSGVYHPCHYLEADRMLDIAASIEKTNKEVYSALAANEKDAYYSMIYFPAKASVNLIRMHLYAGKNLHLAKQGKGIANIFSTLVAECIEKDRSLHKEFASFKNGKWKGMELEQHIGFVKWNEDNYRYPLMVTVEPAHKPRMSVSRKDREEVYSKTYGSPMTVYIDDFLYDGNDEVILEIANDGIGIFDYVIEPEREYSWLSISPMKGTVVFQEEIVLRCNRMTNNITSARLLIKDKETTVAVEIRARKQYTDKLPPMTFLENNGVIVIPANRFCGKKDVQAGKFIELKNYGRSGVGMKVFPTTACFTENDDVPSLCYRFLIEDGGNYTAEVWTTPTNSTQNKRPLRFLFESTQGRQIITAVPADFMAGSPSDQRWCEGVLNNIRISKISLTLEEGVQEISIGALEPALVLEKVLIYKEGRGPLASYLGPPT

SEQ ID NO: 68577 - DNA, 561 bp, Unknown
  Obtained from environmental sample
  misc_feature (1)..(561): n is a, c, g, or t
ttgtttcagatggaccgcagccaaaattatagaatgggaatgagatccggcctgttcagcatatatccgacgatatggctcgccctcgcgcttctggcgctcagctggtacatgctgtacaagcggccctggggcctccgcctccgcgccgcgggcgagcatccgcaggccctcgcctcggccggcgtgaacgtgatcaggatacgctacatcgccgtgcttatctccggcattctcgccggtcttgccggcggctgcattgtccttacccaggacatccaatacaccgtcagtacgataaacggaaagggttttatcgcgctcgccgcggtgtcattcggacgctgggttcctttaggcatactcggctccagcttcctgttcggaatgtcatccgcccttgcggttaacatcatcaacatcagcggcctgcaattcctgccctcggaattcttcaacatgatgccctatctgattacgcttgtcactctggttcttttcagcggcaaggactacgcgccaagggccgcgggcaagccctacgataaggggaaaagctaa

SEQ ID NO: 68578 - protein, 186 aa, Unknown
  Obtained from environmental sample
  DOMAIN (1)...(164): Branched-chain amino acid transport system / permease component
  misc_feature (1)..(186): Xaa is any amino acid
MFQMDRSQNYRMGMRSGLFSIYPTIWLALALLALSWYMLYKRPWGLRLRAAGEHPQALASAGVNVIRIRYIAVLISGILAGLAGGCIVLTQDIQYTVSTINGKGFIALAAVSFGRWVPLGILGSSFLFGMSSALAVNIINISGLQFLPSEFFNMMPYLITLVTLVLFSGKDYAPRAAGKPYDKGKS

SEQ ID NO: 68579 - DNA, 1515 bp, Unknown
  Obtained from environmental sample
  misc_feature (1)..(1515): n is a, c, g, or t
atggtcggagtagcgggattttccgcgcgcgtattcggcgctcttgcaagaaagggaatcagcgtaatgctgattactcagagttccagcgaatactcaatttgtttcgcggttttgccggaagacgcgcaaaaagcggaaagctctttaaaagaagaatttgcgcatgaaatccgcaatcgttctctggaaaacccgattatagaaaaagacctttccataatcgctgtggtaggctccgcaatgaaaagcacttcgggcatttcagggaaatttttccacgcgcttggtcgcaacggaatcaatatcatcgctattgcgcaaggctcgtcggaaacaaatatttccgcagttatctccgcctcagacgaaggcaaggcgcttaacgccattcatgacgctttctttttcgctaaccagcgttcagtcaatctgttccttatcggcacaggcttgattggcggtactttgttggatcaaatagccgaaaaccgcgaaaaattggcggataacatgatcaagattaatttgataggagccgccaattacgacaaaatgctcttttccctcgacggacttgatccgaaagaaacaaaaaaaatgcttactaccgcgggcaaagttcagggtacgcagtcaatagagccgaaccaaaaaggagcgaacgcttttatcgaaaaaatggcgtcgttcaatcttcccaattcatgcttctgcgattgtaccgcaagcgaggatatcgccgccctttacgaaaaaatacttcactattccatacctattgttacgccgaataaaaaggcaaactcaggttcttatgactattacaaacggcttacaacatattcaagagaaaggggaatcccttatctttatgaatgtacggtggcggcgggactgcctgttatttctacgttacgcgaccttttccttgccggggataaagttatcaaaatagaagcggtgttatccggtacattaagttttatctttaacagttttgacggttcaaaacctttctcatctcttgtgcgcgaagcgaaagagaagggctacactgaacccgacccaagagacgaccttaacgcgatggacgccgcgcgaaaagttttaatccttgcgagggaatgcggtcttaaccttgaatttaagaacgtaaaaatcgatcctattctgcccaaggcttgtttcagcgcaagaaatatagacgctttttttaaagaacttaaaaaagcagacgctgattttgaaaaacggcgcgcgcaggcggcggcggaaagcaaacaacttcgctatgtcgccgtgatagaagaaggaaaggcaaaactttctttccgcgccgaagaagaaggaagccccttccgctcgttagtggacagcgataatatcgtcgttattacaacaaaccgttattcaaaactcccaatggttatcaagggaccgggagccggcgctcaagttacggcgacgggagtgttcgccgacattctgcgcaccgcaagaacgttggtatag

SEQ ID NO: 68580 - protein, 504 aa, Unknown
  Obtained from environmental sample
  DOMAIN (149)...(293): Homoserine dehydrogenase, NAD binding domain
  misc_feature (1)..(504): Xaa is any amino acid
MVGVAGFSARVFGALARKGISVMLITQSSSEYSICFAVLPEDAQKAESSLKEEFAHEIRNRSLENPIIEKDLSIIAVVGSAMKSTSGISGKFFHALGRNGINIIAIAQGSSETNISAVISASDEGKALNAIHDAFFFANQRSVNLFLIGTGLIGGTLLDQIAENREKLADNMIKINLIGAANYDKMLFSLDGLDPKETKKMLTTAGKVQGTQSIEPNQKGANAFIEKMASFNLPNSCFCDCTASEDIAALYEKILHYSIPIVTPNKKANSGSYDYYKRLTTYSRERGIPYLYECTVAAGLPVISTLRDLFLAGDKVIKIEAVLSGTLSFIFNSFDGSKPFSSLVREAKEKGYTEPDPRDDLNAMDAARKVLILARECGLNLEFKNVKIDPILPKACFSARNIDAFFKELKKADADFEKRRAQAAAESKQLRYVAVIEEGKAKLSFRAEEEGSPFRSLVDSDNIVVITTNRYSKLPMVIKGPGAGAQVTATGVFADILRTARTLV

SEQ ID NO: 68581 - DNA, 1197 bp, Unknown
  Obtained from environmental sample
  misc_feature (1)..(1197): n is a, c, g, or t
atggctatcgctcaaaatataaaaaacgctcttgccggttcttcgatgattcgcaagatgtttgaagaaggcatacagctaaaaaaacagcacggggaaaacaatgtttttgatttctcgcttggaaacccggatatagagccgccgcccgcttttcacaaagtttttgtaaaattagcgaaggaagacgcgaaaggctctcacggttatatgccgaatgccggctatccgcaggttagagaagcgttggctaaaaaagtatgcagagagcagaatgtaaatattgacggctctcatatagtcatggcggttggagccgccggcggacttaacgcagtcttcaagacaatctgcgatccgggcgatgaagttattgtaacacgaccgtactttatggaataccgcgcctataccgccaaccacggggcaaaacttgtcgaagttgacgcgcatgacgatttcaatttaaacatttccgctatcggcgcggcgttgaacgaaaaaacagccgcagtccttattaactcgcccaataatccgacggggaaagtttattccgcttctgtccttgccgaactttcatcccttcttacggaacacggcaaaaagaccggacgttttccctaccttgtctcagacgaaccataccgcgaaattgcgtatgacgttgacgttccgccgtttttatcatgttataacgagtctatagtagtaacttcctattccaaaagcctctctcttcccggcgaacgtatcggctttatcgccgtaaaccccgcggcaagcggcaaggacgatcttcttaacggacttatctacgccacaagggtgcttggttttgtaaacgctcccgctcttatgcaaaaaatagtggcgtctctcatagatgcgcgagttgacgtttcaatttacgcgcgaaggcgggacgcttttatgaaagtgttgaataactcaggtattgaatattccacaccgcagggagcattctatcttttctgcaaagtccctaaaagcaaaacaggaaaacaggaaaccgacgataaagcgtttgtagaacaccttaaaaaacatctggttttaggagtgcccggaagcagtttcggcaaaagcggctggctgcgttttgcctactgtgttgacgaaaaaataatcagcgcttctcaaaacgcttttaaatcggcagtggaaagctggtaa

SEQ ID NO: 68582 - protein, 398 aa, Unknown
  Obtained from environmental sample
  DOMAIN (77)...(318): Beta-eliminating lyase
  misc_feature (1)..(398): Xaa is any amino acid
MAIAQNIKNALAGSSMIRKMFEEGIQLKKQHGENNVFDFSLGNPDIEPPPAFHKVFVKLAKEDAKGSHGYMPNAGYPQVREALAKKVCREQNVNIDGSHIVMAVGAAGGLNAVFKTICDPGDEVIVTRPYFMEYRAYTANHGAKLVEVDAHDDFNLNISAIGAALNEKTAAVLINSPNNPTGKVYSASVLAELSSLLTEHGKKTGRFPYLVSDEPYREIAYDVDVPPFLSCYNESIVVTSYSKSLSLPGERIGFIAVNPAASGKDDLLNGLIYATRVLGFVNAPALMQKIVASLIDARVDVSIYARRRDAFMKVLNNSGIEYSTPQGAFYLFCKVPKSKTGKQETDDKAFVEHLKKHLVLGVPGSSFGKSGWLRFAYCVDEKIISASQNAFKSAVESW

SEQ ID NO: 68583 - DNA, 1242 bp, Unknown
  Obtained from environmental sample
  misc_feature (1)..(1242): n is a, c, g, or t
atggaaacaaatctcaatcaccgcaaagccggaattaatctgcggcttgtaacgcaaaacggacagcctgcgacgaatcaggaaattaaaatagagcagagaagtcatcagtttttattcggcgtcggcgggtttgaagcgttagagcttgccggaggaaaccctgacggcggcgcaatcgacgaaaaacgcgcggcgtttttacaggaaaaacttgacaaactttttgctcttaacaattacgcgacattgccgttctatctgggacgttatgagccgcaggaaggcaagcccgatgaaaaacggttaaaagccgcagccagttggtttgcgcagaggaatataattacaaagggacatcccttgtgctggcacacagtctgcgctccgtggcttatgaattattccaacgctgaaatattaaaaaaagtaatagaaagaattgagcgagacgtatccgcttttgcgggattaatcgatatatgggacgtaattaacgaagttgtaattatgcctatttttgacaagtacgacaacgccgttacgcgaatatgcaaggaatacggacaagtgcgtattgttaaagaagtatttgaggcggcaaagcgggcgaatccgaacgcagtattattgttaaacgattttgacacatcaaaagaatatgaaatccttatagataaatgtttgcaggcgggtattcctattgacgcaatcggcatacaatcgcaccagcaccaaggttattggggcgcggaaaaagtgaacaatgtgcttgaacgtttttcccgtttcggcttaccccttcactttacggaaaatacgcttatttcaggcgatataatgcccgagcacatagttgatctgaacgactggcaggtggaagagtggcctacaacccccgaaggagaggaacgccaaaagcgcgaacttatcgaaatgtacgaactcctgttcgcccatccgcaggtacaggcgattacaacatggtcgggatcggataacgcatggcttcacgcgcctgccggcttccttcgcacagataacagcgaaaaaccagcatacaaggcgttacgctcaaaaatagaaaacgaatggcgcacggtaaaaacaacacgcacggacgcaaacggcgttgtaaacatggaaggttttaagggcgcgtatgaaatctcatgtatgggcaaaaacgccctttttgaattggacgggaaaagcaatgctttgaaactgcaattggaataa

SEQ ID NO: 68584 - protein, 413 aa, Unknown
  Obtained from environmental sample
  DOMAIN (67)...(361): Glycosyl hydrolase family 10
  misc_feature (1)..(413): Xaa is any amino acid
METNLNHRKAGINLRLVTQNGQPATNQEIKIEQRSHQFLFGVGGFEALELAGGNPDGGAIDEKRAAFLQEKLDKLFALNNYATLPFYLGRYEPQEGKPDEKRLKAAASWFAQRNIITKGHPLCWHTVCAPWLMNYSNAEILKKVIERIERDVSAFAGLIDIWDVINEVVIMPIFDKYDNAVTRICKEYGQVRIVKEVFEAAKRANPNAVLLLNDFDTSKEYEILIDKCLQAGIPIDAIGIQSHQHQGYWGAEKVNNVLERFSRFGLPLHFTENTLISGDIMPEHIVDLNDWQVEEWPTTPEGEERQKRELIEMYELLFAHPQVQAITTWSGSDNAWLHAPAGFLRTDNSEKPAYKALRSKIENEWRTVKTTRTDANGVVNMEGFKGAYEISCMGKNALFELDGKSNALKLQLE

SEQ ID NO: 68585 - DNA, 1089 bp, Unknown
  Obtained from environmental sample
  misc_feature (1)..(1089): n is a, c, g, or t
atggcgagcgaaaggaacgacgaaatctccgatatgtcgcggtatttcaacatgacgctggctaaaattaaaaaattgatcatttcaataaaagagcacgccggtgtattatccgacaccggcaatgagctggcaagtaacatgaccgagactgccgcagctatgaacgagattaccgccaacattcaaagcatcaggggccggatgataaaccaaagcgcgtctgtaacccaaaccggcgctacaatggaacaaatcacagtcaatatcggcaagctcaacggatttgtggaacagcaatctgccagcgtaagcaagtcgtcttccgccgttgaggaaatgcttgccaatatacaatctgtaacccagacgcttgttaaaaacggcgaaagtgtaagcgaattaaccacttcttccggtcttggccgcgtaagtatgcaggacgcaacttccgatattcaggaaatcgcccgcgattcggaggggctgcttcagatcaacaaagtgatgaaagacatcgccagccagactaacctgctttcaatgaacgccgcgatagaagcggcgcacgccggagcggcgggcaaaggtttcgcggttgtcgccgaagaaatacgcaaactcgcagaaagctccagcgaacagtcaaaaacgataagcgcggtactcaagaagataaaagcctcgattgataaggtcagcgcgtctacgggcaccacgctcaccagatttgaagtgattgattccggcgtanaaaccgtatcggaacaggaggagaatatccgcagcgccatggaagaacaaaacgagggcagcaagtacatcctggaagccgtcggcaagttaaatgacattacccggcaggttaaggaagaatcctcggaaatgcttaacggcagccgcgaggttatacaggagagcaggaatctggatcaggtaacccaggagatcaccggcggtattaacgagatggctaccggtgcggaacaggtcaacatttctgtaaacagggtcaacgagataagcgcaaagaacagggaaaacattgatctattagtccgagaagtttcgctgtttaaggttgagtaa

SEQ ID NO: 68586 - protein, 362 aa, Unknown
  Obtained from environmental sample
  DOMAIN (98)...(318): Methyl-accepting chemotaxis protein (MCP) signaling domain
  misc_feature (1)..(362): Xaa is any amino acid
MASERNDEISDMSRYFNMTLAKIKKLIISIKEHAGVLSDTGNELASNMTETAAAMNEITANIQSIRGRMINQSASVTQTGATMEQITVNIGKLNGFVEQQSASVSKSSSAVEEMLANIQSVTQTLVKNGESVSELTTSSGLGRVSMQDATSDIQEIARDSEGLLQINKVMKDIASQTNLLSMNAAIEAAHAGAAGKGFAVVAEEIRKLAESSSEQSKTISAVLKKIKASIDKVSASTGTTLTRFEVIDSGVXTVSEQEENIRSAMEEQNEGSKYILEAVGKLNDITRQVKEESSEMLNGSREVIQESRNLDQVTQEITGGINEMATGAEQVNISVNRVNEISAKNRENIDLLVREVSLFKVE

SEQ ID NO: 68587 - DNA, 720 bp, Unknown
  Obtained from environmental sample
  misc_feature (1)..(720): n is a, c, g, or t
gtggtgttctttgacgcgctacgggcaaatatccgggacgagggccaagtgagcaagaaagcggtatatttggctttggcgatacggccggacggccaaaaagagcttttagggatgtggattgagaggaacaaaggctcaaagttttggatggggatactgaacgagcttaagaaccgcggggttaaggacaccctgatagcgactgtggacgggctcactggatttccggaggcgataaatgccgtttttccggataccgaagtccagctgtgcatggttcacatggtgcgcaattctgtgaaatacatttcgtacaaagaccgcaaggcggtaacatccgaccttaaggaaatttatcttgccccgtcggaagaggccgcctgcaatgccctggatcgcttcggcgaaaaatgggacggcaagtacccgaccatttccaggtcatggcggagccggtggaacgaggtaatcccgttcatgaaattctcccctgaaatacggaaggctatatataccaccaacgctattgagtctgtcaattacaatttgcaaaggaaccttaagacccgccagtcatttcccaacgacgaagcggccatgaaattaatatttatgatcttgcggaggatctcaaaaaagtggacaatgccgattaggaattgggctgcggcgttaaaccagtttgcactcatttacggggacagagtcccgttatga

SEQ ID NO: 68588 - protein, 239 aa, Unknown
  Obtained from environmental sample
  DOMAIN (1)...(218): Transposase, Mutator family
  misc_feature (1)..(239): Xaa is any amino acid
MVFFDALRANIRDEGQVSKKAVYLALAIRPDGQKELLGMWIERNKGSKFWMGILNELKNRGVKDTLIATVDGLTGFPEAINAVFPDTEVQLCMVHMVRNSVKYISYKDRKAVTSDLKEIYLAPSEEAACNALDRFGEKWDGKYPTISRSWRSRWNEVIPFMKFSPEIRKAIYTTNAIESVNYNLQRNLKTRQSFPNDEAAMKLIFMILRRISKKWTMPIRNWAAALNQFALIYGDRVPL

SEQ ID NO: 68589 - DNA, 489 bp, Unknown
  Obtained from environmental sample
  misc_feature (1)..(489): n is a, c, g, or t
gtgtacaacgctatactgccaaggagaggaagtatggcgatcacaaaagaagtgttggacgagttgatgaaagactgccatggggcgggcgatttttacggccctgacgggctgaacaagcaattgagcaaggcgcttttcgagcggacgatgcaggctcaattaacaaaacagctcggctatgaaaaaagcgaagcgggtgagaaacaaaccggcaaccgccgcaacgggaattcggctaagaccctgcggacaggccaagagcctatggacattgcagtcccccgcgaccggaaatttgagccgaaaataatccccaagcaccagtgggaatggcgcgggtttaacagcaaaatcctgtcaatgtacggccttgggctttccaccaagacgatgcaagagaacataaaagaaatatacaacgttgaagtatcgcctgaattgataagccgcgtaacggacgaagttaaagggctggtcgaggaatga

SEQ ID NO: 68590 - protein, 162 aa, Unknown
  Obtained from environmental sample
  misc_feature (1)..(162): Xaa is any amino acid
MYNAILPRRGSMAITKEVLDELMKDCHGAGDFYGPDGLNKQLSKALFERTMQAQLTKQLGYEKSEAGEKQTGNRRNGNSAKTLRTGQEPMDIAVPRDRKFEPKIIPKHQWEWRGFNSKILSMYGLGLSTKTMQENIKEIYNVEVSPELISRVTDEVKGLVEE

SEQ ID NO: 68591 - DNA, 1410 bp, Unknown
  Obtained from environmental sample
  misc_feature (1)..(1410): n is a, c, g, or t
gtgcgtagcgccgagcaattgcttgaagatgaaaagcagcagctgttatttgccgaggaggccgaacagcctgaaacaaatgaaggaaagcctttagagcttcaaactgtcaaatcatttacacgcaagaagaatggcgggcgcaagccgattagcgcgaaccttgagcgaaggccgagggtcatagacataccggaaagcgaaaaaacctgcgcctgcggggcgaatttgactcgaataggcgaagaaaccagcgaaaaactggtgataataccaccgcagatttatgtagaccaaatagtcaggccaaaatacgcctgcaggcaatgcgaagggacggaagatgaagaggagcctgcggtgcgaatcgcgcctgtagagccatctataattccccggagcatagcgagcccaagtttgctggcgaccatcttcacgcaaaagtttgaaatgcacctgccttattacaggcaggagaaacaatttgagcagataggagcagcaataagccgccaggatatgagcaactggcagcagcaggcgtatgaaaaacttaagccgttattcgctatactggaagaaacagtaaaaagcggccctgtaatgcagatggatgagactgaggtgcaggtgataggggaagaagaccggagcgacacacagaaaagctatatgtggcttgctcgcggcggtcctgtcggtaaaaaagtaattttgtataagtaccgtccgactcgcgccgcatataacgtcatggaattcctccaagggtacagaggctatctgcaaacggacgggtacaaagggtatgacagcgcggccaaagaccttaccggaataatacaggtgggatgttttgcacatgcaaggcggaagttttttgaggccgctaaaataagctctaaaagccggtctgctgaagaaggcatgaaatatatccgctgcctatacgtgatagaaaatgaattgcgggataagaatattgataatggcatattcttgtccgaaaggaaggcccgtgcggggcctgtgctggagaagttcaaggcatggcttttaaagcgcaaagatgaagttcctgaaagcactcttttagggaaagcaatatattacagccttgcccaatgggacaaaatggtagcttaccttgagagcccgtatttaactcctgacaacaacgcttgtgaaaacgcgatacggccttttgttatcggaagaaaaaattggctgttctgccagagtgtagacggtgccaaaagttcatgcggtatatttaccctcatagagacggcaaagcagaacggcctcattccgtttaaatatctgacggctgtttttgaaagagccccgtttgctttaactcctgaagactgggaaaaactactcccctggaacattttcaccgcttaa

SEQ ID NO: 68592 - protein, 469 aa, Unknown
  Obtained from environmental sample
  DOMAIN (77)...(279): Transposase IS66 family
  misc_feature (1)..(469): Xaa is any amino acid
MRSAEQLLEDEKQQLLFAEEAEQPETNEGKPLELQTVKSFTRKKNGGRKPISANLERRPRVIDIPESEKTCACGANLTRIGEETSEKLVIIPPQIYVDQIVRPKYACRQCEGTEDEEEPAVRIAPVEPSIIPRSIASPSLLATIFTQKFEMHLPYYRQEKQFEQIGAAISRQDMSNWQQQAYEKLKPLFAILEETVKSGPVMQMDETEVQVIGEEDRSDTQKSYMWLARGGPVGKKVILYKYRPTRAAYNVMEFLQGYRGYLQTDGYKGYDSAAKDLTGIIQVGCFAHARRKFFEAAKISSKSRSAEEGMKYIRCLYVIENELRDKNIDNGIFLSERKARAGPVLEKFKAWLLKRKDEVPESTLLGKAIYYSLAQWDKMVAYLESPYLTPDNNACENAIRPFVIGRKNWLFCQSVDGAKSSCGIFTLIETAKQNGLIPFKYLTAVFERAPFALTPEDWEKLLPWNIFTA

SEQ ID NO: 68593 - DNA, 366 bp, Unknown
  Obtained from environmental sample
  misc_feature (1)..(366): n is a, c, g, or t
atggctggggcatgcgatatgacatttgatatcagcaaagcaaggatttttatccgacctggttacacggatttacggaaagcggtaaatgggctttcagtgatggtagaacaacaaatggcaggtgaaccgttcagcggggacgtttatttgttttgcaaccgggacaggaagctgctaaaggcgctgtggtgggacaggaacgggttttggctgagtcagaagcggcttgaaaaagacaagtttccctggcctgagacggatgaagaagcgagggaattaagcgcggaagaactgtcaatgcttttaaaggggatagattttttcaaagcgcacaagacgctttattacaaaaatgtttcataa

SEQ ID NO: 68594 - protein, 121 aa, Unknown
  Obtained from environmental sample
  DOMAIN (12)...(120): IS66 Orf2 like protein
  misc_feature (1)..(121): Xaa is any amino acid
MAGACDMTFDISKARIFIRPGYTDLRKAVNGLSVMVEQQMAGEPFSGDVYLFCNRDRKLLKALWWDRNGFWLSQKRLEKDKFPWPETDEEARELSAEELSMLLKGIDFFKAHKTLYYKNVS

SEQ ID NO: 68595 - DNA, 825 bp, Unknown
  Obtained from environmental sample
  misc_feature (1)..(825): n is a, c, g, or t
atgacttggttccaatggcttatttcagtatatgagtatatccgccccgtactggatgttgtgctcctcgccttcattctgtacaagggttatgagcttctggaaaaaactcaggctcttcctcttgttaagggaacgggctttctctttcttgtctacggcattgcgtggctttttaatcttacaaccctgcggtgggttcttacaataatcgcacccggtctttttatagtaattgccatcgtattccagcctgagcttagaaaaattgtcatgcgccttgggcagacggaatttttcaaacccaacgccgcggctcatatcggaaaacttgacgccgttgtaaccgccgcagaactgttatctgaaaaaagaagaggaatgttagctgtttttccgcgaaagataaatttaaaaaatattatcgatacagggacaagaattaacgcggaaatttcatcaagtttaattgtggctatttttgaatttgacggaccattgcacgacggagcgattgttatccatggcggaaaaattatttccgcggggtgctttttgccgctttcggaaagaatggatataagaaaaaatttcggcacacgccacagggcaagtctgggcatggcggaacaatccgacgcggttgtgcttattgtttccgaagaaacgggagcaatttcccttgcttacgattcaaaactttattacgatttgtcttctgcggaagttacgcgcaaattgatggaactgctggacaaaggaagcagaaaagaatcggaacaaaatgaactttccaaagaggaaagggaggttattgttgaatag

SEQ ID NO: 68596 - protein, 274 aa, Unknown
  Obtained from environmental sample
  DOMAIN (114)...(235): Domain of unknown function DUF147
  misc_feature (1)..(274): Xaa is any amino acid
MTWFQWLISVYEYIRPVLDVVLLAFILYKGYELLEKTQALPLVKGTGFLFLVYGIAWLFNLTTLRWVLTIIAPGLFIVIAIVFQPELRKIVMRLGQTEFFKPNAAAHIGKLDAVVTAAELLSEKRRGMLAVFPRKINLKNIIDTGTRINAEISSSLIVAIFEFDGPLHDGAIVIHGGKIISAGCFLPLSERMDIRKNFGTRHRASLGMAEQSDAVVLIVSEETGAISLAYDSKLYYDLSSAEVTRKLMELLDKGSRKESEQNELSKEEREVIVE

SEQ ID NO: 68597 - DNA, 1896 bp, Unknown
  Obtained from environmental sample
  misc_feature (1)..(1896): n is a, c, g, or t
atgacaaaaccgccctctctgcctgaaatacattctcctcaagatataaaaaaaatgtcgctgcgtgaattaaacgcgcttgcgcaggaaataagggagtatattgtttctacggtttcaaataacggagggcatttatcctctaaccttggaatagtggaactgaccatagcccttcaccgcgtattcaattcccctatcgacaaaattgtttgggacgtgggacatcaatgttacgcgcataaattaataacagggcgctatgattcgttctcgttactccgcaaaaaagacggaatagccggctttcccaagcgcagtgaaaacccgcacgacgcttttaacacagggcacgcctctacgtcaatttccgccgctttgggacttttggcggctgacaaaatacagggcggcaattcgcacgctatagcggttatcggagacggcgcgctcacgggaggaatggcgtacgaagcgctgtcccactgcggacatcttgggcttccgttaatcgtaatattaaacgacaataaaatgtccattagccgaaatgtcggagggctttcaaaatatttaagccgtctttcaatgaaaaagaaatatcaaactttccgcagactttttgacaagaccgtcaaaaaaatcccgtttataggcagcgcgttttttaacatgatagtcaggcttaaacgcgccgttaaagcggttttttatatcgacaatttttttgtagatttgggttttgaatatgtgggaccgataggcggacacaacattcacgcccttatcagcgtattggaagacgtgcggaaaataaaccgccccgttgtaattcacataattacgcgcaaaggcaagggctacggttacgctgaagacgacccccacagttatcacggcgtaggctctttttccgttgacggcggaattgaacagggtaatatcggtaacaaaacttttaccgaaagttttgcaaactgtctgcttgaggcggcaaaaaaagataaccgtattaccgcggttaccgccgcaatgaaaacaggcaccggactatccgccttcgccgaaaattttccaaaccgtttttttgacgtaggcattgccgaagaacacgccgtaacatttgccgcagggcttgcggcgaaaggactgcgtccggtagttgcggtttattccacatttatccagcgcgcggtggatcaggtaattcatgatgcggctcttcaaaaactgtccgtagttttcgcgctggacagatcgggatttgtaagcatggacggcgaaacccatcagggattgtttgacataacgctctttcgcggaacgcctaatatgactctcctctgccccgcaagcgacaacgaaatgaaacttatgctggattacggaataaaccgggaggcaggacccgtcatcattcgttacccgaaagcgttatgtccgcaggagaccgaagtcttttcgcaaccgcttgagagaggacgaggaacatgggtctcaaagagcggaaatcaagtttgccttgcttttaccggaagcctttacagagaagctgttttggcggcgaatttattgaaagaacagggaatagaaacggatttgtataacctgcggtttttaagaccgattgacgaagactatttagcggacattatgaacaaatacaagcttgtaacatttattgaagaaggaatgagggaaggcggctttggcgagtacgcggcggctcttgctcgcggacgcggttgtacggcaaaaacggctattatagccgtggaaagcgtctttttggaagaagatatgtctttgggcagccgcgaggaactgcttgctgttaaccggcttaacggcaaaggaatagcggaaacaataaaaataatatataatactatctaa

SEQ ID NO: 68598 - protein, 631 aa, Unknown
  Obtained from environmental sample
  DOMAIN (494)...(609): Transketolase, C-terminal domain
  misc_feature (1)..(631): Xaa is any amino acid
MTKPPSLPEIHSPQDIKKMSLRELNALAQEIREYIVSTVSNNGGHLSSNLGIVELTIALHRVFNSPIDKIVWDVGHQCYAHKLITGRYDSFSLLRKKDGIAGFPKRSENPHDAFNTGHASTSISAALGLLAADKIQGGNSHAIAVIGDGALTGGMAYEALSHCGHLGLPLIVILNDNKMSISRNVGGLSKYLSRLSMKKKYQTFRRLFDKTVKKIPFIGSAFFNMIVRLKRAVKAVFYIDNFFVDLGFEYVGPIGGHNIHALISVLEDVRKINRPVVIHIITRKGKGYGYAEDDPHSYHGVGSFSVDGGIEQGNIGNKTFTESFANCLLEAAKKDNRITAVTAAMKTGTGLSAFAENFPNRFFDVGIAEEHAVTFAAGLAAKGLRPVVAVYSTFIQRAVDQVIHDAALQKLSVVFALDRSGFVSMDGETHQGLFDITLFRGTPNMTLLCPASDNEMKLMLDYGINREAGPVIIRYPKALCPQETEVFSQPLERGRGTWVSKSGNQVCLAFTGSLYREAVLAANLLKEQGIETDLYNLRFLRPIDEDYLADIMNKYKLVTFIEEGMREGGFGEYAAALARGRGCTAKTAIIAVESVFLEEDMSLGSREELLAVNRLNGKGIAETIKIIYNTI

SEQ ID NO: 68599 - DNA, 555 bp, Unknown
  Obtained from environmental sample
  misc_feature (1)..(555): n is a, c, g, or t
atgacaacagagcaaatgttacagatcagcggtatacaccttgttccgtacatgcaagtcgccacacatctcatcggtaaatcgcgcgagggcggcggaaatatgttccgtcatcaaattgatactatggggattcttatcgactacggctatgttaattcggtattgcttaaagcttctcttgtacatgatcttcttgaagacatccccgattttaatcacaatattttactttcaattgataccgaaagccacgctgtttataaccttgttcttgaagtaacgcgaaggcacggcgaatcaaaaccggattttcttacgcgcataatcgaaacaggttcttttgacgcaaaaactttaaaagtagcggatcgtatttcaaatatgatttcgcttggatttgtaaacaaccttgcctttgtggagcgttatatcaacgaaactgaaaaatatcttcttcctcttgccgctcaagtcaacaaatatatgctgatagaacttacagaccttgtaaaaataaaacgcaaatatctggaagatatgaagccgcaatga

SEQ ID NO: 68600 - protein, 184 aa, Unknown
  Obtained from environmental sample
  misc_feature (1)..(184): Xaa is any amino acid
MTTEQMLQISGIHLVPYMQVATHLIGKSREGGGNMFRHQIDTMGILIDYGYVNSVLLKASLVHDLLEDIPDFNHNILLSIDTESHAVYNLVLEVTRRHGESKPDFLTRIIETGSFDAKTLKVADRISNMISLGFVNNLAFVERYINETEKYLLPLAAQVNKYMLIELTDLVKIKRKYLEDMKPQ

SEQ ID NO: 68601 - DNA, 1917 bp, Unknown
  Obtained from environmental sample
  misc_feature (1)..(1917): n is a, c, g, or t
gtgtttgacgcctatgttgaccgggcattcggaaccggcgtggtaaaaatcactcccgcccatgatcccaatgactgggatcttgccaaacggcacgatcttcccgtcatcaatatactcaaccccgacggaaccctcaacggcgaagtccccgaaaaataccgcggcatgacggtcaagcaggcccgcgccgccgtactggaagacttgaaagcgggcggctggtacataaaagaagacaacatcaaccatgcggtgggccattgttaccgctgccatactgtgatagaacccttcctttccgagcagtggtttgtcaggatgaagcccctcgcggaaaaagccctggcctcctggcggcggggcgagattgtcttctatccttccaaatggcagcatacctaccagcactggatggaaaatatacgggactggtgcatcagccgccaactctggtggggccaccgaattcccgcgtgggattgcaaagactgcagcaaaacatcagtgtcgcgtaacgacttgaatgcctgtccccactgcggttccgctcatattgagcaagaccccgacgtgcttgatacctggttttcaagctggctctggcccttcagcactttaggctgggaaaacagcgattgcgataccgcagatttccgccgttattatcccaccacggcgctggtaaccgcttacgacattatctttttctgggtgtcgcggatgatcatggccggtcttgagtttaccggcaaagcgccgttccgtgacatttacattcacgggctggtgcgggacaagcagggccgcaaaatgagcaaaagcctcggcaacggccttgacccgctgggactggtggaagaattcggcgccgacgcgcttaaatttactttggcctttatgtgcgcccagggacaggatattctagtagacaaagaatcttttaagatgggaacaaaattcgcgaacaaagtgtggaacgccagtagatatattttgatgaaccttgacggtcgtactttgcaggaaaaccccaccttaacccccgccgataaatggatatattcgcggctaaacggcgcggcgaagtctatgagggaagcgtttctttcctatcgttataacgacgcggcgcagacagcctacgaatttttttggaacgattactgcgactggtatgtcgaggcgacaaaactttccatgaaagacggcgacaatgccgagaaagaccgcgccgcgacagtgctgttagacgtactctctcaatctctgcgcctactccaccctctcctgccctttgtgacggaggaaatctaccaaaaattacccgaaaatttcagacgcgctggaacaaaagctcaaaataaaacagggcaggaaacattgctcataaacgctcaataccctgcttacgatgaaaagcgcaatgacccgttgcaagagaaaaattttgccgctcttcaatcgctggttggaatggcgcgtactctgagaagcgaatgcggcataacgcctgagaaaaaactccgcctgctgttaagatcaagcgcggaattggaaaaaccgttcagagagaacgaagggctgataaaacttttagcgggcgcaggcgaattacagattgaagccgcaagcggcgcgtcaagcgaaagacccgcaggttctatcggtcttgccggaacaggttttgaaatttttgtgtttgtagcggaagcggtagataccgccgcgcttaagaaaaaattgtccggcgatcttgaaaaagacaggaaatacattgaaagcctaaaagcgaaactcgccaacgagcagtttgttaaaaacgcgccgagcgagcttgttgaggaacaaaaatcaaaacttgaagaaaccgttaaaagaacggaaaaacttgcaggttatttaagggatttatag

SEQ ID NO: 68602 - protein, 638 aa, Unknown
  Obtained from environmental sample
  DOMAIN (1)...(311): tRNA synthetases class I (I, L, M and V)
  misc_feature (1)..(638): Xaa is any amino acid
MFDAYVDRAFGTGVVKITPAHDPNDWDLAKRHDLPVINILNPDGTLNGEVPEKYRGMTVKQARAAVLEDLKAGGWYIKEDNINHAVGHCYRCHTVIEPFLSEQWFVRMKPLAEKALASWRRGEIVFYPSKWQHTYQHWMENIRDWCISRQLWWGHRIPAWDCKDCSKTSVSRNDLNACPHCGSAHIEQDPDVLDTWFSSWLWPFSTLGWENSDCDTADFRRYYPTTALVTAYDIIFFWVSRMIMAGLEFTGKAPFRDIYIHGLVRDKQGRKMSKSLGNGLDPLGLVEEFGADALKFTLAFMCAQGQDILVDKESFKMGTKFANKVWNASRYILMNLDGRTLQENPTLTPADKWIYSRLNGAAKSMREAFLSYRYNDAAQTAYEFFWNDYCDWYVEATKLSMKDGDNAEKDRAATVLLDVLSQSLRLLHPLLPFVTEEIYQKLPENFRRAGTKAQNKTGQETLLINAQYPAYDEKRNDPLQEKNFAALQSLVGMARTLRSECGITPEKKLRLLLRSSAELEKPFRENEGLIKLLAGAGELQIEAASGASSERPAGSIGLAGTGFEIFVFVAEAVDTAALKKKLSGDLEKDRKYIESLKAKLANEQFVKNAPSELVEEQKSKLEETVKRTEKLAGYLRDL

SEQ ID NO: 68603 - DNA, 444 bp, Unknown
  Obtained from environmental sample
  misc_feature (1)..(444): n is a, c, g, or t
atggcatccaggcggaagagccgaattttggcatttcaagccctctacttctgggaatctaacagagtccccgtggaagagcttacaagtttcgcctggcttgacgaagaaaagttaaaaaatcttgacgagggaatgtctgctttttccagaatgatagtaaccggcgctattgaaaatatcgatgttatcgacgacatgataaaaaaacatctgcaaaattgggatattacgcgccttaaccgcgtagaccttgctatcttaagaatatcggtttatacattaatgtttcaaaaagatattccgccatctatcgtcatagacgaggcaatcggcatttgcgttgaatacggcgcaaatgattcttacaaatttgttaacggcgttcttgacagtattcgcataacgcttcaacaagacccgttaccccaagaaacactatga

SEQ ID NO: 68604 - protein, 147 aa, Unknown
  Obtained from environmental sample
  DOMAIN (5)...(137): NusB family
  misc_feature (1)..(147): Xaa is any amino acid
MASRRKSRILAFQALYFWESNRVPVEELTSFAWLDEEKLKNLDEGMSAFSRMIVTGAIENIDVIDDMIKKHLQNWDITRLNRVDLAILRISVYTLMFQKDIPPSIVIDEAIGICVEYGANDSYKFVNGVLDSIRITLQQDPLPQETL

SEQ ID NO: 68605 - DNA, 1041 bp, Unknown
  Obtained from environmental sample
  misc_feature (1)..(1041): n is a, c, g, or t
atgaaacggattatattttttttattaggactttttatcgccctgccttgtttttctcaatctaatttacaacctgcggcaaccgtaaatttaactaaaaccgaggttattactgtcgggcaacttcgtacggaagtacagcgcatggaaaaggcgtcgggaaaaactttaaacaagtccgaacggcttcaggtactggatgtaatgatcaatgaaagacttgttattcaggcggcggaacgcgacagaataatggttactgaaaacgaagtaaaccagcaaattcaacaacttaggaacgtattagctcaacagcttggacgccagcctacagacgcggaatttacccaagcggtgatgaatgaaagcggtcttgacgttccggcttttaaagagcagcttcgcagacagttgatcgttcaaaaatacctcatgtcaaaaaaaggcgatctgattaattccattaaaatgcctacggaagaagatattatatccgagtatgctctcttaaaaggagagcttgtgcgtcccgaaacaatccgctgcaacatgatacaagtttcttatggtcctgacgcggcatcccgttctaaagcaaaaacgcttgctgaatcattggttaaagaaattaacaacgatccggcaaagtttgacgaagtagctcaacgaagcgtagctcccaattcaggttatcaagccggagacgcaggctatcttcccagaaatcaggaagccagaaaacttgtagggcaaacttttatggataccgcttttagtttaaaacaagggcaggtgtcaaagttaatagaaggtcagcaaggatttcaaattatcaagataacagaaaattacgcgggaaaacaacttgagttaactgacgttttacaactgggaacaagaataacggttagggattacatagggcaaggacttttaaatcaaagacaacaggctgttttaaaacaggcaagcgaagaaattgtaaaggatttaagatccggtaaaacattcactatatttgaaaacaatataaactggtaa

SEQ ID NO: 68606 - protein, 346 aa, Unknown
  Obtained from environmental sample
  SIGNAL (1)...(19)
  DOMAIN (185)...(282): PPIC-type PPIASE domain
  misc_feature (1)..(346): Xaa is any amino acid
MKRIIFFLLGLFIALPCFSQSNLQPAATVNLTKTEVITVGQLRTEVQRMEKASGKTLNKSERLQVLDVMINERLVIQAAERDRIMVTENEVNQQIQQLRNVLAQQLGRQPTDAEFTQAVMNESGLDVPAFKEQLRRQLIVQKYLMSKKGDLINSIKMPTEEDIISEYALLKGELVRPETIRCNMIQVSYGPDAASRSKAKTLAESLVKEINNDPAKFDEVAQRSVAPNSGYQAGDAGYLPRNQEARKLVGQTFMDTAFSLKQGQVSKLIEGQQGFQIIKITENYAGKQLELTDVLQLGTRITVRDYIGQGLLNQRQQAVLKQASEEIVKDLRSGKTFTIFENNINW

SEQ ID NO: 68607 - DNA, 1413 bp, Unknown
  Obtained from environmental sample
  misc_feature (1)..(1413): n is a, c, g, or t
gtgggagacgcaagccaccttaccttttttcaaatgttaggcaactggtctttgggggactactttaaagaagaagcgattaaaatgagttttgaatttcttacttcccctcagtggctgaatattccggttgaaaaattgggagtgacggtttttaagggtgagggcgatgttccaagagacgatgaatctgcggcaatttggaaacagttgggaatccctgaaaaccgtatcgcttatttgccaagagaagataattggtggggacccgccggaaccacaggtccttgcggtcccgatactgaaatgttttattacataggggacgcgccttgcggtccggattgcaaaccgggctgttcctgcaaaaaatggctggaaatctggaacgatgtttttatgcagtacaacaaaaacgcagaaggcgactacgagccgcttactcgaaaatgcgtagatacgggcatgggcattgaaagaactgtaaccgttcttaacggcaaaaaaagcgtttacgataccgatattttcgcgcctgttatcgcggcgattgaagcggcgtcgaacggctgcaagtacggacaggataatgataaagattattcgatacggattatagcggatcatgtgcgctccgcgacttttattctgggagacccaaaagcggtaagcccttccaatgtgggagcgggttatgttcttcgcaggctgatacgccgcgccgtccgccacgggcgaaaacttaacaacgaaaagttcagtctttctccaatcgcgcaggttgttgtggaacagctaaaaggcgcttatcctgaacttgaacaaaaccgcgcttttataattagcgaacttgataaggaagagactaagtttttggagaccttgcaaaagggcgagcatgagtttgaaaaactgcttcccaatttgcttaaagatccgcgaaaaatcatgtcggggcgattggcttttaaactttacgatacttacggcttcccaattgagcttacggaagagcttgccgccgaatcgggaatgaaggtaaataaagaagaatttgacgaggcgtttcagaaacatcaggaactgtcgcgctcccaaagcggctctttcaagggcgggcttggcgatcagggcgagatggcggttaagtaccacacggcaacccaccttctgcacaaggcgttaagaacagtgcttggcgatcatgtcgcccagaaagggagcaatattacggcggaacgattgcggttcgattttgcccatgacgcgcctatgacggcggaacaagttaaaaaggtgcaggatattgtcaatgaacagatagaaaaggattattctgtttttatggaaactatggcgcttgatgacgcgaaagccgcagggagccatcgcccttttcggggaaaaatatga

SEQ ID NO: 68608 - protein, 470 aa, Unknown
  Obtained from environmental sample
  DOMAIN (2)...(445): tRNA synthetases class II (A)
  misc_feature (1)..(470): Xaa is any amino acid
MGDASHLTFFQMLGNWSLGDYFKEEAIKMSFEFLTSPQWLNIPVEKLGVTVFKGEGDVPRDDESAAIWKQLGIPENRIAYLPREDNWWGPAGTTGPCGPDTEMFYYIGDAPCGPDCKPGCSCKKWLEIWNDVFMQYNKNAEGDYEPLTRKCVDTGMGIERTVTVLNGKKSVYDTDIFAPVIAAIEAASNGCKYGQDNDKDYSIRIIADHVRSATFILGDPKAVSPSNVGAGYVLRRLIRRAVRHGRKLNNEKFSLSPIAQVVVEQLKGAYPELEQNRAFIISELDKEETKFLETLQKGEHEFEKLLPNLLKDPRKIMSGRLAFKLYDTYGFPIELTEELAAESGMKVNKEEFDEAFQKHQELSRSQSGSFKGGLGDQGEMAVKYHTATHLLHKALRTVLGDHVAQKGSNITAERLRFDFAHDAPMTAEQVKKVQDIVNEQIEKDYSVFMETMALDDAKAAGSHRPFRGKI

SEQ ID NO: 68609 - DNA, 417 bp, Unknown
  Obtained from environmental sample
  misc_feature (1)..(417): n is a, c, g, or t
atgcgtactcttctcttttcgagcatggcgacattaaagtacggcatagatattcttacggaaaaagaaaaagcgaagatagacagtctgttggggcacggcggcttgtttaagatcaaaggcataggacagcgatttatggcggcggtctttaacgctcccgtttctgtaatggaatccgcaggtgaaggcggcgcgtggggtatcgcccttcttgcctcatttataaatcaacaaggcgaaactttggaaaaatttcttgcggaaaaagtttttgccggaaagacaggaacaaaaattgaacctgatcccaaagacgtggaaagttttcgtaaatttatggaacgttataccgcagggcttaaaattgaaagagccgctgttgaaaatttgaaaaggagcgattatgaatcttaa

SEQ ID NO: 68610 - protein, 138 aa, Unknown; identical to SEQ ID NO: 29380
  Obtained from environmental sample
  misc_feature (1)..(138): Xaa is any amino acid

SEQ ID NO: 68611 - DNA, 360 bp, Unknown
  Obtained from environmental sample
  misc_feature (1)..(360): n is a, c, g, or t
atgaatcttaaaaaatatgaatactggtttatcgtaggaagccaagacctttacggagatgaaacgcttaaacaagtcgccgatcatgcccgtattatgacggatgaattcaacaaggacacattgctttcaggcgctgtagttttgaaacctacggcgataacgccgcaggctatacgaagtctttttgaggaagcgaacgcatcanacaactgcgccggtatcataacatggatgcatacattctcgccttcaaaatgtggatacaggggcttgcgcttaaccgcaaaccgcttttacatcttcatacgcaatttaaccgggacattccctggtcttcaattgatatggattttatga

SEQ ID NO: 68612 - protein, 119 aa, Unknown
  Obtained from environmental sample
  misc_feature (1)..(119): Xaa is any amino acid
MNLKKYEYWFIVGSQDLYGDETLKQVADHARIMTDEFNKDTLLSGAVVLKPTAITPQAIRSLFEEANASXNCAGIITWMHTFSPSKCGYRGLRLTANRFYIFIRNLTGTFPGLQLIWIL

SEQ ID NO: 68613 - DNA, 1260 bp, Unknown
  Obtained from environmental sample
  misc_feature (1)..(1260): n is a, c, g, or t
atggatgcatacattctcgccttcaaaatgtggatacaggggcttgcgcttaaccgcaaaccgcttttacatcttcatacgcaatttaaccgggacattccctggtcttcaattgatatggattttatgaacctgaaccagtcggcgcacggcgaccgcgagcacgggttcattcatacgaggatgaagctgccccgcaaagtagtcgccggtttctggcaggataatgaacttcgccgccgtatggacgtgtggatgcgcgccgccgcagcgagaaaagacggaatggattcaaccgttatgcgatttggtgacaatatgcgggaagtggctgttaccgaaggcgacaaagtcgaagctcaaatcaagtttggctggcaggtaaacacatggggcataggcggccttgccgcccgttacgcgaaaataagcgacgcgcaggctgaaaaactggcggaagaatatgccgcgaaatacgagcttgcgcctgaattgaaacaggcaggcaaaggaagaagcgcgatgcttgaacaggcaaaaatagaaatcgcccttaaagaaatgcttgaaaccgaacacgcaggggcttttaccaccaccttccaggaccttcacggactgccgcaattgcccggtcttgcctgccagcggctcatggagcagggttacggcttcggcgcggaaggagactggaaacagtctatgctgacacggaccgcaaaagttatggcttcggggcttcccggcggcgtttcctttatggaagattacacctaccattttgagcccggcaaagaagccgcccttggcgctcacatgcttgaaatatgcccctccatcgcggacggcaaaccgcgcattgaggttcatccgcttggaataggcggcaaagcggatcctgcgcgcatggtttttgacgccgctcccgggcaggcggtactcgcgacattaatcgatctcggcagccgcttcagaatgatcgtaaatgaaattgaaaccgtcaaaattgaaaacgccatgccgaaactgcccgtcgcccgcgcactttggaagccgtatccgaatctaagcggcgccgccgaagcgtggataatttccggcggcacgcaccattctgtatacagttcctcgcttacagcggaatatttccgcgactgggcggaaatgagcggcattgagtttgtgcttatcgaccgcaatacaaaacctgcgtgtctgcaggacgaattgcgccgcaacgaggccttttggtctcgttag

SEQ ID NO: 68614 - protein, 419 aa, Unknown
  Obtained from environmental sample
  DOMAIN (1)...(419): L-arabinose isomerase
  misc_feature (1)..(419): Xaa is any amino acid
MDAYILAFKMWIQGLALNRKPLLHLHTQFNRDIPWSSIDMDFMNLNQSAHGDREHGFIHTRMKLPRKVVAGFWQDNELRRRMDVWMRAAAARKDGMDSTVMRFGDNMREVAVTEGDKVEAQIKFGWQVNTWGIGGLAARYAKISDAQAEKLAEEYAAKYELAPELKQAGKGRSAMLEQAKIEIALKEMLETEHAGAFTTTFQDLHGLPQLPGLACQRLMEQGYGFGAEGDWKQSMLTRTAKVMASGLPGGVSFMEDYTYHFEPGKEAALGAHMLEICPSIADGKPRIEVHPLGIGGKADPARMVFDAAPGQAVLATLIDLGSRFRMIVNEIETVKIENAMPKLPVARALWKPYPNLSGAAEAWIISGGTHHSVYSSSLTAEYFRDWAEMSGIEFVLIDRNTKPACLQDELRRNEAFWSR

SEQ ID NO: 68615 - DNA, 813 bp, Unknown
  Obtained from environmental sample
  misc_feature (1)..(813): n is a, c, g, or t
ttgagtttgtgcttatcgaccgcaatacaaaacctgcgtgtctgcaggacgaattgcgccgcaacgaggccttttggtctcgttagtttgttatgtgaagatggaataattatggaaaaatacaaaacattacgcgaagaatcttatgaggcgaatcttgaaataaaacggcagaatcttgccatttctacatggggcaacgcttccgcttttgatcctgacaagggaatcttcgccataaaaccgtccggcgtggaatatgatgaattaacgcccaaaaagatggtgttagtcgatcttgacggaaaggttgtcggcggcaaactcaagccgtcttccgacacaaaaacccaccttgtcctgtaccgcgagtttaagggcattctcggcgtaacgcacacgcactcaccttacgcagtcgcctgggcgcaaacggggaaaccaatacctgtctttggcaccactcacgccgacaactgcgcttatgaaataccgtgtaccgcttttatgaatccgcaggaagtaaaaaacgattacgaactggaaacaggcaatttaattgttaatacttttaagaacggcaatcttgattatttgcagattaaaatgacattggttgcgggacacgggccttttacatggggaaacagcgcggctcaatcggtgtatcacagcgttattctggaagaaataggcaaaatggcgttattcaccgtaacgattgatccaaacgcgaaaccgctgcccgaacacattatacgcaaacattgggaacgcaaacacggggctaacgcgtattatgggcagaaataa

SEQ ID NO: 68616 - protein, 270 aa, Unknown
  Obtained from environmental sample
  DOMAIN (46)...(256): Class II Aldolase and Adducin N-terminal domain
  misc_feature (1)..(270): Xaa is any amino acid
MSLCLSTAIQNLRVCRTNCAATRPFGLVSLLCEDGIIMEKYKTLREESYEANLEIKRQNLAISTWGNASAFDPDKGIFAIKPSGVEYDELTPKKMVLVDLDGKVVGGKLKPSSDTKTHLVLYREFKGILGVTHTHSPYAVAWAQTGKPIPVFGTTHADNCAYEIPCTAFMNPQEVKNDYELETGNLIVNTFKNGNLDYLQIKMTLVAGHGPFTWGNSAAQSVYHSVILEEIGKMALFTVTIDPNAKPLPEHIIRKHWERKHGANAYYGQK

SEQ ID NO: 68617 - DNA, 1020 bp, Unknown
  Obtained from environmental sample
  misc_feature (1)..(1020): n is a, c, g, or t
gtggctgaaaagatacaggaaatagccaaggactcagaaggtcttctggaaattaactcggtcatggacaatatcgccgcccagaccaacctgttatcaatgaacgcggcaatcgaggcggcccacgccggagaatcggggaaagggtttgccgttgtcgccggcgagattcgcaaactagccgaatcatcaagtaatcagtcgaaaaccacagcaacgatgctgaaaaagataaaagcttccatagacagcattacggcgtcttccaacgaggtactctcgcgctttggggttattgatgaaaaagtaaaaaccgtatcatcacatgaagaaaatatccgtaacgcgatggaagagcaggaagtgggcgggaagcagatactggaatccatggagcgcctgaaagagataagcgtatcggtcaaggagggagcgttgggcatgctggaatcgggcaatcatttgaaccggcagaccagtgaattaattatttccagcaccgatgttgtaaacggcatgaacgagattgtaaacggggccatgaaagagataaaaagcgcggtaactcttgttgaagaaatgagcgccgaaaacagcaagaacttcgacgagcttaaagtggagtcgtcaaagttcaaggttgatgcggacgatgagaagaaaaaaatcatcgtggttgatgatgagcagaccattcttaccatggcaagagcctcgctggaaaaagattatgacgttaccacagccagttccggcaaggaagctttaagcctgttcttccagggctatgttcccaatttggtattattggatttaagtatgcctgaaatgggcggttgggatacctttctaaggatacgcaacatcagtaaattgcaccaatccccgatagctatatactcgacatcggatgacccgcaagacagagccaaagcgaaggaactgggggcggttgatttcatacacaagcctgccaaaaaagctgaattgcttgaaaaggtgtcaagattggtgaattaa

SEQ ID NO: 68618 - protein, 339 aa, Unknown
  Obtained from environmental sample
  DOMAIN (2)...(208): Methyl-accepting chemotaxis protein (MCP) signaling domain
  misc_feature (1)..(339): Xaa is any amino acid
MAEKIQEIAKDSEGLLEINSVMDNIAAQTNLLSMNAAIEAAHAGESGKGFAVVAGEIRKLAESSSNQSKTTATMLKKIKASIDSITASSNEVLSRFGVIDEKVKTVSSHEENIRNAMEEQEVGGKQILESMERLKEISVSVKEGALGMLESGNHLNRQTSELIISSTDVVNGMNEIVNGAMKEIKSAVTLVEEMSAENSKNFDELKVESSKFKVDADDEKKKIIVVDDEQTILTMARASLEKDYDVTTASSGKEALSLFFQGYVPNLVLLDLSMPEMGGWDTFLRIRNISKLHQSPIAIYSTSDDPQDRAKAKELGAVDFIHKPAKKAELLEKVSRLVN

SEQ ID NO: 68619 - DNA, 567 bp, Unknown
  Obtained from environmental sample
  misc_feature (1)..(567): n is a, c, g, or t
atgtcgcatatagaagatactatttcacagaacagcattatggcggtaaaacgaattcttttaatcgcggcggggcttatatttatttcaattttgttatcttcgttgggcagcaagtttattattgtaaaccccatcgttaaagtagcccgcgttgttaaaattgtcgcccagggcgatttgacgcataacacagatgtcaatacaaatgacgaaataggcgatcttgccgatgactttaattttatgataacaaaaatgagagagcttatagggacaatgaagcataaaatcgacgcgctgaccaacaccggacacgagctgtcatcaaacatggcaaaaacttccgaatcggtagaccagatttcaactaattttgacggcatgaaaagcaaaatgggcaagcaggaagaaagcgccgccgaagcggacaaagcggttaaaaagataaaagacaacattgacagcatgagcaggctgatagacgaacagtctgccagcatcaatacttcgtcttccgcagttgagcaaatgaccgccaatatccattccgtatccaaaccctga

SEQ ID NO: 68620 - protein, 188 aa, Unknown
  Obtained from environmental sample
  DOMAIN (20)...(89): HAMP domain
  misc_feature (1)..(188): Xaa is any amino acid
MSHIEDTISQNSIMAVKRILLIAAGLIFISILLSSLGSKFIIVNPIVKVARVVKIVAQGDLTHNTDVNTNDEIGDLADDFNFMITKMRELIGTMKHKIDALTNTGHELSSNMAKTSESVDQISTNFDGMKSKMGKQEESAAEADKAVKKIKDNIDSMSRLIDEQSASINTSSSAVEQMTANIHSVSKP

SEQ ID NO: 68621 - DNA, 855 bp, Unknown
  Obtained from environmental sample
  misc_feature (1)..(855): n is a, c, g, or t
gtgacgtttgcgaacgcgaatagcgcgtcaaccacgtttgtaatgccggggaacgcggtgacggtgacggcgaatttcgagcaaaatattacatactcggtcgccgtttcaagcatcggttccaacgccgccggtaccggcaattacgcttccggcacgacagtcagcatatcggcggggaccgcgcctgccggttacgtgttcgtaaactggacatcttcaaccaacggcgtatctttcgccaacgccaatagcgcgacaactacgtttaccatgccgggaaattcggtgacggtaacggcgaattttttatcgggattcaccgacgccagagacggtaaattctacagaactgtaactataggcggtaagaaatggatggcggagaatcttaactatcagccgtcgtcaggtaattattggtgttatgataacaataccgagaactgcacgaagtacgggaaactgtacgattgggagacggcgagaacggtttgtccgaccggatggcacttgccgtctcgtcaagaatggggagctttggctatagcagccggaggcaccggtacttctggtggtgatggcggtacggcaggcaaagcgcttaaatcgacaagcggttggagcaataacggtaatggtacggataattacggattttcggccttgccgggcggctaccgcagcagctccaatggcaatttcttcaatgccggcaactacggccactggtggacggctacggagaatgggagcatcgcctacagccggttcatgttctgcaactacgacagcgtgatcgaggactacaacggcaagagctacggcttctcggctcgctgcgttgaggactaa

SEQ ID NO: 68622 - protein, 284 aa, Unknown
  Obtained from environmental sample
  SIGNAL (1)...(21)
  misc_feature (1)..(284): Xaa is any amino acid
MTFANANSASTTFVMPGNAVTVTANFEQNITYSVAVSSIGSNAAGTGNYASGTTVSISAGTAPAGYVFVNWTSSTNGVSFANANSATTTFTMPGNSVTVTANFLSGFTDARDGKFYRTVTIGGKKWMAENLNYQPSSGNYWCYDNNTENCTKYGKLYDWETARTVCPTGWHLPSRQEWGALAIAAGGTGTSGGDGGTAGKALKSTSGWSNNGNGTDNYGFSALPGGYRSSSNGNFFNAGNYGHWWTATENGSIAYSRFMFCNYDSVIEDYNGKSYGFSARCVED

SEQ ID NO: 68623 - DNA, 528 bp, Unknown
  Obtained from environmental sample
  misc_feature (1)..(528): n is a, c, g, or t
ttgtcttccgcttttataacttcttcttctttttgttttttcttgccgaataagcctttcttttccaccggctttggcgcgctgacttttgttttatttaaaatgtcgtcaagaccggtaagcgagaaatcatcgccgccgaaaacatcgccgccggaaaaaccggaatcgctgtccatcccttcaacttccgctccggctccggttccggtgtccaactcaattgaatcggacgcaaagtctgcgcctaaatcgccgaactcatgcaccgcgcctgcgtcggctccggtatcaggcgcagtatcgcccgcgccggaaaaatccgtgtcggatgcgggtatgtcgaaatttgtgtctaatgcggaatcatccgcgccggatgtatcaaatgaatcggcgggagcgcctaaatcgtctccgcttgataaattaaagtccgctaaagagtccgaagaaaaatcatcgcttgccgcttccggcgtaaagtcgatagattcgccgccgagatcaatgcttcctaaatcttga

SEQ ID NO: 68624 - protein, 175 aa, Unknown
  Obtained from environmental sample
  misc_feature (1)..(175): Xaa is any amino acid
MSSAFITSSSFCFFLPNKPFFSTGFGALTFVLFKMSSRPVSEKSSPPKTSPPEKPESLSIPSTSAPAPVPVSNSIESDAKSAPKSPNSCTAPASAPVSGAVSPAPEKSVSDAGMSKFVSNAESSAPDVSNESAGAPKSSPLDKLKSAKESEEKSSLAASGVKSIDSPPRSMLPKS

SEQ ID NO: 68625 - DNA, 1260 bp, Unknown
  Obtained from environmental sample
  misc_feature (1)..(1260): n is a, c, g, or t
ttgacaatacctgatatatacatgaacatagtgtatattatttgtatgtataaggatatgcgcgtattagctaaaaaaaataaaataaaatttttagctgttattgcggtaatcggatttgcatttaccgcttgcccggagccggaaacaaataaaccgaccattaccattattacaattaaaacccaacccgctgcgacgacaaacgtaacggaaggaagcataagcggctgcctttcagttacggctagcgtcagcccgagcgcggcgctccgttaccaatggtatagtaacacaagcgccgttaatacagatgggactattcaaaatggcgctacaagcgcaagtttcacgatacctacaactcttgaggcgggaacctactactatttctgcgaggtcagggcggctggagcggctgctgtcagatcaaatgtggcgacagttactgtgtccgccgaacctgttatcacaaccatcacaatcaccacccagcccgctgagacgacaaacgtaacggcaggaagcataagcggcagtctttcggttacggccggcgttaccccgactgtgacgttaaattaccagtggtatagcaacacgagcgccgtcaatacgggtggaagcgccataagcggagccacaagcgcaagtttcccaatacccgcgactctcgcagcgggaacttactactacttttgcgaagtcagggcggctggggcaaattccgtccgatcaaatgcggcggtagtcaatgtggctccggttgcagccagcggacctgtaataaaggtgtcattcacagggacggaaacaacgaagaccgttacgcttaacggtttgagcaataatgaaatttatttggtaaaagttaacacctccggttcagttgtaagcgccgccaataccggtggcgcttcgggttcgtccataagcgctgcgagcggcaacgcagcgccggggcctgatagtacgccgaaattccgcatgggccatccggcggcggatgaataccacgccaaccctccgccttttgaaaggagaaaatcccgaagcccggatgggctcctgggttctttctttcctccttccccaactattggtactatcacgtcattttgggtagagtcatcttatggcagcggtaaatttatacagaaaacggctacgcttatggcgccggggacatacgggaatatttgggttatggatgacttaactacttttacctcagcccaggcgcaagagatagccggataa

SEQ ID NO: 68626 - protein, 419 aa, Unknown
  Obtained from environmental sample
  misc_feature (1)..(419): Xaa is any amino acid
MTIPDIYMNIVYIICMYKDMRVLAKKNKIKFLAVIAVIGFAFTACPEPETNKPTITIITIKTQPAATTNVTEGSISGCLSVTASVSPSAALRYQWYSNTSAVNTDGTIQNGATSASFTIPTTLEAGTYYYFCEVRAAGAAAVRSNVATVTVSAEPVITTITITTQPAETTNVTAGSISGSLSVTAGVTPTVTLNYQWYSNTSAVNTGGSAISGATSASFPIPATLAAGTYYYFCEVRAAGANSVRSNAAVVNVAPVAASGPVIKVSFTGTETTKTVTLNGLSNNEIYLVKVNTSGSVVSAANTGGASGSSISAASGNAAPGPDSTPKFRMGHPAADEYHANPPPFERRKSRSPDGLLGSFFPPSPTIGTITSFWVESSYGSGKFIQKTATLMAPGTYGNIWVMDDLTTFTSAQAQEIAG

SEQ ID NO: 68627 - DNA, 516 bp, Unknown
  Obtained from environmental sample
  misc_feature (1)..(516): n is a, c, g, or t
atgaagaaattgtttttatttcccggcttaatcttgaatcgggcaatgcggatttgcgtttggaaactaaatgaagctatggaattattggattattaccgcgataatttaagctacctccggcatctctccggcgaattcgcgacagaatatcccaaaatagccaggcgtcttttgctttccgaggttgattgtcaggacccgtatattgagcggcttttggaagggacggcttttttagcggccagagtggaaaaaaagctggacgagagctattacccttttcttgaagctgtacttaactctgtagccccggatgtcatttatcccattccctccggagctgtgctggaagttttcccggacgcctcggatgaaaatgtcaggaaagggacggtcattgaagcaggtacggtttttgaagccactgttcccggcgtaaataccccttgccgtttttcctgcgccgcggcaagcccaatagtcccctttacaattattggcgcggaatattaa

SEQ ID NO: 68628 - protein, 171 aa, Unknown
  Obtained from environmental sample
  misc_feature (1)..(171): Xaa is any amino acid
MKKLFLFPGLILNRAMRICVWKLNEAMELLDYYRDNLSYLRHLSGEFATEYPKIARRLLLSEVDCQDPYIERLLEGTAFLAARVEKKLDESYYPFLEAVLNSVAPDVIYPIPSGAVLEVFPDASDENVRKGTVIEAGTVFEATVPGVNTPCRFSCAAASPIVPFTIIGAEY

SEQ ID NO: 68629 - DNA, 558 bp, Unknown
  Obtained from environmental sample
  misc_feature (1)..(558): n is a, c, g, or t
atggctgagcatatctctcccagggacggcgcatcgcggagcgatggcgcgtcactacgtgacgcgacaaccaaagaagacattttctacaaaccgtttacccttaaaaggttgacggattatgatcctgccggaaagtcggaagtgtcctggaatctgatatcaggcaaacaattaaaagaggatgtttttgataatattgatatgctctttaattccaggtctcacgcgtctttaactgaccttaagggatataaagaagctgaagagtcggtgctgggttatggcatcatggacttctgcggcaggcagagttccaccgactcccgggaggccctgcaggatcacatcttcaggcagatacagttttttgagccgcggctggatcccgcgtcaataaaaattgaacaaattgacgcttcggggagcgattctaccaatataacgtttcggattggcgggaatataaaaataaaagaagtaaatgaagaaattgtttttatttcccggcttaatcttgaatcgggcaatgcggatttgcgtttggaaactaaatga

SEQ ID NO: 68630 - protein, 185 aa, Unknown
  Obtained from environmental sample
  DOMAIN (32)...(174): Protein of unknown function (DUF1316)
  misc_feature (1)..(185): Xaa is any amino acid
MAEHISPRDGASRSDGASLRDATTKEDIFYKPFTLKRLTDYDPAGKSEVSWNLISGKQLKEDVFDNIDMLFNSRSHASLTDLKGYKEAEESVLGYGIMDFCGRQSSTDSREALQDHIFRQIQFFEPRLDPASIKIEQIDASGSDSTNITFRIGGNIKIKEVNEEIVFISRLNLESGNADLRLETK

SEQ ID NO: 68631 - DNA, 393 bp, Unknown
  Obtained from environmental sample
  misc_feature (1)..(393): n is a, c, g, or t
atgcagaatatcaatgttcaggcttcatcggacgtacagggcagggggcagtacatcccctttacttttacgcatttggcggacaaagcgacacccaaattgcagctttcctgcatgaagggcgaggtgatcaagaacgccaagtttgagtattgcagggttctgggcggcgagcagactccggtgtacgagctgaccatgaacagcgtcagggtagcaaaggtggaaatgaaaaccgtgaatcccaacccggatgacgctacttcccagcagcctgttgaagaggttcaacttgtcgcggcggagattacggttaaagtgactccgataaaacccgacggaaccaaagacggcgccattgagaccaagtggaatcaggtaaccaacagctaa

SEQ ID NO: 68632 - protein, 130 aa, Unknown
  Obtained from environmental sample
  DOMAIN (3)...(108): Protein of unknown function (DUF796)
  misc_feature (1)..(130): Xaa is any amino acid
MQNINVQASSDVQGRGQYIPFTFTHLADKATPKLQLSCMKGEVIKNAKFEYCRVLGGEQTPVYELTMNSVRVAKVEMKTVNPNPDDATSQQPVEEVQLVAAEITVKVTPIKPDGTKDGAIETKWNQVTNS

SEQ ID NO: 68633 - DNA, 1530 bp, Unknown
  Obtained from environmental sample
  misc_feature (1)..(1530): n is a, c, g, or t
atggctaaagaacaaaaaattgacaaccttagcgccgaaaccctggagatgagcgattttgaaatgctggttcagcaggaattcaaagctcagtccgaagaagcgcagagcgcggttcagggcgcggttaaaacccttgtcagccaggccctggaaaatgcggcgctggtttccaatgacgcgataaaaaccattgagggaataatcgcggaactggaccggaaactttcggagcaggtgaatctgattctgcatcatcctgaattttcccaactggaaagcgcgtggcgcgggctgaattaccttgttaccaataccgcgacaagcgaaagccttaaaattaaggtgctcaatatttccaagaacgacgtggcaaaaaccttaaagcgttttaagggtacggcatgggaccaaagccccctgtttaagcgtttttacgaagatgagtacggaaccgcgggcggcgaaccttacggcgccttgatcggggactactactttaaccatactccccaggatgtggaggtgctcaagggcatagcgcagatcgcttcggcggcccacatgcctttcatttccgcggcggatccttcaatcctgaatttaggctcatggcaggaactggctaaccccagggacataggtaaaattttctccacgccggaatacgcaagctggcggagtttccgggattccgatgacagccgctatgtggctcttgcgcttccccgcgttttaagccgcgttccttacggctccaagaccaatcccgtggaagagtttgattttgaggaagaagtaggagcgggggacagcggcaaatacaactggatgaacgcggcctacgcgatgggggtcaatgttaccagatcttttgccgactacggctggtgcgccaatatccgcggagtggaatcgggcggcgcggttcagggcctgcccacccataccttcctctcggaagacggcggcatggtgcaaaagtgccctacagagatcgccattaccgaccggcgggaagccgagctttcaaaaaacggcttcctcccgttgatccactggaagaacaccgattacgcggtcttcctcggcgggcaaacgctgaacaatcccgcgcaatacgattccgccgacgcgacagccaacgcgtccctgtcggcgcggctgccctatatttttgccgccagcaggttttcacatttcctgaaatgcattgtcagagacaaaatcggttcctttaaggaacgggttgatatggaacgtttcctgggcaactggatttcccagtatgttaccggcgatcccaacgcttccgaggaagtaaaggccaaatacccgcttgcggaagccaaagtggaagtggaagaagtggaaggcaagccgggttattacaacgcgaggttttacttaaggccgcactaccagcttgaaggcctgacagcgtccctgcgcttggttacaagggttcccagcgccgggttaacaagtattgtaaggatcggtttattttatgaatcgatccttaaataa

SEQ ID NO: 68634 - protein, 509 aa, Unknown
  Obtained from environmental sample
  DOMAIN (21)...(491): Protein of unknown function (DUF877)
  misc_feature (1)..(509): Xaa is any amino acid
MAKEQKIDNLSAETLEMSDFEMLVQQEFKAQSEEAQSAVQGAVKTLVSQALENAALVSNDAIKTIEGIIAELDRKLSEQVNLILHHPEFSQLESAWRGLNYLVTNTATSESLKIKVLNISKNDVAKTLKRFKGTAWDQSPLFKRFYEDEYGTAGGEPYGALIGDYYFNHTPQDVEVLKGIAQIASAAHMPFISAADPSILNLGSWQELANPRDIGKIFSTPEYASWRSFRDSDDSRYVALALPRVLSRVPYGSKTNPVEEFDFEEEVGAGDSGKYNWMNAAYAMGVNVTRSFADYGWCANIRGVESGGAVQGLPTHTFLSEDGGMVQKCPTEIAITDRREAELSKNGFLPLIHWKNTDYAVFLGGQTLNNPAQYDSADATANASLSARLPYIFAASRFSHFLKCIVRDKIGSFKERVDMERFLGNWISQYVTGDPNASEEVKAKYPLAEAKVEVEEVEGKPGYYNARFYLRPHYQLEGLTASLRLVTRVPSAGLTSIVRIGLFYESILK

SEQ ID NO: 68635 - DNA, 519 bp, Unknown
  Obtained from environmental sample
  misc_feature (1)..(519): n is a, c, g, or t
atggcgtcaggaagcagccaggcatttattgccaaaaacagggcgccccgggtccagatcgattacgatgtggaggtttacggggcgcagaaaaaagtaaatattccctttgtcatgggggttgtatcggatctttcgggaaaatccgaggaaccgcttcccaaagttgacgaccgtaaaccggcggaatttacatcggataatttcaatgagcgcctgaaggccataaaaccccgcgtcgcctttacggttcccaatacccttagcggagaaggaaatatcgccgtggacatgacctttcagaacatggacgatttttcccccgccgcgatcgcttctaaagttgacggcctaaaacaactgatggaatcccgtcagcagttggcgaatcttctttcctacatggacggaaaggccggggctgaagatctcttgaacaaggttctttcggatccggccctgctaaaggctctggcggcaaaagccaaagacgccgggcaaggaggggcaaatggctaa

SEQ ID NO: 68636 - protein, 172 aa, Unknown
  Obtained from environmental sample
  DOMAIN (7)...(165): Protein of unknown function (DUF770)
  misc_feature (1)..(172): Xaa is any amino acid
MASGSSQAFIAKNRAPRVQIDYDVEVYGAQKKVNIPFVMGVVSDLSGKSEEPLPKVDDRKPAEFTSDNFNERLKAIKPRVAFTVPNTLSGEGNIAVDMTFQNMDDFSPAAIASKVDGLKQLMESRQQLANLLSYMDGKAGAEDLLNKVLSDPALLKALAAKAKDAGQGGANG

SEQ ID NO: 68637 - DNA, 708 bp, Unknown
  Obtained from environmental sample
  misc_feature (1)..(708): n is a, c, g, or t
ttgtacaacggcgatgaggataccgccaaccgctggctgtcccaatgtgagactgaagaaacattaagggtttataaaatgtaccagtatttcacaacggcgcgttcccttatggtaaccggtaaattatccgaggcggaaaagctgcttcaaaaaattatcgacgtatcgctgagataccgccggcccgctgattttatcgaggctcaagtcctgcgttcaatatgtttttggaatatgaagcgccagaccgacgcgatacaggcaatgacggacgcgatctgcaaggcgtatgaattggaacttgttatgcccataattaaagaaggcggcgacattctgcccatattaaaaaacatattacacagactgaagtacggatacggcacggacaagctcgacaaaagttttgtaagcaaattatatcacacagcggaagacgcggcgcgcttcagaggcatgatggtcaggagaaataaaaacaaaccgataaaattatcgccccgtcaactggaaatgctggcgctattggagcggaacttcagttataaagaaatcgccgaaaagctgggcattaaagttaccactgttgtagaccacatcgccaaactgtatgaaaaactgggagcgtcaaattcgttggaagcggtaaccaaggcaagggaacttgggattagggctaattttttaaaaataccctgtaattag

SEQ ID NO: 68638 - protein, 235 aa, Unknown
  Obtained from environmental sample
  DOMAIN (169)...(226): HTH domain
  misc_feature (1)..(235): Xaa is any amino acid
MYNGDEDTANRWLSQCETEETLRVYKMYQYFTTARSLMVTGKLSEAEKLLQKIIDVSLRYRRPADFIEAQVLRSICFWNMKRQTDAIQAMTDAICKAYELELVMPIIKEGGDILPILKNILHRLKYGYGTDKLDKSFVSKLYHTAEDAARFRGMMVRRNKNKPIKLSPRQLEMLALLERNFSYKEIAEKLGIKVTTVVDHIAKLYEKLGASNSLEAVTKARELGIRANFLKIPCN

SEQ ID NO: 68639 - DNA, 996 bp, Unknown
  Obtained from environmental sample
  misc_feature (1)..(996): n is a, c, g, or t
gtgaacacgatcataaaggatagtgacggggcgttgcacggttacaacacggactatcacgggttttgcgtgatgctggagcagggcggaatagatccgaagggaaaaaaagctttagtgttaggcgacggcggatccgcgcggacagtgagggcggctttggacggactgggcgcgcgggagattgtgacgatctcccgccggggaacggaccattacggcaacatcgaccgtcattatgacgcggaactcatcgtaaacaccacgcccgtcggcatgtatcctgacaacggcaatgatcctttaagccttgaggggttcaggcaattaaccggcgtagccgatttgatctataatcccacgcggaccaaactcctgcttgaagccgaggggcttggcattccctgcgtaaacggccttatgatgctggtggcccaggcggaggcggcctcccgcttgttcttggactgtcccgccagaccggaactggtgaataaaatccacggcgcgattctcaaaaaaacgcaaaacatcgcccttatcggcatgcccggctgcggaaaaagcactgtcggccgcatcctcgcccaaaagacggggcgcccctttgcggatattgacagacatattgaggcggccgcgggcaagaaaatcccccaaattttcgccgatgatggcgaagaaacattccgacagctggaaacccgcatacttaccggggaagccaaaaacagcggcatggtactggcgacaggcggtggcgtggtgacacggcctgaaaatctcgacctgctgcggcaaaacagtttaattgtttatttaaaacgcgaattaaccgatcttattacagaaggccggccgctttcacaaaacatggggattcaagcccttgccgaaaagcggctgcctttatatgaagcgtggagtgatttcgccgttcaggtggaagcgaagcctgagcaaacggcggcaaaaatagaggaggtgttacaatga

SEQ ID NO: 68640 - protein, 331 aa, Unknown
  Obtained from environmental sample
  DOMAIN (22)...(126): Shikimate / quinate 5-dehydrogenase
  misc_feature (1)..(331): Xaa is any amino acid
MNTIIKDSDGALHGYNTDYHGFCVMLEQGGIDPKGKKALVLGDGGSARTVRAALDGLGAREIVTISRRGTDHYGNIDRHYDAELIVNTTPVGMYPDNGNDPLSLEGFRQLTGVADLIYNPTRTKLLLEAEGLGIPCVNGLMMLVAQAEAASRLFLDCPARPELVNKIHGAILKKTQNIALIGMPGCGKSTVGRILAQKTGRPFADIDRHIEAAAGKKIPQIFADDGEETFRQLETRILTGEAKNSGMVLATGGGVVTRPENLDLLRQNSLIVYLKRELTDLITEGRPLSQNMGIQALAEKRLPLYEAWSDFAVQVEAKPEQTAAKIEEVLQ

SEQ ID NO: 68641 - DNA, 432 bp, Unknown
  Obtained from environmental sample
  misc_feature (1)..(432): n is a, c, g, or t
atgaagatacttgtgatcaatggaccgaacatcaatatgctcggtaatcgggagccggacatttacggcattaaaagctatgcgtcattgctggaattcatacgggatgtcgccgtgcagcacgacgtggacgtagagtgcatgcagtcgaaccacgagggggcgattgtggacactatccaggccgcttatggccgctttgacgccattataatcaacccggcggcatatacgcacacaagcgtcgccattcttgacgccctgaaggcggtcgcgcttccgacggtggaggtgcatctatcaaacgtccacgagcgcgaggctttccgtaaaatttcctatgtggcgcaggcctgtgagaggacattcaccggcatgggctttgagggatacgcgctggcgatacgttatctcgcggggaaggaagagtaa

SEQ ID NO: 68642 - protein, 143 aa, Unknown
  Obtained from environmental sample
  DOMAIN (1)...(143): Dehydroquinase class II
  misc_feature (1)..(143): Xaa is any amino acid
MKILVINGPNINMLGNREPDIYGIKSYASLLEFIRDVAVQHDVDVECMQSNHEGAIVDTIQAAYGRFDAIIINPAAYTHTSVAILDALKAVALPTVEVHLSNVHEREAFRKISYVAQACERTFTGMGFEGYALAIRYLAGKEE

SEQ ID NO: 68643 - DNA, 1356 bp, Unknown
  Obtained from environmental sample
  misc_feature (1)..(1356): n is a, c, g, or t
atgaacacaaatgaacttataaaaaaaattgattcggagcgctcatcagaaatattcggcgaactttacagtaagagcgaaacaggcaacgcaagacaacgttacaaaaaattgataaaagaaatgcaagaaataaggactcaggaacatttttccgaaacggaaaatctgcgcgtcttcagcgcgcccggaagaactgagcttgccggcaaccacaccgatcacaatcacggcaaagtgctggcagcgtcaatacaattagataataccgccattgtacaaataagaaacgataacattgtattttttcgttcaacaggtttccctgatgtaaaagttaaattgactgataaagacggcaatcctgatttgcagccaaaacccgaagaagaaggaacgacagaagcgctgatcaggggaattgccgccgaattagaacagcggggctgcagcataaacgggttttcagctaacgcagattcgactgtatttgccggttcgggactgtcatcatcagcggcgcttgaaacgctatttgggcgaattttcgactctctgtacggcgaaggaaaacgcagttctcttgaaatcgcccaaatcgggcaaattgcagaaaataaatattttgggaagccctgcggattaatggatcaggcggcgtgcgccgcaggcggcgttgtcgccattaattttgcaaatactgcctgccctggaattaaacagatcaatttcgatcctgccgccgccggtttctctctctgcgtagtgaacacaggcggcagtcatgctgatttaacggcggattacgcttcaattcctgcggaaatgaaaaaagttgccgcttttttcggcaaaacggtgttaggtgaattggaaaaagacactgttctgtcccgcgccgcagatgtacgaaaagaattcggagacagggctttactacgcgccatccatttttatgatgagaatgtccgtgtagacgcaatgacagtttttctgacagaaatgaataccgccgttacagacactgtaaaacagcaggctctttataattatttgggatttgtaaatgaatccggagactcatcatggcagcttttgcagaatatatattctcctcagcgtcccgaaattcaaagtatcagtgttgcattggctttaacaaaagattttttccgcaagcaaaacttgcaaggcgcctgcagagtccacggcggcggtttcgccggaaccattcaggtttatattccactggacgcaataaacgcctactgcgcgcgcatcgaatcggtattcggcgcagactcggtaactgttttgcgaataaggcctatcggcgccgttgagctggagttttag

SEQ ID NO: 68644 - protein, 451 aa, Unknown
  Obtained from environmental sample
  DOMAIN (156)...(225): GHMP kinases N terminal domain
  misc_feature (1)..(451): Xaa is any amino acid
MNTNELIKKIDSERSSEIFGELYSKSETGNARQRYKKLIKEMQEIRTQEHFSETENLRVFSAPGRTELAGNHTDHNHGKVLAASIQLDNTAIVQIRNDNIVFFRSTGFPDVKVKLTDKDGNPDLQPKPEEEGTTEALIRGIAAELEQRGCSINGFSANADSTVFAGSGLSSSAALETLFGRIFDSLYGEGKRSSLEIAQIGQIAENKYFGKPCGLMDQAACAAGGVVAINFANTACPGIKQINFDPAAAGFSLCVVNTGGSHADLTADYASIPAEMKKVAAFFGKTVLGELEKDTVLSRAADVRKEFGDRALLRAIHFYDENVRVDAMTVFLTEMNTAVTDTVKQQALYNYLGFVNESGDSSWQLLQNIYSPQRPEIQSISVALALTKDFFRKQNLQGACRVHGGGFAGTIQVYIPLDAINAYCARIESVFGADSVTVLRIRPIGAVELEF

SEQ ID NO: 68645 - DNA, 597 bp, Unknown
  Obtained from environmental sample
  misc_feature (1)..(597): n is a, c, g, or t
atgactcttgcaaataaattgacctccttacgggtaattctaacgcctatattttttatcgtttattttttacccggcttttttccttcatggttcagtcttggatcagcatggactatacctgtcctttggcttatttttattttctcggaaataaccgacttgcttgacggactcgcagcccgtaaactcaatcaaacttccgatctcggaaaactttttgatcctttcgccgacactttaatgcaaataacatgtttcctgtgttttgtaattgacggtatttttccggcaattctttttttaattgttatttaccgtgaattcggcattcttttcatccgtaatcttatgttaaaaaaaggcatttcacttggcgcacgcaaaggcggaaaaataaaaactgtcgcatacataattgcaggaggcgccgcccttttaaccgtcagtcttcaaagactgaaaatatttgattttcttttcccgtattttaaaaccggcgctcttgtcttttttattattgccgttattatttctattatttcctttattgattacttaattatattactgaaagccgaaaatgccgcaaaatag

SEQ ID NO: 68646 - protein, 198 aa, Unknown
  Obtained from environmental sample
  DOMAIN (44)...(189): CDP-alcohol phosphatidyltransferase
  misc_feature (1)..(198): Xaa is any amino acid
MTLANKLTSLRVILTPIFFIVYFLPGFFPSWFSLGSAWTIPVLWLIFIFSEITDLLDGLAARKLNQTSDLGKLFDPFADTLMQITCFLCFVIDGIFPAILFLIVIYREFGILFIRNLMLKKGISLGARKGGKIKTVAYIIAGGAALLTVSLQRLKIFDFLFPYFKTGALVFFIIAVIISIISFIDYLIILLKAENAAK

SEQ ID NO: 68647 - DNA, 612 bp, Unknown
  Obtained from environmental sample
  misc_feature (1)..(612): n is a, c, g, or t
ttgagccgctttttgaaaattcaatttccgtttacaatagccgttttgccggggcttcctcattcggcggaagcggcgaagcgtatcagagaaagcggaaaagaggtgtttttacatcagccgatggaggctataggcggacaagacccgggtcccggagcgattacttcgggtatgagcgcggaagaaataagagcggtgttgacacgtaacgttaatgaaatcggacccatcgccggaataaacaatcatcaggggtcgaagataacgatggacaaagaggcgatgaaaacgatattggctttttgcaaagaaaaaggaataagttttgtcgattccagaacgaccgccgacactgttgttcccgaagtggcgaaacagatggggataaaaatcgccgaaagaaatgtttttgtcgataacgagcagaataaagacgctatgttccgctatatttcaacaggacttacaagagctcagagaaacggcagcgcagtgatgatagggcatacttggtcgcccgatttagcgcctttacttgccgagcaatttccgattttaatcgaacagggttacacactaaagaccgcttctgatataatcaagaaatga

SEQ ID NO: 68648 - protein, 203 aa, Unknown
  Obtained from environmental sample
  SIGNAL (1)...(25)
  DOMAIN (1)...(202): Divergent polysaccharide deacetylase
  misc_feature (1)..(203): Xaa is any amino acid
MSRFLKIQFPFTIAVLPGLPHSAEAAKRIRESGKEVFLHQPMEAIGGQDPGPGAITSGMSAEEIRAVLTRNVNEIGPIAGINNHQGSKITMDKEAMKTILAFCKEKGISFVDSRTTADTVVPEVAKQMGIKIAERNVFVDNEQNKDAMFRYISTGLTRAQRNGSAVMIGHTWSPDLAPLLAEQFPILIEQGYTLKTASDIIKK

SEQ ID NO: 68649 - DNA, 1020 bp, Unknown
  Obtained from environmental sample
  misc_feature (1)..(1020): n is a, c, g, or t
atgaaagttctcggcattgaaacatcatgcgatgaatgttccgccgcggttgtagaagacggcgaaaaaattatttccaatgttatcgccactcaaataccctttcacgccccgtggagcggagtagtcccagaaatagcaagcagaaaacacaccgagtggatttacgccgtaacaaaagaagcgttggataaagcgggcgtgaaagttgaggatatcgacgctgtagccgtaacaacacgtccggggcttttaggctcattattagtcgggctttctttcgcaaaagcgttcgcatggtctcgcagcattccgtttatcgccgtcgatcatatgctggcgcatttgtacgccccacgtttaatttcttccgcaaagtgcgaatacccttttttgggactccttgtttccggcggacatacaatcatttgcagagccgataattttgacaatattacagtcctcggcacaacaatagacgacgcagtaggcgaagcgtttgataaagtagcgaagttttacaatttcggctatccgggtgggtccatcattgataaaatggcgcagaatggggacagctccgtttttaattttcccatgccgtccttgcacaaaggcgatcatcgttacgatgtgtcatattcgggattgaaaaacgccgtaataaatcagcttgacacattcaaaaaaaaatccggcgcacacacaaacgaagacatagccgcttcttttcaaaaaaccgcagtccaaatactgttacgggcattgttaaacaccgccgaagatacgggtattacaacaatagtcgcgggcggcggcgttgcggcgaacagttaccttcgcgcctgccttgcggagcaaaaaaatcttcgctgtattttccctccgcaggacttatgcggcgacaacgccgccatgatagcgggaatcggctaccattaccttgcaagaggagaacattctgcgctgaatattaccgcaagcgcaagagtgacggggtttaagaaaaagtatccttaa

SEQ ID NO: 68650 - protein, 339 aa, Unknown
  Obtained from environmental sample
  DOMAIN (23)...(309): Glycoprotease family
  misc_feature (1)..(339): Xaa is any amino acid
MKVLGIETSCDECSAAVVEDGEKIISNVIATQIPFHAPWSGVVPEIASRKHTEWIYAVTKEALDKAGVKVEDIDAVAVTTRPGLLGSLLVGLSFAKAFAWSRSIPFIAVDHMLAHLYAPRLISSAKCEYPFLGLLVSGGHTIICRADNFDNITVLGTTIDDAVGEAFDKVAKFYNFGYPGGSIIDKMAQNGDSSVFNFPMPSLHKGDHRYDVSYSGLKNAVINQLDTFKKKSGAHTNEDIAASFQKTAVQILLRALLNTAEDTGITTIVAGGGVAANSYLRACLAEQKNLRCIFPPQDLCGDNAAMIAGIGYHYLARGEHSALNITASARVTGFKKKYP

SEQ ID NO: 68651 - DNA, 1890 bp, Unknown
  Obtained from environmental sample
  misc_feature (1)..(1890): n is a, c, g, or t
atgtttaccgtatggaaacctgacgccattgacggtatggatgcagaaaatatagacagaatgggctcaacccccacaggacagttcgcctatgccctggcaagagacaccggagagataaagcctttaactgctgtggttgttaatgaagtaatggctcaaattaccggacctaactccaaagtagtcgaaatgagcgatccttctccatttaagaatatgggaaaagatacttttgccgtcagaattgtagtccccattatcaacaagcgcctcaatgaaacagtcggagctataggctgtcagttggatatcagcatgatacaacccagaatagagcaaactatcgaagatttcgatgaagttacctctatggttatttattccgacaacgggtttgttttgggaaattacctgccggaatttataggaaagcaaattgacacggaaacacaatacggtccttatttagaagaagtcaaagatgttattaaaaacgcgcaggaatgggaaggaacagcttacgaccccgaattgaaaacaaatatggtaatggcagtagccaatattcccataggagtttccccgacaacatggtcggtaatggtcggctcaaccgaagcttacattcttaaagatgtcaacacaatgagaaactttgtcattattatggcggcaatagccattttggcggcgacagcgttaatatatcttgctttaagcaaaactattaaaccaatcatcaatgtatcggagactcttaaggatatttccgaaggtgaaggcgatttaacacgggttatatccgtcaattccaaagacgagataggcgaccttgccatgtacttcaataaaacattggaaaaaattaaaaacatgatcattaatatcaaagacgaggcaaccggtttgtcgcagataggcaatgatcttgccagcaatatgaacgagaccgccgcggcgattaatcaaattaacgccaatattcaaagcatcaaagggcgcgttattaaccagagcaccagcgtttcccagaccaatgccaccatggaacaagttatcaccaatatcaacaaacttaaccatcatgtagaaaatcagagcagtaatatgtccaaagcctcgtccgccattgagcagatggtagccaatatcggttctgtaactcaaacgttgattaagaacgctgataatgtaaactcgttgaaagaagcctcggaagtgggacgcgagggattgcaggaagtagcgaaggatatcaaagagatcgcccttgaatccgaaggtttaatgaaaatcaacgcggtaatgaaaaacatagccagccagaccaatctgctttcgatgaacgcggcgatagaagcggctcacgccggagacgccggtaaaggctttgcggttgtcgccgacgaaatacgcaaactggctgaagattccagcgcacagtccaagacgatcggttctgtacttaaaaagataaaggaggctatcgacaagataaccgactccacaacaaacgtgcttaacaagtttgaggcgattgactcaaacgtcaatacggtagcggaacaagaaggtaatatccgcaacgcaatggaagaacaaggcgagggaagcaaacagatacttgacggcgtaagcaatgtaaacgaaatcaccagtcaggttaaaggcagcagcgaagaaatgcttgaaggcagcaaggaagtaataaatgaaagccacaaccttgaaattgtaacgcaggaaataaccggcggtatgaatgaaatggcgtcaggcgcggatcagataaatgtagccgtaacgcatgtcaacgagatatgtataaagaaccgtgaaaacattgaaaacttattaaatgaggtttcacgatttaaggtagcttga

SEQ ID NO: 68652 - protein, 629 aa, Unknown
  Obtained from environmental sample
  DOMAIN (372)...(594): Methyl-accepting chemotaxis protein (MCP) signaling domain
  misc_feature (1)..(629): Xaa is any amino acid
MFTVWKPDAIDGMDAENIDRMGSTPTGQFAYALARDTGEIKPLTAVVVNEVMAQITGPNSKVVEMSDPSPFKNMGKDTFAVRIVVPIINKRLNETVGAIGCQLDISMIQPRIEQTIEDFDEVTSMVIYSDNGFVLGNYLPEFIGKQIDTETQYGPYLEEVKDVIKNAQEWEGTAYDPELKTNMVMAVANIPIGVSPTTWSVMVGSTEAYILKDVNTMRNFVIIMAAIAILAATALIYLALSKTIKPIINVSETLKDISEGEGDLTRVISVNSKDEIGDLAMYFNKTLEKIKNMIINIKDEATGLSQIGNDLASNMNETAAAINQINANIQSIKGRVINQSTSVSQTNATMEQVITNINKLNHHVENQSSNMSKASSAIEQMVANIGSVTQTLIKNADNVNSLKEASEVGREGLQEVAKDIKEIALESEGLMKINAVMKNIASQTNLLSMNAAIEAAHAGDAGKGFAVVADEIRKLAEDSSAQSKTIGSVLKKIKEAIDKITDSTTNVLNKFEAIDSNVNTVAEQEGNIRNAMEEQGEGSKQILDGVSNVNEITSQVKGSSEEMLEGSKEVINESHNLEIVTQEITGGMNEMASGADQINVAVTHVNEICIKNRENIENLLNEVSRFKVA

SEQ ID NO: 68653 - DNA, 1377 bp, Unknown
  Obtained from environmental sample
  misc_feature (1)..(1377): n is a, c, g, or t
atgatctcttcggcttgtcccgccatcgtcgattacatacaactctacgctcctatcctcgcgccctacatttcgccgcacgcctcgccgctgctcacccacgcaagatttctccgctcccattacgaatcggaaggcggtgagaaaatcgcggtggtgttcgtcggtccgtgcatcgcaaagaaacacgaggccgatttacgcaacacggagatcgacgcggccattacttttactgaattgcgcagatggctggacaaagagggcgttacgccgcagacgatttcgttttcgatgtccccttccgccttggcggcttgcgcgtttgagccgcgccggagcgctaaaggggcttttttcccccttgagggcggagagataaaggctttttccgcctacgtggcggaagcggcgaaggctgagaggggctatatacacaccatatcggcgtccggctttccggcggtgcgcaggattttggagggttttgaccccgccgcgttggatgagccggtgtttttggagctcttagcctgtcccagcggttgcgtcacaggccctggcatgtccggcgccgtgccgggcgtcatacgccatacccgcctatgggattacgcccgctccgccgacgatactctcgacgccgaaacgctctcccgcttgccgcttgtagacgccgattatcctatggccacgttgctggacgccccgcacacggaacaggagatctccgaggcgcttttgggggtggggaaatacagccttgccggccggctcaactgctcaagttgcggttacgacacatgccgggatttcgccataggcctgctggacgggcgggcggagaaatccatgtgcgcctcgtatatgcgcgaactcgccaacaaaaccgccaacgggcttatcaaggcgattcccactggcgtagtcatcgttgaccgcgatttgaaaatcatcgattgcaacgtgcagttcgcccgccttatggggagcgaaatagaggagttgttcgccatatcgcctggactggagggcgccgatctcagaaaagtatcgccttttccgcagtattttcagaccatcatcgacccgtccgggccggaactcgctcaaaccgacgtgcgggagggcagcaaaatattccacctaacggtcttcgccgtggaaaaaggcgttacggcggcgggagtggtggaagacataacagcgccgcgcgtgcggatcgaaacgacggtcgatcgggcgcgggaactcattaaaaagaacgtgtctacggttcagcagatagcgttcctcttaggagaaaacgcggcggaatcagaggcgatactcaattccattatcgagtcttacacggtgggcgaggaagatgcctga

SEQ ID NO: 68654 - protein, 458 aa, Unknown
  Obtained from environmental sample
  DOMAIN (1)...(190): Iron only hydrogenase large subunit, C-terminal domain
  misc_feature (1)..(458): Xaa is any amino acid
MISSACPAIVDYIQLYAPILAPYISPHASPLLTHARFLRSHYESEGGEKIAVVFVGPCIAKKHEADLRNTEIDAAITFTELRRWLDKEGVTPQTISFSMSPSALAACAFEPRRSAKGAFFPLEGGEIKAFSAYVAEAAKAERGYIHTISASGFPAVRRILEGFDPAALDEPVFLELLACPSGCVTGPGMSGAVPGVIRHTRLWDYARSADDTLDAETLSRLPLVDADYPMATLLDAPHTEQEISEALLGVGKYSLAGRLNCSSCGYDTCRDFAIGLLDGRAEKSMCASYMRELANKTANGLIKAIPTGVVIVDRDLKIIDCNVQFARLMGSEIEELFAISPGLEGADLRKVSPFPQYFQTIIDPSGPELAQTDVREGSKIFHLTVFAVEKGVTAAGVVEDITAPRVRIETTVDRARELIKKNVSTVQQIAFLLGENAAESEAILNSIIESYTVGEEDA

SEQ ID NO: 68655 - DNA, 375 bp, Unknown
  Obtained from environmental sample
  misc_feature (1)..(375): n is a, c, g, or t
atgaccgtcgcaaaagcgcctatttatacggagcttgccgaatgtcatgactgctacaagtgcattcgcaaatgtcctgttaaatctatcaaggtggagaaaggacaggcaagcatcctgtttgaacgctgtatttactgcggacgctgtgttaataactgcccctcccatgccaagcattaccgtaacgatgttgaaaaagtaaaattgcttttagcgggcgatcggaaagttgcagtttcccttgccccttcgtttatttctgaatttgccgaatggaaacaggaagaacttatcgccgcgctgaaaaaactggggtttcgccgcccgtgtcggagaccgctctgggcgcggattttctttccgcccggatag

SEQ ID NO: 68656 - protein, 124 aa, Unknown
  Obtained from environmental sample
  DOMAIN (8)...(31): 4Fe-4S binding domain
  misc_feature (1)..(124): Xaa is any amino acid
MTVAKAPIYTELAECHDCYKCIRKCPVKSIKVEKGQASILFERCIYCGRCVNNCPSHAKHYRNDVEKVKLLLAGDRKVAVSLAPSFISEFAEWKQEELIAALKKLGFRRPCRRPLWARIFFPPG

SEQ ID NO: 68657 - DNA, 675 bp, Unknown
  Obtained from environmental sample
  misc_feature (1)..(675): n is a, c, g, or t
atgggcgagggataccccgcgccggatgtactttccgaagcgcacagccttgctgtggttggagagaccacccttaaagttccgcgcttggtagaggtaacaaagatagacggcaaatgggctatcgtttgggaatacgttgacggaaccacccttgataaacttattgaaaaaaataagggcaaggaagagcaatacattgaacgttttgttgacattcagcttgatatgcacaaacacagcgcgacaagacttccgttgcttgccgaaaagatggagcgtaaaattaaatcctccgaccttgacgcaacctctcgctatgagcttttaggaaggctggcaggtatgcccaagcacaccaaactctgccacggcgattttaatcccggcaacattgtcattacagaaaaagacgaggcgtatatcatcgactggtctcacgcctctcagggtaatgcttcagcggacgcggcgcagacttatatgctgttctggcttgcgggtaacatcactttagcggacaagtaccttacgttgttctgcaaaaagagcgacacggcaaaacagtatgtggaaaagtggctttctgttgtggcggcttcgcagcttcccaaagcaaagccgcaagaaaaagaatttttactgcattgggcaaatgtagcggaataccaataa

SEQ ID NO: 68658 - protein, 224 aa, Unknown
  Obtained from environmental sample
  DOMAIN (2)...(190): Phosphotransferase enzyme family
  misc_feature (1)..(224): Xaa is any amino acid
MGEGYPAPDVLSEAHSLAVVGETTLKVPRLVEVTKIDGKWAIVWEYVDGTTLDKLIEKNKGKEEQYIERFVDIQLDMHKHSATRLPLLAEKMERKIKSSDLDATSRYELLGRLAGMPKHTKLCHGDFNPGNIVITEKDEAYIIDWSHASQGNASADAAQTYMLFWLAGNITLADKYLTLFCKKSDTAKQYVEKWLSVVAASQLPKAKPQEKEFLLHWANVAEYQ

SEQ ID NO: 68659 - DNA, 1194 bp, Unknown
  Obtained from environmental sample
  misc_feature (1)..(1194): n is a, c, g, or t
atgcggttgataggctttcgtcttttgcatgtttccgttctgtctctgacagggtgcggcaatgatgattccactggtggcggcaacggcggcgataaacaaaatacaggtgacaaaacaggcgatggttcacagacttcaggcgacggaacacaagatccgtccgacggttccgggtttacggtaagagcagatgggttcaccggtaaacagttaatcgatacaatcgcctttggcaatgggaagtttgtcatcaagtttttagaaggcaatggcagcagaatgtctacttctacggacggtataacatggacagccggaacggaatgcggaatcaattcccccaatgtaatcgcctatggcggcgacaagtttgttgtaggcggatttaaaaacataacgtcgtactcatatgacggtataacatggacaactgaaaattatgttcctcccgttgattcctttcctgtcggtgaagccagcaatttcattaatacaatcgcctatggcaacggcaaatttgtcgccggtgctaaaggaggtgaatatgcgatgtattcaactgacggcataacatggcaaaccaccacaaattgctttgtaatcggatcaggtatttcgagaaaaagttattctgtcagatcaatcgcctttggcggcggtaagtttgtcgccgttggatataatagtggcggctatatagcgtattcatctgacggtataacatgggaatctaaagaaatcaaaaatttattatcagaatcaaaatcattcaaatcaatcgcctatggcaatggcagatttgtcgccgttgggggacttgggtcaagttttggcactgatatagcatattcagacgacggcataacatgggaatctgtaccgactaccgcattcgactacttaaacaacaaaggagaaaccagaaatagcaccatcagtgtaatcgcttatggcaacggcaagtttgtcgccggatcaacaagaggtaaacttgcaacttcaactgacggcataacatggacaccattaccggatgacacattcggaataagcgacgacgataatatacgatcaatcaatgcaatcgcctatggcaacggtaagtttgtcgtcgtgggaaatgattccagtttcagcagcggaacactttcacttttagacagcaaaataatatgtttacccggcaattaa

SEQ ID NO: 68660 - protein, 397 aa, Unknown
  Obtained from environmental sample
  misc_feature (1)..(397): Xaa is any amino acid
MRLIGFRLLHVSVLSLTGCGNDDSTGGGNGGDKQNTGDKTGDGSQTSGDGTQDPSDGSGFTVRADGFTGKQLIDTIAFGNGKFVIKFLEGNGSRMSTSTDGITWTAGTECGINSPNVIAYGGDKFVVGGFKNITSYSYDGITWTTENYVPPVDSFPVGEASNFINTIAYGNGKFVAGAKGGEYAMYSTDGITWQTTTNCFVIGSGISRKSYSVRSIAFGGGKFVAVGYNSGGYIAYSSDGITWESKEIKNLLSESKSFKSIAYGNGRFVAVGGLGSSFGTDIAYSDDGITWESVPTTAFDYLNNKGETRNSTISVIAYGNGKFVAGSTRGKLATSTDGITWTPLPDDTFGISDDDNIRSINAIAYGNGKFVVVGNDSSFSSGTLSLLDSKIICLPGN

SEQ ID NO: 68661 - DNA, 1671 bp, Unknown
  Obtained from environmental sample
  misc_feature (1)..(1671): n is a, c, g, or t
atgaaaaaaccgaaaaaaacatcatttgcaaagttatttaccaccgtctctttgctcatgattttaactataacggtttctttgtccgtaatatttttttacaaccttcgccatattgttaccaatttaacggagttaaatacaaagacaagcgtcgcccgttcgcaggatatggtgttatcctttataaaggaacatgaagaagccctaaaacaattatccgtaggcgttactcatctttttaaccaaagaacggtttccgaagaatctgtagcagattttctgcgcgacataaaagaaataacgcccaatagccttgatctgtattttaccaataatctgatgtggaacaagccgggcggttttgccgcgttcgcgggaggatggattcccgatgacgattgggataatactcagcgctcatggtttaccgacgcaaagaaagcgcagggcaaaatcgctttttccgaaccctatgttgattctgaaaccggcgacgttattatcaccctttcaatgacggtctttgacggcgaaggggcggacatcggggtagcggcggacgatgttgcggtaaatgttatgagagagatgattaacgcgatgcgcggtttccccggacaggaaatgtatatgattaacgccgacggactttttataactcacgaagacatcaacgcggttatggaaaaagatttttttaaagaattaaaacttgataaataccgcgcctccgtattgggttcctccgacttttttaagattgataacaaattttttatttattcttccgccataccgcataccggctggattcttgtgtcaacaataccgtcatctgtaatttttaatgatataaataccctgattctgcgcctgattattttatgtatagcaatgctcgcggtagttgtttttatattaatcttttttatcgcgcgaagaatcagctcgccgataaaagcgattcattctgctctggaaaagttaaaggacggggatttaaccgtaaaagtagacgttaaatccgaagatgaaatcggggaattgtcaggctttttcaatatgacgctggaaaaaatcaaaaaccttgtagggacgataaaatacaaaatcaacggacttacccataccagttttgaactttccgttaatatgggcaaaacatcgacagccgtaacgcagatttcatctaaccttgacaacatggaaaatcttatggtcaagcaggaaaacggcgctgaagaagccggcaaggcggtagggataattaaaacaaatattgacagtcttaacaaaatgatagaagaacagactgaaagcgtaaatatgtcgtcttcggctattgaggaaatgacagctaacattcattcggtaactcaaacgctggctgaaaacacaaaaaatgtcggcgttttgactgaagcgtcggagaacgggaaaacaggactccagacggtcgcgcaggaaatacaggaaatagcccatgactccgaggggctgctggaaataaattcggtaatgaacaatatcgcagctcagacaaacctgctttcgatgaacgccgcgattgaggcggctcacgccggagaagcagggaaagggtttgccgtagtcgccgataaatccgcaaacttgccgagtcgtccggcagacaatcctcggccataa

SEQ ID NO: 68662 - protein, 556 aa, Unknown
  Obtained from environmental sample
  SIGNAL (1)...(27)
  DOMAIN (155)...(235): Cache domain
  misc_feature (1)..(556): Xaa is any amino acid
MKKPKKTSFAKLFTTVSLLMILTITVSLSVIFFYNLRHIVTNLTELNTKTSVARSQDMVLSFIKEHEEALKQLSVGVTHLFNQRTVSEESVADFLRDIKEITPNSLDLYFTNNLMWNKPGGFAAFAGGWIPDDDWDNTQRSWFTDAKKAQGKIAFSEPYVDSETGDVIITLSMTVFDGEGADIGVAADDVAVNVMREMINAMRGFPGQEMYMINADGLFITHEDINAVMEKDFFKELKLDKYRASVLGSSDFFKIDNKFFIYSSAIPHTGWILVSTIPSSVIFNDINTLILRLIILCIAMLAVVVFILIFFIARRISSPIKAIHSALEKLKDGDLTVKVDVKSEDEIGELSGFFNMTLEKIKNLVGTIKYKINGLTHTSFELSVNMGKTSTAVTQISSNLDNMENLMVKQENGAEEAGKAVGIIKTNIDSLNKMIEEQTESVNMSSSAIEEMTANIHSVTQTLAENTKNVGVLTEASENGKTGLQTVAQEIQEIAHDSEGLLEINSVMNNIAAQTNLLSMNAAIEAAHAGEAGKGFAVVADKSANLPSRPADNPRP

SEQ ID NO: 68663 - DNA, 687 bp, Unknown
  Obtained from environmental sample
  misc_feature (1)..(687): n is a, c, g, or t
ttgggacggaggctgtcagtgtctgcgacaatagctgagactctgcttaaagttgaaaacctcgttgtcaattacggggccatacgcgccctgaagggcgtttcttttgaagtcgccaaaggggaaataatcactctgattggcgcgaacggcgcggggaaaagcacgacgcttaatgcgatctccaacgttattaagaaagcttccggctcggtgatctttgacggcaaggatataagctctgtcccgcccgacagtattgtttcatccggtctggtgcaagttccggagggccggcgaatttttgcaaatttgagcgttcgtgacaatctggaaatgggcgcgtattcacggcgttctgttaccgcagcggaaaagcaggccatacgaagcgacatggaaaaagtatttgatattttccccaggctaaaagagcgtatacgccagatagggggcacgctttcaggcggcgaacagcagatgctcgcgatgggccgttccctgatggccagtccccgtctgctgctcctcgacgagccgtctatgggccttgcccctatccttgttgacgaaattttttcggtcatcaaagaaatcaatgaaacgggaacaacagtgctgcttgtgagcaaaacgcgtacaaggcccgggaactcgcatcacgggcgtaatctcggcggaatctga

SEQ ID NO: 68664 - protein, 228 aa, Unknown
  Obtained from environmental sample
  DOMAIN (41)...(217): ABC transporter
  misc_feature (1)..(228): Xaa is any amino acid
MGRRLSVSATIAETLLKVENLVVNYGAIRALKGVSFEVAKGEIITLIGANGAGKSTTLNAISNVIKKASGSVIFDGKDISSVPPDSIVSSGLVQVPEGRRIFANLSVRDNLEMGAYSRRSVTAAEKQAIRSDMEKVFDIFPRLKERIRQIGGTLSGGEQQMLAMGRSLMASPRLLLLDEPSMGLAPILVDEIFSVIKEINETGTTVLLVSKTRTRPGNSHHGRNLGGI

SEQ ID NO: 68665 - DNA, 561 bp, Unknown
  Obtained from environmental sample
  misc_feature (1)..(561): n is a, c, g, or t
ttgctcacaagcagcactgttgttcccgtttcattgatttctttgatgaccgaaaaaatttcgtcaacaaggataggggcaaggcccatagacggctcgtcgaggagcagcagacggggactggccatcagggaacggcccatcgcgagcatctgctgttcgccgcctgaaagcgtgccccctatctggcgtatacgctcttttagcctggggaaaatatcaaatactttttccatgtcgcttcgtatggcctgcttttccgctgcggtaacagaacgccgtgaatacgcgcccatttccagattgtcacgaacgctcaaatttgcaaaaattcgccggccctccggaacttgcaccagaccggatgaaacaatactgtcgggcgggacagagcttatatccttgccgtcaaagatcaccgagccggaagctttcttaataacgttggagatcgcattaagcgtcgtgcttttccccgcgccgttcgcgccaatcagagtgattatttcccctttggcgacttcaaaagaaacgcccttcagggcgcgtatggccccgtaa

SEQ ID NO: 68666 - protein, 186 aa, Unknown
  Obtained from environmental sample
  DOMAIN (32)...(70): Protein of unknown function (DUF1602)
  misc_feature (1)..(186): Xaa is any amino acid
MLTSSTVVPVSLISLMTEKISSTRIGARPIDGSSRSSRRGLAIRERPIASICCSPPESVPPIWRIRSFSLGKISNTFSMSLRMACFSAAVTERREYAPISRLSRTLKFAKIRRPSGTCTRPDETILSGGTELISLPSKITEPEAFLITLEIALSVVLFPAPFAPIRVIISPLATSKETPFRARMAP

SEQ ID NO: 68667 - DNA, 813 bp, Unknown
  Obtained from environmental sample
  misc_feature (1)..(813): n is a, c, g, or t
atgaacagggatcaattacgcttaagggtacaggacctctccattgattttggagggcttaaagccgtcagcgaattttcctgcgagctgtaccacggggaactggtcgggcttatcggcccaaacggggcgggtaagacgacggtattcaatatgctttccggcatatacgccccaaccggaggcgagattgaattccgtgaccgcaaaggcggactttgtctcgtgaaaaacctgaaccccgccagaatgaaccggattggacttgccaggacttttcagaatatacgcctgttttccaatctttccgttgaggacaatatccgcatagccttacattccggcagaataagcggccctatcgacgcgctgctgcgcctgaggcgtttccgtattgatgaggagcggatgagggcgcaggcgcatgagcttctttcccttttcaaaattgaaaaaaagaaggatgaactggcccgcaatcttccgtacggcgaacagcgcaagctggagattgcccgcgccctggcttcaaatcccagcctcctcttgctggacgaaccagccgcggggatgaacccccaggaaaccgaagatttaatgaaggtaatcagctttatcaggaatgaatttcacctgacgattcttttaatagaacacgatatgcggctggtaatggggatatgcgaacggattatagtactggactacggacggacaatcgccgcaggctcccctgaagaaatccggcaaaatccggcagtgataaaagcttaccttgggacggaggctgtcagtgtctgcgacaatagctga

SEQ ID NO: 68668 - protein, 270 aa, Unknown
  Obtained from environmental sample
  DOMAIN (33)...(237): ABC transporter
  misc_feature (1)..(270): Xaa is any amino acid
MNRDQLRLRVQDLSIDFGGLKAVSEFSCELYHGELVGLIGPNGAGKTTVFNMLSGIYAPTGGEIEFRDRKGGLCLVKNLNPARMNRIGLARTFQNIRLFSNLSVEDNIRIALHSGRISGPIDALLRLRRFRIDEERMRAQAHELLSLFKIEKKKDELARNLPYGEQRKLEIARALASNPSLLLLDEPAAGMNPQETEDLMKVISFIRNEFHLTILLIEHDMRLVMGICERIIVLDYGRTIAAGSPEEIRQNPAVIKAYLGTEAVSVCDNS

SEQ ID NO: 68669 - DNA, 414 bp, Unknown
  Obtained from environmental sample
  misc_feature (1)..(414): n is a, c, g, or t
atgaaattgcggctaacgcaaacggaattaccattttccgctacaagatgctcggcttcgtcatcgcggcttttatcgccggcattggcggctgcctctacgcgatggttaacggctttgtcaaacccggatgcggctcagttcctcagatccatcgactaccttatttatgtcgtgctgggcggcatggggtcaatgacaggctcgattctttcggcttatgtccttacctatttacaggagtttttacgtttcctgcaggactaccgcctcttgatatatcccattatactgatactcgtcatgctgttccgcccccagggccttttgggaatgaaagaattttccatagtgggctttgttgataaaatttacaacaaattcctccagcgggcaaagagaggaacggcatga

SEQ ID NO: 68670 - protein, 137 aa, Unknown
  Obtained from environmental sample
  misc_feature (1)..(137): Xaa is any amino acid
MKLRLTQTELPFSATRCSASSSRLLSPALAAASTRWLTALSNPDAAQFLRSIDYLIYVVLGGMGSMTGSILSAYVLTYLQEFLRFLQDYRLLIYPIILILVMLFRPQGLLGMKEFSIVGFVDKIYNKFLQRAKRGTA

SEQ ID NO: 68671 - DNA, 549 bp, Unknown
  Obtained from environmental sample
  misc_feature (1)..(549): n is a, c, g, or t
gtggtatttatcaatctgaagtcccttacaggcgggcccaacgggagagtgttccccacaaaaatcgtgctgaattacgagctggcctttgtgctcacgacgataacgctggttattatcctcgcgttgctgcagaattttctccgttccagctacggacgggcgatcaaggcgtgcagggaagatgaaattgcggctaacgcaaacggaattaccattttccgctacaagatgctcggcttcgtcatcgcggcttttatcgccggcattggcggctgcctctacgcgatggttaacggctttgtcaaacccggatgcggctcagttcctcagatccatcgactaccttatttatgtcgtgctgggcggcatggggtcaatgacaggctcgattctttcggcttatgtccttacctatttacaggagtttttacgtttcctgcaggactaccgcctcttgatatatcccattatactgatactcgtcatgctgttccgcccccagggccttttgggaatgaaagaattttccatagtgggctttgttga

SEQ ID NO: 68672 - protein, 182 aa, Unknown
  Obtained from environmental sample
  misc_feature (1)..(182): Xaa is any amino acid
MVFINLKSLTGGPNGRVFPTKIVLNYELAFVLTTITLVIILALLQNFLRSSYGRAIKACREDEIAANANGITIFRYKMLGFVIAAFIAGIGGCLYAMVNGFVKPGCGSVPQIHRLPYLCRAGRHGVNDRLDSFGLCPYLFTGVFTFPAGLPPLDISHYTDTRHAVPPPGPFGNERIFHSGLC

SEQ ID NO: 68673 - DNA, 342 bp, Unknown
  Obtained from environmental sample
  misc_feature (1)..(342): n is a, c, g, or t
atggcgccccgattcccgttccgttcaaccataatactcggcgccgcaggaatcctggcgatagtcctcccgctcttgctgatgaagttaggtgtcatcgatccgtatactacccgcatccttactatgggcggggtgaacgcgataatggcaatgtcggttaacatgatcgtcggcattaccggccagctttcgcttggccaggctggattcctcgcgataggcgcctattcctgcatttttttcaattttgacgtgggcctgccccttccgtttgcggcgctgtgcgccgttcttgtcacccacgctcgccggttttctcatcggttttccccgtgctga

SEQ ID NO: 68674 - protein, 113 aa, Unknown
  Obtained from environmental sample
  misc_feature (1)..(113): Xaa is any amino acid
MAPRFPFRSTIILGAAGILAIVLPLLLMKLGVIDPYTTRILTMGGVNAIMAMSVNMIVGITGQLSLGQAGFLAIGAYSCIFFNFDVGLPLPFAALCAVLVTHARRFSHRFSPC

SEQ ID NO: 68675 - DNA, 891 bp, Unknown
  Obtained from environmental sample
  misc_feature (1)..(891): n is a, c, g, or t
atgatagtactgcaacaattgataaatggcgtgtctctgggctcaatttacgccttgattgccttgggctataccatggtttacggcatagtcctcttaatcaactttgcacacggcgatattctgatggtgggggcatatacggcattttttgtgttaagcgccatcggcgcggggccggtggggatgctgtttgcctttattatatcaatgatcatctgcgccggcttcgggatatccattgaacgccttgcctacaggcctctccgcacggcaccgcgcctgaattccctgattactgccatcgccgtcagcctgattctggagaacggcgcgagggttctgccctttatcggccccaacccgcggcagtttccccgcccgacggttgtcaatatcaaaatagccggagagctttccatctcaaatatacaaattatcgtgatagtcctctcggcgcttttaatgctcgcgttaaactacatcatcaattacaccaaacgcggcaaggcgatgcgggccgtttcttttgacatacaggcggcaagccttatgggaatatccgttaacaagattatctcatttacattcgcccttgggtcggtgctggccgccgccgggggagtcctttacgcttcggcctacccaaggatagaccccatgatgggcatgatgcccggcctcaaggcctttgtcgcggcggtgctgggcggcatcggctcggttccaggggccatgctcggcggctttattcttggcattgccgaaacttttaccaagggctttatctccagccagttcagcgacgcgatttcattttccgttttgataatcgtcctgttaatcaggccgaccggcatactgggcaagaaagcaagggtaaaggtttga

SEQ ID NO: 68676 - protein, 296 aa, Unknown
  Obtained from environmental sample
  DOMAIN (6)...(280): Branched-chain amino acid transport system / permease component
  misc_feature (1)..(296): Xaa is any amino acid
MIVLQQLINGVSLGSIYALIALGYTMVYGIVLLINFAHGDILMVGAYTAFFVLSAIGAGPVGMLFAFIISMIICAGFGISIERLAYRPLRTAPRLNSLITAIAVSLILENGARVLPFIGPNPRQFPRPTVVNIKIAGELSISNIQIIVIVLSALLMLALNYIINYTKRGKAMRAVSFDIQAASLMGISVNKIISFTFALGSVLAAAGGVLYASAYPRIDPMMGMMPGLKAFVAAVLGGIGSVPGAMLGGFILGIAETFTKGFISSQFSDAISFSVLIIVLLIRPTGILGKKARVKV

SEQ ID NO: 68677 - DNA, 360 bp, Unknown
  Obtained from environmental sample
  misc_feature (1)..(360): n is a, c, g, or t
gtgaaaaacatagaaattctgtatgaagatgacaatattatcatcgtaaacaagccggcggggcttgccgttcagggcggagagggggtaaaaacatcgctggacaagatttttgccgaaatccgcgaccctaagcccctgctggttcacagactggataaggatacttcaggggtgctgctggcggcaaaaggacgcgaaaacgcggctcgtttttcaagtctgcttaacagccccaaaatcacaaaacagtataccgcaatctgcgcggggcgtcctaaaaatgaaaagggcgtaattaacgataaactgctgattcacggtaatttaaaagctcggaaaccagatataaagttttaa

SEQ ID NO: 68678 - protein, 119 aa, Unknown
  Obtained from environmental sample
  DOMAIN (12)...(119): RNA pseudouridylate synthase
  misc_feature (1)..(119): Xaa is any amino acid
MKNIEILYEDDNIIIVNKPAGLAVQGGEGVKTSLDKIFAEIRDPKPLLVHRLDKDTSGVLLAAKGRENAARFSSLLNSPKITKQYTAICAGRPKNEKGVINDKLLIHGNLKARKPDIKF

SEQ ID NO: 68679 - DNA, 699 bp, Unknown
  Obtained from environmental sample
  misc_feature (1)..(699): n is a, c, g, or t
atggtagataaacttcaagttcctgtaacacgccactggctggagagtttgagtacggagcaattagttaaacttgcagactcttatggggtagatatccctcccggactggaaagaattttcattatcgaagaaatattggaagttaccggtattgacgagcaagaaatttccgaagaagaagacgacacggaagttatggaagttaatgaaaattattccgaaacagccgctctgcccggtcaatataatatctcttatatcgaagtaataataagagaccctctttgggtttttgctttttgggaaataaaaaaacatgacagggaattacatgaaaacgaagacgattttgacggttattgcctgcgtgtaattccgctggacaaaaacgggaaagaaaaaaatccaaacgaaaacccttttacggtatctatcggcgcggaagacagcggcagatatttaggcattgtggaacattccgagcaaaacacggacagctatgtcatacaactttgcgtaagcagaggcgatgtcatgatgcaaattgcggtttcacagccgttttctttgccaaagccttatgataacgatattatcgcggatatggaacgcaacacattaatacgcctttcgggagcgcgcgatttatcaataataaaaaatatggatcaccaatccaaagttaagaggcagtaa

SEQ ID NO: 68680 - protein, 232 aa, Unknown
  Obtained from environmental sample
  misc_feature (1)..(232): Xaa is any amino acid
MVDKLQVPVTRHWLESLSTEQLVKLADSYGVDIPPGLERIFIIEEILEVTGIDEQEISEEEDDTEVMEVNENYSETAALPGQYNISYIEVIIRDPLWVFAFWEIKKHDRELHENEDDFDGYCLRVIPLDKNGKEKNPNENPFTVSIGAEDSGRYLGIVEHSEQNTDSYVIQLCVSRGDVMMQIAVSQPFSLPKPYDNDIIADMERNTLIRLSGARDLSIIKNMDHQSKVKRQ

SEQ ID NO: 68681 - DNA, 1476 bp, Unknown
  Obtained from environmental sample
  misc_feature (1)..(1476): n is a, c, g, or t
atggaattccgttatgcgatctcgcttgttttagaagctcatctgccttttgtaagagaataccaaaaagaaaacgatttatcccaagccggcgaagaaagccgtttctttgaatatgtcagcgaaacattgcttcctcttcttgaggcgcttcaccggctggaatcggatcacattcaatttcgtcttgctctggcaatttctcccattcttattcatttattaaccgacgatcatttacaaaaaaaatatctgtcttatattgacaagcaaattgaattcggaagacaggaaattgagagaaccgcgaataacgatgaaataaataaattggctcaacattattacaatacaatcgtagacagaagaatagcgtatacggaacgctatgaaaaaaatattttaaaagcgcttgattcctacaggcgtaagggcaagcttgaaattttagcttcctgcgctactcacgcttttttgccgtttatcagccacaacggcgaatctttacaggcgcagatggaaatccctattcccgcttaccgccggcattttgcgggcgttccgcagggcttttggcttccggaacttggctggtcttccgcgctggaatcgtatttaagagactataatttttcttatactatcgtagacagccacggtcttttgttcggcaatcctcagccggaaaagggaactttttatcccgttaaaacacctaacggcacttatatcctcgcaagagacctgtacgccgtgcgtgagatagaaaaatcggcggtagatgaaatataccgtaacaatgacagagacgtaggttatgatctgccgcctgaaacggtaaaaccgtttttaagcgccgaaggagaacgccacagaacaggatacaagtattggcagcgttctaacaaaaattataatccgcaagccgccgtcggcagagcggctgaatacgcaaaaacatttatggataacacaatcgcccgtcttgaagaagcgtcaaaacacatggaagaagcgcctttaagcctttacgcgaataacgcgggcttttttggaaacctctggcatgagggctttcaatttatagagacgcttttccgccttgcccatgaacataaggagctgaaatttatctgtccaagtgaatatatttttaaacaggattttaccaaaattcaggttgtttcgccagaattttcatcaagcggcgtaaacggttatgccgaaacatggcttgatgtttccaacgactggatttaccgccaccttgcgcgttcaatggaaagaatgacagagttagcggaacgttttccggacgatactggattaaaagaaagagcgttaaatcaagcggcgcgtgaaatactgcttgcccaatcttcggactggcgcttcgcttttattcagacaagactcaaccgagtatgccgcagatggtgtgcagaacgctcttggcaattttacaacgatatatga

SEQ ID NO: 68682 - protein, 491 aa, Unknown
  Obtained from environmental sample
  DOMAIN (8)...(423): Glycosyl hydrolase family 57
  misc_feature (1)..(491): Xaa is any amino acid
MEFRYAISLVLEAHLPFVREYQKENDLSQAGEESRFFEYVSETLLPLLEALHRLESDHIQFRLALAISPILIHLLTDDHLQKKYLSYIDKQIEFGRQEIERTANNDEINKLAQHYYNTIVDRRIAYTERYEKNILKALDSYRRKGKLEILASCATHAFLPFISHNGESLQAQMEIPIPAYRRHFAGVPQGFWLPELGWSSALESYLRDYNFSYTIVDSHGLLFGNPQPEKGTFYPVKTPNGTYILARDLYAVREIEKSAVDEIYRNNDRDVGYDLPPETVKPFLSAEGERHRTGYKYWQRSNKNYNPQAAVGRAAEYAKTFMDNTIARLEEASKHMEEAPLSLYANNAGFFGNLWHEGFQFIETLFRLAHEHKELKFICPSEYIFKQDFTKIQVVSPEFSSSGVNGYAETWLDVSNDWIYRHLARSMERMTELAERFPDDTGLKERALNQAAREILLAQSSDWRFAFIQTRLNRVCRRWCAERSWQFYNDI

SEQ ID NO: 68683 - DNA, 732 bp, Unknown
  Obtained from environmental sample
  misc_feature (1)..(732): n is a, c, g, or t
atgcccgattacaccgacgaccttgacaatataatcaaaggttccggagcgtcccaatctacgggaatggttatggcggatgtcggaatgcttacaaaatttaattttttaaagggttatcattcaagggaaaagaattcagccgtcgcccttgttatccgtaaccttggaccgccggcgctgggcgaacctctgccaaccgtagctaatgcggcattttcatataaacccattcggccgctgatcattgattttgattttttacttccgattaatatggttgatttttccctttccgagtcgccttacggagcgttgggttttgccgtcaatattacaaactttttatctatgcgcacgggcgtaatggtaaaaccgggaagcagccgaattaccgtaggaagcgccgtaagcatgaataaaatcgcttttgacataaactatactttggacttacttacgcagttacagcctcttaacaggatcagtcttgcggtgcgttttgatttaggcgacggaggcagaaaacaaatatcggacaaagtagatgaattgtatcttttaggtcttgaagcgtactcaaaaggaaaaatggacgaggcaagagtatgctgggaagaggcgcttaaacttaatccgaaatatgatcccgcccgtgaaagtcttaatatgcttgaaaaacgcgatgaattaaaacaaaaaatagaaaaccttaataaattgaatttctag

SEQ ID NO: 68684 - protein, 243 aa, Unknown
  Obtained from environmental sample
  DOMAIN (182)...(215): Tetratricopeptide repeat
  misc_feature (1)..(243): Xaa is any amino acid
MPDYTDDLDNIIKGSGASQSTGMVMADVGMLTKFNFLKGYHSREKNSAVALVIRNLGPPALGEPLPTVANAAFSYKPIRPLIIDFDFLLPINMVDFSLSESPYGALGFAVNITNFLSMRTGVMVKPGSSRITVGSAVSMNKIAFDINYTLDLLTQLQPLNRISLAVRFDLGDGGRKQISDKVDELYLLGLEAYSKGKMDEARVCWEEALKLNPKYDPARESLNMLEKRDELKQKIENLNKLNF

SEQ ID NO: 68685 - DNA, 975 bp, Unknown
  Obtained from environmental sample
  misc_feature (1)..(975): n is a, c, g, or t
atggtacaaaaagtaacactccaaattgccggcaaggaccttgttcttgaaaccggcagaatcgcaagacaggcaaatggcgcggttttcgcgcagtacgcgggatcagccgtgattgcgactgtctgctcatcttcggaaccggtggaggggctggattacgttccccttacggttgattacaatgaaaaatactatgccgcgggaaagatccccgggggcttcatcaagcgggaaagccggcccaaggacaaggaaatcctcgtcagccgccttatcgaccgcccgatgcgcccgcttttcgagaaaactttcggcagggagatacagcttgtccccaccacgctctcgaccgatcaggtaaacccgccggatatgctggcgataatcgcctcgtccgccgcggtgcatatttcggacattccctttaacggccccattgccggcgtgcgtgtctgccaggtggacggcgagctggtggtcaatcctacctacgaacagattgaaaaatccacaatggaaattgtcgtcgccggcacaaaagacggtataaccatggttgaaggcggggcaaaagaggtcagcgaagacctgatgatacaggccctggataaggcccatagtatgatcatagagttatgcgcttttcaggaaaaactccgagaacttgccggcaagccgaaactcccgctggctgtccccactcatgtccttgataacagcgacgcgattcgcgcctcggcatacccgaaacttgaaaaagcctgtttccttgcgaccaagcaggaacgtcacgagggtattaaagcgatacaagcggaaatagcggcgcagtacgcggcccagcttgaggacgaaaaacagaaaaaactcttcaacgccctgttcgaggatatgcagtataacatcctccgttcttctatacttaacagcggccgccgcgtgacgggcggggaccgaggacatacgaaataa

SEQ ID NO: 68686 - protein, 324 aa, Unknown
  Obtained from environmental sample
  DOMAIN (241)...(319): Polyribonucleotide nucleotidyltransferase, RNA binding domain
  misc_feature (1)..(324): Xaa is any amino acid
MVQKVTLQIAGKDLVLETGRIARQANGAVFAQYAGSAVIATVCSSSEPVEGLDYVPLTVDYNEKYYAAGKIPGGFIKRESRPKDKEILVSRLIDRPMRPLFEKTFGREIQLVPTTLSTDQVNPPDMLAIIASSAAVHISDIPFNGPIAGVRVCQVDGELVVNPTYEQIEKSTMEIVVAGTKDGITMVEGGAKEVSEDLMIQALDKAHSMIIELCAFQEKLRELAGKPKLPLAVPTHVLDNSDAIRASAYPKLEKACFLATKQERHEGIKAIQAEIAAQYAAQLEDEKQKKLFNALFEDMQYNILRSSILNSGRRVTGGDRGHTK

SEQ ID NO: 68687 - DNA, 492 bp, Unknown
  Obtained from environmental sample
  misc_feature (1)..(492): n is a, c, g, or t
atgggccttatccagggcctgtatcatcaggtcttcgctgacctcttttgccccgccttcaaccatggttataccgtcttttgtgccggcgacgacaatttccattgtggatttttcaatctgttcgtaggtaggattgaccaccagctcgccgtccacctggcagacacgcacgccggcaatggggccgttaaagggaatgtccgaaatatgcaccgcggcggacgaggcgattatcgccagcatatccggcgggtttacctgatcggtcgagagcgtggtggggacaagctgtatctccctgccgaaagttttctcgaaaagcgggcgcatcgggcggtcgataaggcggctgacgaggatttccttgtccttgggccggctttcccgcttgatgaagcccccggggatctttcccgcggcatagtatttttcattgtaatcaaccgtaaggggaacgtaatccagcccctccaccggttccgaagatga

SEQ ID NO: 68688 - protein, 163 aa, Unknown
  Obtained from environmental sample
  misc_feature (1)..(163): Xaa is any amino acid
MGLIQGLYHQVFADLFCPAFNHGYTVFCAGDDNFHCGFFNLFVGRIDHQLAVHLADTHAGNGAVKGNVRNMHRGGRGDYRQHIRRVYLIGRERGGDKLYLPAESFLEKRAHRAVDKAADEDFLVLGPAFPLDEAPGDLSRGIVFFIVINRKGNVIQPLHRFRR

SEQ ID NO: 68689 - DNA, 396 bp, Unknown
  Obtained from environmental sample
  misc_feature (1)..(396): n is a, c, g, or t
atgtctatgcgcgtaattagctgggaagaatacattgggagtcgggagtcgggagtcgggagtcgagatcgccgtccggacaatgatattgctcccgatacgagtgttcctcattgctcattttccctagctattactgttggtgtgtttgacggcgtgcacctggggcatcagtctctgattcgccatatatgcgagccttccctctccccactccctactccccactccctactccccactgttattaccttccgtgaaaaccccatgaaaagccttaatccggctggatttaccggggatatttattctcttgagcaaaagttaggccttttggaagccctgggggtaaaactgacggtgctaattgacttttctgaagaattagtaaaatag

SEQ ID NO: 68690 - protein, 131 aa, Unknown
  Obtained from environmental sample
  DOMAIN (41)...(131): FAD synthetase
  misc_feature (1)..(131): Xaa is any amino acid
MSMRVISWEEYIGSRESGVGSRDRRPDNDIAPDTSVPHCSFSLAITVGVFDGVHLGHQSLIRHICEPSLSPLPTPHSLLPTVITFRENPMKSLNPAGFTGDIYSLEQKLGLLEALGVKLTVLIDFSEELVK

SEQ ID NO: 68691 - DNA, 621 bp, Unknown
  Obtained from environmental sample
  misc_feature (1)..(621): n is a, c, g, or t
ttgatatatttgcaggccttagtcaatatgtcgaatactacccgtttatcgcctttggcgcgtctgatgctggccgggctgaatatccccatttcggaagactttataatcattaccggagccttgatctgccaggaaaagccctcaatgttggttgccatgttggcggccacttatgccggcgttgtcataagcgactacttcccataccttatgggcatatacatccgcaaagggacaataaaggcgaagttcctcacccaattattttccccgagaaagatcgtcaggatacaccgttacctggataaatacggcatttttacttttattgtgggccgttttgtcccctttggggtaaggaataccctgttcattacttccgggcttatcggcctgaagccgcggcgcttcgccctgtatgatacaaccgccgcgacaataagcgtaagtaccttgtttttccttgcctaccattttggggacgccgttgaaaaaccgttccatgtcgtaggtattgtcctcttcatactggctctttcgatgatcactgttgttgttgttaatattgtcaggaaaatacgcaagaaaagggaacagggaacaggtaacagggactaa

SEQ ID NO: 68692 - protein, 206 aa, Unknown
  Obtained from environmental sample
  misc_feature (1)..(206): Xaa is any amino acid
MIYLQALVNMSNTTRLSPLARLMLAGLNIPISEDFIIITGALICQEKPSMLVAMLAATYAGVVISDYFPYLMGIYIRKGTIKAKFLTQLFSPRKIVRIHRYLDKYGIFTFIVGRFVPFGVRNTLFITSGLIGLKPRRFALYDTTAATISVSTLFFLAYHFGDAVEKPFHVVGIVLFILALSMITVVVVNIVRKIRKKREQGTGNRD

SEQ ID NO: 68693 - DNA, 774 bp, Unknown
  Obtained from environmental sample
  misc_feature (1)..(774): n is a, c, g, or t
ttgggaaggctctaccacaaaaagaaaaaaagcaaacgcggactgcttgtcaggctctgcgccatgctgccgccgagaagcaagcatttgaacagcatggtaaaacaggctgataaaatacgcgattgcgcacaggctttggacaacagcgcgctggaactttgctcagaggcgggagtattccgcctttcgccggacatgcatgaagctccgttaaaggaaaatctgttaccctgcttaaaagcgttacgcaaagatattctcgcccttacttcaatgatacgcgaaataacggaggaacttgacgatacgcaggctgccgatccgtctgtatgggaaataaaagcgatagtaaggcgcttggaggaaattgcggaaatctgcgattccttttgcaaatatcaaaaacttgagaacgaagttttatggatgggaaaacagttcttttcaggcgcaaacccgtggacaatctttacaaaaaccccgctggacttatcgccgaaactgaaagacagcgtatttgcgcctaacaaaacggttgtctgcgtatccgcgactctcgccataaacggaaatttttcctattgggcaagccgctgcggcatcctcggaatggaaaacaagccggtgctttcaggctgtttcccctcccccttcccctattcaagcgcggtactccttgccgttccggcagacgcccctctccccgacgaagaaggctggcaggactttatgataaagcgacaggccgcctgccgcctcggccaattctga

SEQ ID NO: 68694 - protein, 257 aa, Unknown
  Obtained from environmental sample
  SIGNAL (1)...(30)
  misc_feature (1)..(257): Xaa is any amino acid
MGRLYHKKKKSKRGLLVRLCAMLPPRSKHLNSMVKQADKIRDCAQALDNSALELCSEAGVFRLSPDMHEAPLKENLLPCLKALRKDILALTSMIREITEELDDTQAADPSVWEIKAIVRRLEEIAEICDSFCKYQKLENEVLWMGKQFFSGANPWTIFTKTPLDLSPKLKDSVFAPNKTVVCVSATLAINGNFSYWASRCGILGMENKPVLSGCFPSPFPYSSAVLLAVPADAPLPDEEGWQDFMIKRQAACRLGQF

SEQ ID NO: 68695 - DNA, 612 bp, Unknown
  Obtained from environmental sample
  misc_feature (1)..(612): n is a, c, g, or t
gtgaaaaaattagaagttgagagtatcataaacgctttgcgtgaaggcggagacgttgcttcccgcctggaatgttttgagccgaggcaggcgcagctagacctcatggaactggtcatcaagtgtttcaatgagaacgccataggcgcggcggaagcgggaaccggcgtgggaaagtctttcgcgtacctgctgccggccatgcattttgccgttgaaacaggcgagagggttgttgtttccaccgcgacaataacccttcagcagcagctttttagcaaggacatacccctggtaaaggacgcgattaaggccaaagtgaaggccgttttggtaaagggcagggggaactacctttgttacaggcggcttttggacagtctgcgcgagcctgagcttgcgggctcggacgaacaggagcagcttgaggatataagccgctgggccgaaacaagcaggggagggggcagggaagagcttgccttcgtgcctattgagtctgtctggtcaagggtctgttccgacgcggatctgtgcatgggaaaagcctgccccgagcagagccgttgttttgtgctcgccctcaaaaaggagcccccccggcatgaataa

SEQ ID NO: 68696 - protein, 203 aa, Unknown
  Obtained from environmental sample
  misc_feature (1)..(203): Xaa is any amino acid
MKKLEVESIINALREGGDVASRLECFEPRQAQLDLMELVIKCFNENAIGAAEAGTGVGKSFAYLLPAMHFAVETGERVVVSTATITLQQQLFSKDIPLVKDAIKAKVKAVLVKGRGNYLCYRRLLDSLREPELAGSDEQEQLEDISRWAETSRGGGREELAFVPIESVWSRVCSDADLCMGKACPEQSRCFVLALKKEPPRHE

SEQ ID NO: 68697 - DNA, 645 bp, Unknown
  Obtained from environmental sample
  misc_feature (1)..(645): n is a, c, g, or t
atgcgtgtagcagaaataaacagagaaaccaaagagacatcaattaaaattaaactcaacctggacggtaagggcgaggcaaaaataaattacccaatcggctttatggggcatatgcttaatacattcgcgcgacacgggctgtttgatctggatatttccgcaaagggcgatcttgaggttgaccagcaccatctggtggaggatacggggatcgttttagggcaatgttttaccaaagccttaggtgaaaagagagggatacggcgcaacgggagctgtctttttcccatggacgagacccttgcctgcgccgcggttgatatctcgggccgcagtttcttgttttttgaggggcagcttgggcccgcgccactattggctgccgatgaaacggacaagcctttccagttccagaccgataccattgaggatttttggcagggctttgtcggcgcggccggatgcaatctgcatttggaaatactccggggcagaagtgaccaccataaaatagaggccatgttcaaggcggctgcccgttccctgaggctggcttgcgaatttgacgagcgcgcgcgtgacgcgatcccctctacaaaaggctctctgccgggctttgacgcaccgggcgtgctggtatga

SEQ ID NO: 68698 - protein, 214 aa, Unknown
  Obtained from environmental sample
  DOMAIN (33)...(184): Imidazoleglycerol-phosphate dehydratase
  misc_feature (1)..(214): Xaa is any amino acid
MRVAEINRETKETSIKIKLNLDGKGEAKINYPIGFMGHMLNTFARHGLFDLDISAKGDLEVDQHHLVEDTGIVLGQCFTKALGEKRGIRRNGSCLFPMDETLACAAVDISGRSFLFFEGQLGPAPLLAADETDKPFQFQTDTIEDFWQGFVGAAGCNLHLEILRGRSDHHKIEAMFKAAARSLRLACEFDERARDAIPSTKGSLPGFDAPGVLV

SEQ ID NO: 68699 - DNA, 1824 bp, Unknown
  Obtained from environmental sample
  misc_feature (1)..(1824): n is a, c, g, or t
gtgttgactatgatcaaaactatgaataagcgtattaccgtcgccctctccgccctcgttaccgccgccgtattgttcactgcgggttgcgtgaccggcaacaagagccgtcaagccgcggaaaacatcgacgaggagttgctgcgcgttttgggtctcctgcccgatagcgccaaagccgccgccgactccgtcgaccgctaccatcttgctcaggatcactttataattgcccgcgactacgagcggcgcggtatgtatgacgcggcctttgagctttatgaaaccgcctacggtttttggccgtactctagctttttgcgtaaaatattggccgacgagtacatacagcgcaatgactacgataaggcgctggcgctcttttccgacgtcgggcttacctatttgacgccggacgagttgcggacgctcagccagatttaccagcgcatcggcaatgcggataaggcggcggagacaatagaggcgcttgggagcgagcgcagcgacgaggatatgtacacgcttgccatcctctacgagtcgatggggcggaaggacaagtctctcaaaagttttcgcgatttttttgcccatagtccgcgttcagccgggcttggcataaagatggtgcagttcagcgtaggggagaggcgcttagccgacgcggagagtttggcggtcattcttaggagcgtgtatccaagcgacgcggaagcggcggcgctcttggggacggtcaagtacttggggcgcgacaccgcaacagccataacgcttttcaatgaggcgcttaagttggattcgctgaacgaggaggcgctgcgtacgctggcgcatatccgcctagtgagggagcagtatacggaggctatcgccctctacgagcggctcacctctttagggccggtcgcccctatctataggcgcggcttggcttttctgctctttcacgctaaggagtacgcggcggccgagaaaatttttgacacgctgattcttgagggggacgacggtaaggacattgtaggaaaggcggaactgcacctctaccgcgggctcatctacgcccagacaaagaggatagacaaggcggcttcggagttcaggacggcgcttaccatagacccgcagtacgaggatgcgtggaaagagctttgctacatgcacataatagcgaaagacaaggagaaagcgaatcgcgcggtggaggagtacaccgccgctttcccgaactcggcgcccgggtggaggtttcgcgggtacttgctgaatatgcgggataagcacgaggaagcggtcgcagcgttgaaaaaggcgacggagatcgacccgtccgactacttctcgtggtttgagataggcagtatcttggagaagcagaagcgcatagacgaggcggcggtggcgttcaggcacgtgttgcgcatacatcccggcgacgctcaggcggcaaactacctcggctatatgtgggcggaggccggtgtgaggttagacagcgccaagaccctgatagagacggcgctcgaaaaggatcccaacaacggcgcgtacttagattcttacgcgtgggtcttttatcagatgggcgattacgaaaaggctttgcactacatgaacaaggcgttggagcaagatagcgtgcgcgacgatccggtgccctacgagcacatcggggatatctacttcaagttgaatgactacaaagccgcggagggcgcgtacaagcgcagcatcgaattgaagtcggaggatgccaagaggataagggagcgtttggtcgagataaaaaatctgatgcgcggtaaaaaggggcaataa

SEQ ID NO: 68700 - protein, 607 aa, Unknown
  Obtained from environmental sample
  SIGNAL (1)...(22)
  DOMAIN (448)...(481): Tetratricopeptide repeat
  misc_feature (1)..(607): Xaa is any amino acid
MLTMIKTMNKRITVALSALVTAAVLFTAGCVTGNKSRQAAENIDEELLRVLGLLPDSAKAAADSVDRYHLAQDHFIIARDYERRGMYDAAFELYETAYGFWPYSSFLRKILADEYIQRNDYDKALALFSDVGLTYLTPDELRTLSQIYQRIGNADKAAETIEALGSERSDEDMYTLAILYESMGRKDKSLKSFRDFFAHSPRSAGLGIKMVQFSVGERRLADAESLAVILRSVYPSDAEAAALLGTVKYLGRDTATAITLFNEALKLDSLNEEALRTLAHIRLVREQYTEAIALYERLTSLGPVAPIYRRGLAFLLFHAKEYAAAEKIFDTLILEGDDGKDIVGKAELHLYRGLIYAQTKRIDKAASEFRTALTIDPQYEDAWKELCYMHIIAKDKEKANRAVEEYTAAFPNSAPGWRFRGYLLNMRDKHEEAVAALKKATEIDPSDYFSWFEIGSILEKQKRIDEAAVAFRHVLRIHPGDAQAANYLGYMWAEAGVRLDSAKTLIETALEKDPNNGAYLDSYAWVFYQMGDYEKALHYMNKALEQDSVRDDPVPYEHIGDIYFKLNDYKAAEGAYKRSIELKSEDAKRIRERLVEIKNLMRGKKGQ

SEQ ID NO: 68701 - DNA, 720 bp, Unknown
  Obtained from environmental sample
  misc_feature (1)..(720): n is a, c, g, or t
ttgccgctttgcttcttcttgttcgcggtcggttcgctcgtaggtttttttatcgtggatcgcaaggttatgcccaagatcgtcggcgtccaccgcgacgtgctgcctacgccggacgttcaaggattggagtacgaggcggcgcggaacaagttttacggcgtggggcttttgaccgaggtgcgcgccagagagtttgacgacagcgttcccgagggcaacgtgttgagccagttccccgaccccggcgagccggtgaagaaggggcgcaagatcgcggtgacggtgagccgggggccggaggcggcgaaagtgccgatgctgcgggggataaacgaacgtcaggcgcgtcttgaccttcgcaagagcggtttcaacgtgggcgccaatgttcgcaaggatttcagcggagtcgtgcctgtagacgcggtaatagagaccttcccgcccggcggtacgatcacatcgcgggcgatggacgtggacttgatagtatcgcgcggtccaaggccgacccacgccgttatgccgaacgtcataggcgatatactctcggaagcaaaaaagaaagtggttgacgccggtctgaaagtaggcgcgataacctaccaaaacaacgcaacgctggtccccggaacggttatgtcgcagtcggcgtctccgggagcgaatataccgttggaaagttcggtcgatttggttatttcagccattaagtag

SEQ ID NO: 68702 - protein, 239 aa, Unknown
  Obtained from environmental sample
  DOMAIN (174)...(237): PASTA domain
  misc_feature (1)..(239): Xaa is any amino acid
MPLCFFLFAVGSLVGFFIVDRKVMPKIVGVHRDVLPTPDVQGLEYEAARNKFYGVGLLTEVRAREFDDSVPEGNVLSQFPDPGEPVKKGRKIAVTVSRGPEAAKVPMLRGINERQARLDLRKSGFNVGANVRKDFSGVVPVDAVIETFPPGGTITSRAMDVDLIVSRGPRPTHAVMPNVIGDILSEAKKKVVDAGLKVGAITYQNNATLVPGTVMSQSASPGANIPLESSVDLVISAIK

SEQ ID NO: 68703 - DNA, 1710 bp, Unknown
  Obtained from environmental sample
  misc_feature (1)..(1710): n is a, c, g, or t
gtgataaacagcagaagcgccgcaacaataagcggcagaacttccgtcggcggcattgccggagtgaataacggcaagattgaaaagagttacaacacgggaagcgttaccggaatccggcaagtcggcggtatagccggtgttaataccggaaacagtaattatataaagaactgctataacacgggcaatgttacctccaccgaagcgaccgtagcctccgaagccggaggcattgtcgggtctaaccaatcaagcgcaacggtagaatactgctacaataccggcaacgttactggcacaagttcggctgtcggcggcatagtgggaaacaacgccaacaattgcacagttcaattttgcgtatcgctcggcgcaagggtaaccggaactagcaatgtcggtcgtgtggcaggaactgttcccggactcggcaacaacagagcccgtgcggatatgaaaatcggcgcaagcggcgcagaggcgacagtatcgggaaacggaagcagctcaaacggcgcgtctaacagtattggtacggcacagacttccttttacctcagttgggattcctcgatttggaatatcagcggagatatgacaataggcgtcaatttggcaacgctcaaaacaaacacgcaaagcccggctcccacgcttccggcagagtaccttgtacccggcacggcggaaaatcccttcctcgttaccaacgaaaccgatctccgcaaagtcggcacagaaaccacagccggaggctggacgctttcggcgcactacaaacagacggcgagcatcaccatgatgggcggtaacttcctgaggattggctcaagcaccaccccattcaccggcacgtatgacggagacggaaaaaccatcaccggctttacaattaatggcactaatgcttatatggggctttttgctagtatcggcgcaacaggcacagtgaaaaacatgaacgtctcaggcacgataacccaaacaggcggagcgactgcgacgaataccggcggcatagctggcggtaatgacggcacaattgacaactgctcctttagcggaaccgtcaacggtggtacaaccagcgattatatcggcggtattacagggcagaataacggcacggtgaaaaacagcagaagcgccgcaacggtaagcggcagaacttctgtcggcggcattgccggagtgaataacggcacgattgaaaacagctacaacacgggaaacattaccggcacaaatcaagtcggcggtatcgccggagctaattccggcactggcagttttataaagataaggaacagctataacacgggcgatattactggaaccggagcctttgtcggaggcattgccggaactaaccaatcaagctcaacagtagaatactgctacaataccggcaacgttacctcttcaactaataccgcaggcggcatagccggaagcgtctccgccggaagcaccttgcaaaactgcgtatcgctcggcgggaaagtaaccagcaccaataatcctcttggccgtgtagtcggaggagctaacggcactctcgccaacaacagagcccgttcagacatgaaaaccggagcaagcggctcggaggttttacaaacaggaacagcaaccgacagaaacggcgcggatgtcacagtaggcagtgggacagcccgtgacctctgtttcagctcggccatctga

SEQ ID NO: 68704 - protein, 569 aa, Unknown
  Obtained from environmental sample
  DOMAIN (38)...(66): The GLUG motif
  misc_feature (1)..(569): Xaa is any amino acid
MINSRSAATISGRTSVGGIAGVNNGKIEKSYNTGSVTGIRQVGGIAGVNTGNSNYIKNCYNTGNVTSTEATVASEAGGIVGSNQSSATVEYCYNTGNVTGTSSAVGGIVGNNANNCTVQFCVSLGARVTGTSNVGRVAGTVPGLGNNRARADMKIGASGAEATVSGNGSSSNGASNSIGTAQTSFYLSWDSSIWNISGDMTIGVNLATLKTNTQSPAPTLPAEYLVPGTAENPFLVTNETDLRKVGTETTAGGWTLSAHYKQTASITMMGGNFLRIGSSTTPFTGTYDGDGKTITGFTINGTNAYMGLFASIGATGTVKNMNVSGTITQTGGATATNTGGIAGGNDGTIDNCSFSGTVNGGTTSDYIGGITGQNNGTVKNSRSAATVSGRTSVGGIAGVNNGTIENSYNTGNITGTNQVGGIAGANSGTGSFIKIRNSYNTGDITGTGAFVGGIAGTNQSSSTVEYCYNTGNVTSSTNTAGGIAGSVSAGSTLQNCVSLGGKVTSTNNPLGRVVGGANGTLANNRARSDMKTGASGSEVLQTGTATDRNGADVTVGSGTARDLCFSSAI

SEQ ID NO: 68705 - DNA, 1755 bp, Unknown
  Obtained from environmental sample
  misc_feature (1)..(1755): n is a, c, g, or t
atgtcgggaacaacaactctcaccaacaacaaagcccgcgcggatatgaaagtcggcgtaagcggatcggaggcaataccaactataaatataggagcaaatgaaagagaaggcgcagatgtcagtctgggtacggcacagaactctgttttcagcagtttctttacaaccacgatttggactttaggcagtaatttgatcgtaggcggcaatttgcccatactccagatgaacacgcaaagccccgctcccacgcttccggcaacgtacactgcgcccggcacggcggcaaatcccttcctcgttaccaacgaagccgaactccgcaaggtcggaacaggcactgacggctggacgctttcagcgcactacaaacagacggcgaacatcactatgactactaataactgggtagtattaggagctttcaaaggaacttacaacggcaacggatttaccgtaagcggatttaccttgaatcatcctacaactgattacaggggaatgtttgaaaacattgatctttcaggaatagtatcaaaccttggaatggtgaatgtaaatattaaaggtcaaaattatgtcggcggcatatcgggcggtaatgaaggcaagattgaaaactgctatgttacaggtattatttccggcaataatcaggtcggcggcattacgggaatgaatcgtggcgcgattgaaaacagttacaacacgggagccgtcagcggaaaccaatcggtcggcggtatcgcaggagttaatacaggaagcggtaaatatataaagaactgctataacacgggcaatattaccgccagcgcaacctcaaacacctatgccggaggcattgttggggctaatcaatcaaacgcactgatagaatactgctacaatatcggcaacgtttccggtccggctagtgtcggcggcatagcgggaaccaacgacactggatgcaccgttcaaaactgcgtatcactcggcgcaagaataaccggaacaggcacttccagtataggtatcagtcgtgtgtcaggaacttatggaagcggaagcactctcaccaacaacaaagcccgcgcggatatgaaagtcggtttaagcggcgcagaggcaacagcaacaggcgcgtcaaataacggaaacggcgcagatattactgtaggcagtactacgacacagacctctgttttcagcggctggacagcggtttggtctgtcagcggcaatttgacagcaggcggcgcattgcccacgctcacggcaaacacgcaaagccccgctcccacgcttccggcggcatactctccgctcggctcggcggataatcccttcctcgtctccaacgaaaccgaactccgcaaggtcggcactgaaaccgccgccggtggctggacgcttacggcgcactacaaacagacggcggacatcacgctgacaagcgcatttacggggattgtctatacttcctccaaatttaacggctcatatgacggaggcggatataccatcaccggattgaacataaccgccacgagcagtaatttaggtttattcggctatattggaagcggcacggtgaaaaacgtgaacgcttccggcacggtaaccggaaccggatcggtagcgggtatcggaggcattgcgggcgcaaacgaaggcacgattgaaaactgctcctttagcggaactgtaaccggcagtacaacaagccttcaagtcggcggtatgtcggaaggaataccggcacagtga

SEQ ID NO: 68706 - protein, 584 aa, Unknown
  Obtained from environmental sample
  DOMAIN (304)...(332): The GLUG motif
  misc_feature (1)..(584): Xaa is any amino acid
MSGTTTLTNNKARADMKVGVSGSEAIPTINIGANEREGADVSLGTAQNSVFSSFFTTTIWTLGSNLIVGGNLPILQMNTQSPAPTLPATYTAPGTAANPFLVTNEAELRKVGTGTDGWTLSAHYKQTANITMTTNNWVVLGAFKGTYNGNGFTVSGFTLNHPTTDYRGMFENIDLSGIVSNLGMVNVNIKGQNYVGGISGGNEGKIENCYVTGIISGNNQVGGITGMNRGAIENSYNTGAVSGNQSVGGIAGVNTGSGKYIKNCYNTGNITASATSNTYAGGIVGANQSNALIEYCYNIGNVSGPASVGGIAGTNDTGCTVQNCVSLGARITGTGTSSIGISRVSGTYGSGSTLTNNKARADMKVGLSGAEATATGASNNGNGADITVGSTTTQTSVFSGWTAVWSVSGNLTAGGALPTLTANTQSPAPTLPAAYSPLGSADNPFLVSNETELRKVGTETAAGGWTLTAHYKQTADITLTSAFTGIVYTSSKFNGSYDGGGYTITGLNITATSSNLGLFGYIGSGTVKNVNASGTVTGTGSVAGIGGIAGANEGTIENCSFSGTVTGSTTSLQVGGMSEGIPAQ

SEQ ID NO: 68707 - DNA, 2475 bp, Unknown
  Obtained from environmental sample
  misc_feature (1)..(2475): n is a, c, g, or t
gtgggaagcagttcaagcggaactactgtgcaaaactgcgtatcgctcggcgcaagggtaaccggcggctatagcacaggtcgtgtggttgcaagtattggcggcactttcgccaacaacaaagcccgttcagatatgaaagtcggtcaaagcggttcagaggcaataccaaccacaagcataacggcaaacggaggcaacggcgcaaatttcggtttggggacggcgctgtccgatgtattcaccggttgggatacctcactttggaatatcagcggcaatttgaatataggcgacaatcttcccacgctcaaaccgaatacgcaaatccccgctcccacgcttccggcggcgtactctgcgcccggcacagcggaaaatcccttcctcgttaccaacgaagccgatctccgcaaggtcggaaccggcactgacggctggacgctttcggcgcactacaggcagacggcgaacatcatgctgaccagcagttttacgaggattggcaataacacgaacaaattcacaggctcatatgacgggggcgaacataccataaccggcttgagcatgaccatctccagcacttatataggtttattcggctatatcggcgcaagcggcacagtgaaaaatatgaacgttaccggcacggtatcaagcgactcaaccaacagaacatgtatcggcggcattgcgggcggtaatgaaggcacgattgacaactgcgtctttaacggaactatcaacggaagcgcaacaaccaacgataatgtcggcggcattgtcggagagaatagcagtaccggcacggtgtcaaacagcataaacaacgcaacggtaaaaagcagagatcaggtcggcggcgttgtcggacagaataacggcacggtgataaacagcagtaacaacggatcggtaaccggcaataatcagaccggcggtattgcgggaacggctcagggcaaaatcgaaaactgttacaacacgggaaccgttaccggaaaccagcaagtcggcggtatcgccggtactaatgtcggcagcggtaattatataaagaactcctataacacggcaaatgttaccagcaacgcaagcgcctctaatgtcggcggcattgtcgggtttaaccaagcaaacacaacgttagaatactgctacaataccggcattgttaccggctccagtgcggtcggcggtattgtgggtaacgtcgccgccggaagtaccgtgcggtactgtgtatcactcggcgaaagggtaaccggcagcggaactaatatcggtcgcatagcagggatttacaatgccacgctcaccggcaacatggcccgtgaactgatgagaatcggcgcaagcggatcggaggcagtagtaacaggagcgacaactcaaggcaacggcttagacgtcagtttgggcgtgggacaacaaggctctgttttctccggttggaattattctaccatttggaatatcagcggtaatttggttgtgggcggcgatttgcccacgctcaaagataatccgcaaagccccgctcccactctgccgggatcgaacccggcgttaggcacggcggctaatcccttccttgttaccaacgaagccgatctccgcaaagtcggaaccggcactgacggctggacgctttcggcgcactacaaacagacacagaacatcaccatgacgacaagcaactttacgccgattggcaatgacgcaaacagattcaccggcacgtatgacggggacggaaaaaccattagcggattgaacataaccggcacgggaaataatttaggtttattcggcgttatccactcagcgggcacggtgaaaaatgtgagcgcaagcggcacggtaacccaaaacgcagacacatcgtttaccggcggcattgtcggacagaataacggcacgattgaaaactgctcctttagcggaaccgttaccggatcagcctgcgatatggtcggcggcattgtcggacagaataacggcacggtgataaacagcagaaacaacgcaacggtaagcggcagaagtcaggtcggcggcattaccggaagaaatcaaggcacaatcgacaacagttacaacacgggagccatcaacggaaaacggtacatcgccggtatcgccggagttaataccaacaccggtaagtatataaagaactcctataacacgggcaatattaccgcaaccgaagcgaccgaaagctccatggcaggaggcattgccgggcttaaccaatcaggcgcaacggtagaatactgctacaataccggcaacgttaccgcttcaactaacaacgtaggcggcatagtgggaagcaactccggaagcaccgtgcgatactgcgtatcactcggcgcaagggtaaccggcggaaacaatacctgccgtgtagtggagttatgtcgggaacaacaactctcaccaacaacaaagcccgcgcggatatga

SEQ ID NO: 68708 - protein, 824 aa, Unknown
  Obtained from environmental sample
  DOMAIN (742)...(769): The GLUG motif
  misc_feature (1)..(824): Xaa is any amino acid
MGSSSSGTTVQNCVSLGARVTGGYSTGRVVASIGGTFANNKARSDMKVGQSGSEAIPTTSITANGGNGANFGLGTALSDVFTGWDTSLWNISGNLNIGDNLPTLKPNTQIPAPTLPAAYSAPGTAENPFLVTNEADLRKVGTGTDGWTLSAHYRQTANIMLTSSFTRIGNNTNKFTGSYDGGEHTITGLSMTISSTYIGLFGYIGASGTVKNMNVTGTVSSDSTNRTCIGGIAGGNEGTIDNCVFNGTINGSATTNDNVGGIVGENSSTGTVSNSINNATVKSRDQVGGVVGQNNGTVINSSNNGSVTGNNQTGGIAGTAQGKIENCYNTGTVTGNQQVGGIAGTNVGSGNYIKNSYNTANVTSNASASNVGGIVGFNQANTTLEYCYNTGIVTGSSAVGGIVGNVAAGSTVRYCVSLGERVTGSGTNIGRIAGIYNATLTGNMARELMRIGASGSEAVVTGATTQGNGLDVSLGVGQQGSVFSGWNYSTIWNISGNLVVGGDLPTLKDNPQSPAPTLPGSNPALGTAANPFLVTNEADLRKVGTGTDGWTLSAHYKQTQNITMTTSNFTPIGNDANRFTGTYDGDGKTISGLNITGTGNNLGLFGVIHSAGTVKNVSASGTVTQNADTSFTGGIVGQNNGTIENCSFSGTVTGSACDMVGGIVGQNNGTVINSRNNATVSGRSQVGGITGRNQGTIDNSYNTGAINGKRYIAGIAGVNTNTGKYIKNSYNTGNITATEATESSMAGGIAGLNQSGATVEYCYNTGNVTASTNNVGGIVGSNSGSTVRYCVSLGARVTGGNNTCRVVELCREQQLSPTTKPARI

SEQ ID NO: 68709 - DNA, 363 bp, Unknown
  Obtained from environmental sample
  misc_feature (1)..(363): n is a, c, g, or t
ttgaaaacgcgggggtacgttatgatggagtataagggatacctgggtacggtagaatatgacactcaggcaaaaatctttcacggagatattatcaacaccagggatgttattacttttcaaggtacgacagccaatgaaatagagcgggctttcagagaatctattaacgattatatcagttggtgtaaggaagaaggggtagaacctgaaaagccatattccggaaaattcaatgtccggctgtccccggaacttcaccagcgaatagcaattctgtcaaaaaaaatgcacatgtcacttaatagttttgtggaaaaagccataactgatgaaattgctgtttgtaacaacgtactataa

SEQ ID NO: 68710 - protein, 120 aa, Unknown
  Obtained from environmental sample
  DOMAIN (59)...(109): HicB family
  misc_feature (1)..(120): Xaa is any amino acid
MKTRGYVMMEYKGYLGTVEYDTQAKIFHGDIINTRDVITFQGTTANEIERAFRESINDYISWCKEEGVEPEKPYSGKFNVRLSPELHQRIAILSKKMHMSLNSFVEKAITDEIAVCNNVL

SEQ ID NO: 68711 - DNA, 597 bp, Unknown
  Obtained from environmental sample
  misc_feature (1)..(597): n is a, c, g, or t
ttgagtgtgtttaccataaccccctgcgcggcgggctgcggacggcccgccataagcggttcccatatttgttttctccatcaggcggatcaggaacaggaaatcaaccgaatcgttacctacatcaccgagaacagtactataaaagatttaaacgttcccgggatgcggtttaccggcgttgatttttccatgcgccggttttacggctgtaattttcgggaagcaagttttttaaactgtatgttgtcagggtctttaatgcgcatgtgtttttttgattttgcgaaatttataaattgcgacttttccaagtccgatctgcaatttttatcatttgccggcgcgcgaatcggcagttgctgttttgaagagtcggaattgatccacttgaattttttgggcgccgccatttcaaaaagctctttcagcacatccaatttatacaacagccgctttatcaacaccgatctggaagaagtaaaatttattgactgcaatatcaagcgggtaaattatatcagcgcccgccagaaagacgtagtttttaagtcctcaaataccgctgaagcgatttttgaaatggaagaatcataa

SEQ ID NO: 68712 - protein, 198 aa, Unknown
  Obtained from environmental sample
  misc_feature (1)..(198): Xaa is any amino acid
MSVFTITPCAAGCGRPAISGSHICFLHQADQEQEINRIVTYITENSTIKDLNVPGMRFTGVDFSMRRFYGCNFREASFLNCMLSGSLMRMCFFDFAKFINCDFSKSDLQFLSFAGARIGSCCFEESELIHLNFLGAAISKSSFSTSNLYNSRFINTDLEEVKFIDCNIKRVNYISARQKDVVFKSSNTAEAIFEMEES

SEQ ID NO: 68713 - DNA, 642 bp, Unknown
  Obtained from environmental sample
  misc_feature (1)..(642): n is a, c, g, or t
ttgaaatggaagaatcataaaaaggatgttgccatgaagcttttttttcattattgttcattcggtttcagcaactgttatgtgttgggcagggaagacggcccggaatcaatacttgtcgatcccggcaacatggacaagcagattcttgaatatattgaaggcaataatttttatcctaaggcgatttttataacccatgatcatccgggccatgtgcatgggatcaggactctgaagcgcatataccagtccgagcttttcgcgataaaccgggttgtccaggatcacaagacgacgcccgtaaaagacggcgacaatgtggatattggccctttcaccgtcaaggtaatttccattccgggccattcggccgattcggccgtataccagattgacaggctgctgtttaccggggatgtccttacggcgggaatggtaggcacgaccgccagcgcgtacggggcgacaacccagttgaatcagctgcggagccgccttttttcgctgcccggagactatacggttcttcccggccacggccccccctcgacgcttgaagcggaacgccgctttaatgtgggcatctcccagtttgatactacacgagcacggcggccggtcattaggattaatttgtag

SEQ ID NO: 68714 - protein, 213 aa, Unknown
  Obtained from environmental sample
  DOMAIN (23)...(180): Metallo-beta-lactamase superfamily
  misc_feature (1)..(213): Xaa is any amino acid
MKWKNHKKDVAMKLFFHYCSFGFSNCYVLGREDGPESILVDPGNMDKQILEYIEGNNFYPKAIFITHDHPGHVHGIRTLKRIYQSELFAINRVVQDHKTTPVKDGDNVDIGPFTVKVISIPGHSADSAVYQIDRLLFTGDVLTAGMVGTTASAYGATTQLNQLRSRLFSLPGDYTVLPGHGPPSTLEAERRFNVGISQFDTTRARRPVIRINL

SEQ ID NO: 68715 - DNA, 405 bp, Unknown
  Obtained from environmental sample
  misc_feature (1)..(405): n is a, c, g, or t
atgggtattctcagtacagtgctcttggtgttttttgtgataatagcgatcttgcttatattactggttcttgttcagaatgaggaaggagacagccttggggggatcttcgccggcggcagcggatccgcttttggatcccgctcggggaacgtacttacacgggctacaacggtattaggagcgctgttcctcgttatcagcctggggctggctctgcttaacaggactcccggcggatcgggcgttgaagaggtcggacgggaactttccggcgagactgtgggcagcaactggctggaggatgaattaaacccgcagtcccagtcgataccggaagacatcctttacaatgatgtttgggaagatgaaactccgcaacaagataatgttgttacagaataa

SEQ ID NO: 68716 - protein, 134 aa, Unknown
  Obtained from environmental sample
  SIGNAL (1)...(27)
  DOMAIN (5)...(76): Preprotein translocase SecG subunit
  misc_feature (1)..(134): Xaa is any amino acid
MGILSTVLLVFFVIIAILLILLVLVQNEEGDSLGGIFAGGSGSAFGSRSGNVLTRATTVLGALFLVISLGLALLNRTPGGSGVEEVGRELSGETVGSNWLEDELNPQSQSIPEDILYNDVWEDETPQQDNVVTE

SEQ ID NO: 68717 - DNA, 393 bp, Unknown
  Obtained from environmental sample
  misc_feature (1)..(393): n is a, c, g, or t
atggtagagcacttctgccaggcaactaactcgcacgccagggaagagattctggcgtccctcaaggtacgcgagaccaaaatgtcaaccggcatacaaaaaggcattgccataccccacgggactaccaacgccgtggatacggtacgcggcgtactgggtatttcccaggacggaattgattatgacgctctggacggagaaccggtgtaccttttgtttatgcttatagcgcccgataaagactctgaaaaacacctgcggattctccagcgtctggcggaacttttgggcaacccccaattttctcaggatttgcagacgcaaaaagatcagcagagcgcgtataaaattatctgcaaatacgaagatatgttaattgctgtggattaa

SEQ ID NO: 68718 - protein, 130 aa, Unknown
  Obtained from environmental sample
  DOMAIN (3)...(122): Phosphoenolpyruvate-dependent sugar phosphotransferase system, EIIA 2
  misc_feature (1)..(130): Xaa is any amino acid
MVEHFCQATNSHAREEILASLKVRETKMSTGIQKGIAIPHGTTNAVDTVRGVLGISQDGIDYDALDGEPVYLLFMLIAPDKDSEKHLRILQRLAELLGNPQFSQDLQTQKDQQSAYKIICKYEDMLIAVD

SEQ ID NO: 68719 - DNA, 720 bp, Unknown
  Obtained from environmental sample
  misc_feature (1)..(720): n is a, c, g, or t
atgccggcatttccgaaaagaaaaaacaatgattccggggaacgggcttacgcgtacgccaaagcctgcgggatcattggcaaatcttttgtgggaaagcggatgtccgcgttgggaaaattgaacgcgcttaccgaattcggacggctggtttttcctgaagcgtcgaatgaactgcccggaagggaactcctggtcgatcttgaaaggcggcttttacagcgaacaatacggcacatcctcgccgttatcaattcatattcaaacccgccggaactgctggtacgccagcttcgctcctgtgaatacgccgaccttaagacctgcctgcatcacattaccgccgacaaaccaattcccaatgcgttatgcgacattggaaaatacggaactgtgcgttttaacgcgtatcccgatctgaaggcgatggtaagcggcaccgaatttgagtttatcctttcaaaagaccttaaagccgccgatttcgatctaacctcgctggaagcggagcttgatttacagtattacaccctgcttatgaaaagcctccaatgccttcccgtcgaagatcgccttctcgcgcagcgaatacttgccgaggaaatctccctgcgtaactgtgtatgggcattgcggctgcgaacctattttgaanaaacaacggaggaaacgcggaagtatcttatgaatctggaaattccccagagtccgtctccctga

SEQ ID NO: 68720 - protein, 239 aa, Unknown
  Obtained from environmental sample
  misc_feature (1)..(239): Xaa is any amino acid
MPAFPKRKNNDSGERAYAYAKACGIIGKSFVGKRMSALGKLNALTEFGRLVFPEASNELPGRELLVDLERRLLQRTIRHILAVINSYSNPPELLVRQLRSCEYADLKTCLHHITADKPIPNALCDIGKYGTVRFNAYPDLKAMVSGTEFEFILSKDLKAADFDLTSLEAELDLQYYTLLMKSLQCLPVEDRLLAQRILAEEISLRNCVWALRLRTYFEXTTEETRKYLMNLEIPQSPSP

SEQ ID NO: 68721 - DNA, 663 bp, Unknown
  Obtained from environmental sample
  misc_feature (1)..(663): n is a, c, g, or t
gtgcctgttgatacggggagcggttatgtgttttttacgagaagcaacgatgggctgaatgttcatactgaatatgttactgtgaagcagggcgagcggaggaaatatattgttgcagatactactattgtggttgaggtaggctacggcgagaacaagaaaacgctgggggcaataaaaaccgcgaatccaaatccaagcagttcatcggctgtgccgagttctagctctgcggttgttgcattgccctcgtctagctcaaagctgagcagcggttccaatacattactaagcagttcgtctgttgcgccaagctcaaactctgcgataccttcctcgtcttctataatccaaagttcttctagcaatggctaccccagcagtaattctagcgtgcatgaaaatgtagtagaggtaggaggaatgtgcaagaaaaatggagaatccttgttttgccagtatgatacgggctgttttgaactaaataatgtgtattttaatggtgtagaatgtgaagtaggtaaatgtacttgtattcaagtacttgattattgcatcaagtatgggggattatacacaggggttattgcgctagaccctaataattatggggtaggtgaaaattgtgctaatcagggcggtaaatttattgctggcaaatag

SEQ ID NO: 68722 - protein, 220 aa, Unknown
  Obtained from environmental sample
  misc_feature (1)..(220): Xaa is any amino acid
MPVDTGSGYVFFTRSNDGLNVHTEYVTVKQGERRKYIVADTTIVVEVGYGENKKTLGAIKTANPNPSSSSAVPSSSSAVVALPSSSSKLSSGSNTLLSSSSVAPSSNSAIPSSSSIIQSSSSNGYPSSNSSVHENVVEVGGMCKKNGESLFCQYDTGCFELNNVYFNGVECEVGKCTCIQVLDYCIKYGGLYTGVIALDPNNYGVGENCANQGGKFIAGK

SEQ ID NO: 68723 - DNA, 774 bp, Unknown
  Obtained from environmental sample
  misc_feature (1)..(774): n is a, c, g, or t
ttgtctatactaccacggagcacttatgccccattcacgcttgatttcacattcaaaaaagcatttgccaacgagcaaagcaaagacctgcttctgttcatgctcaacactttccttgaaagagtcctcaaaaaacctatcacagatgtgaaaattatacatacggttcaacttggcaaaactaggaaaaacaggggagctgtgtttgatatgcagtgcgaagatgcttctggtacaaggttcattgtggagatgcaggtaaatgagcatgagcatttcatcaagagaagtatcttttatctgtgtatggcagtagcgaatcttgcaaaaaaaggcaagatggagagcaaagggaagaaaatcccttatgactacaatattccagtagtctatacgctcagttttcttgattttgatgctgattttgggaaaaactgcgatgaggttattcaatatctctctctttccaacgagcttcaccctgaagttcgctataactttatgcacctgatttatgtccgtcttaccaaatttgctaaaaccgaggaggaatgtaaaagtgacctagacaaattgcttttcatattcaagaatgctcacaatctttctaagagacctaaaaatttcaataaaatggagttcaaacgtctttttgaggtggcaagaatttctaattttaccggtaaggatcttatgaattacgaaagtgatatgaagtattttagcgaccacatgaatgccttggcttatgctgatgaagaaaggcgaagctag

SEQ ID NO: 68724 - protein, 257 aa, Unknown
  Obtained from environmental sample
  misc_feature (1)..(257): Xaa is any amino acid
MSILPRSTYAPFTLDFTFKKAFANEQSKDLLLFMLNTFLERVLKKPITDVKIIHTVQLGKTRKNRGAVFDMQCEDASGTRFIVEMQVNEHEHFIKRSIFYLCMAVANLAKKGKMESKGKKIPYDYNIPVVYTLSFLDFDADFGKNCDEVIQYLSLSNELHPEVRYNFMHLIYVRLTKFAKTEEECKSDLDKLLFIFKNAHNLSKRPKNFNKMEFKRLFEVARISNFTGKDLMNYESDMKYFSDHMNALAYADEERRS

SEQ ID NO: 68725 - DNA, 633 bp, Unknown
  Obtained from environmental sample
  misc_feature (1)..(633): n is a, c, g, or t
atgtacagaccgtatcaattttatcaatattccgaggaactgccgccgttgacggaacgtaccccgcaggagatagaaagatttaaaagctggacaactcaaagaggacaaaatacgcttaaacgttccggtttttttattgatgaacttatgtctgcggttactcgcgcggaaacggaacgccagcttgtaagtataagatttctcggaaagaccacaagggttcataaggtgattaagcaaaaacttttgactattgacgcagctattagatttgcttcagcgacagacagttcggttcaaacatggataaacacccttggctcgctggaagggtacggctggcgaaatatagcaaatactcaatcgcgatcgtatcactcttacgggcttgcgattgatttacttccaaaatcactgggcggcaaacaaacatattggctatggacttcccagaacagagacgactggtggaatgttccgtatagcgagcgataccatccgccggaaacggtaataaaaatatttgaatcctatggttttgtctggggcggcaagtggttgatgtttgatacaatgcattttgaataccgccctgaggtattttatcttaacggaatgccgccgaaataa

SEQ ID NO: 68726 - protein, 210 aa, Unknown
  Obtained from environmental sample
  misc_feature (1)..(210): Xaa is any amino acid
MYRPYQFYQYSEELPPLTERTPQEIERFKSWTTQRGQNTLKRSGFFIDELMSAVTRAETERQLVSIRFLGKTTRVHKVIKQKLLTIDAAIRFASATDSSVQTWINTLGSLEGYGWRNIANTQSRSYHSYGLAIDLLPKSLGGKQTYWLWTSQNRDDWWNVPYSERYHPPETVIKIFESYGFVWGGKWLMFDTMHFEYRPEVFYLNGMPPK

SEQ ID NO: 68727 - DNA, 723 bp, Unknown
  Obtained from environmental sample
  misc_feature (1)..(723): n is a, c, g, or t
ttgggctgttctgatgaagggcgtttggtattattactccagaagggagattgctgcctgaaaagagaattgaaaaatacggcaaaatacagaccgtatcaattttataaataccctgcggaattgccgccgcagactgaggcttctcctgaagaagtagaaatgtatcttagctggacaaacccaacaggcgcaaatatacttacccgttccggtttttttcttggcgtgctttggaaagcgtctacaatcaaggaaaccgaaaaacaaattgtagatataacttttcttgggaaagagacgagcgttcacaaaggaattcagccgaaacttgcgattatcgaagaacagattcaggaagccgcaaaaaccgatgatacgattaaagcatggatagaaaatcttggtttttcgggagggtattcttatcgggtcatcgcaaacactaaatcacgatcatatcactcttacgggcttgccattgatctgtttcctgaaaaattagacgacaaacaaacatattggctgtgggcttccaaggaaagagacgactggtggaatgttccgtatagcgagcgataccatccgcctgaaaaagtaatagaaatatttgagtcctatggttttgtctggggcggaaaatgggtgatgtttgataccatgcattttgaataccgccccgaagtatttattttgaatagactgccattagagggaaaataa

SEQ ID NO: 68728 - protein, 240 aa, Unknown
  Obtained from environmental sample
  misc_feature (1)..(240): Xaa is any amino acid
MGCSDEGRLVLLLQKGDCCLKRELKNTAKYRPYQFYKYPAELPPQTEASPEEVEMYLSWTNPTGANILTRSGFFLGVLWKASTIKETEKQIVDITFLGKETSVHKGIQPKLAIIEEQIQEAAKTDDTIKAWIENLGFSGGYSYRVIANTKSRSYHSYGLAIDLFPEKLDDKQTYWLWASKERDDWWNVPYSERYHPPEKVIEIFESYGFVWGGKWVMFDTMHFEYRPEVFILNRLPLEGK

SEQ ID NO: 68729 - DNA, 1638 bp, Unknown
  Obtained from environmental sample
  misc_feature (1)..(1638): n is a, c, g, or t
atggcacagaccaagtttatccgtaacttttgcattatcgctcatatcgatcacggcaaatccacgcttgccgaccgtcttattcaaaaagccaatcttgtggacgaccgcaattttcaggatcagatactcgacaatatggatattgaacgggaaaggggcatcacgatcaaaagccaggccgttaccctgccctacacggcgaaggacggtaacgagtacatactcaatctggtagacacgcctggacacgttgattttagttacgaagtcagccgagctattaattcctgcgaaggtgccctgctccttgtggacgcgactcagggcgtgcaggcgcaaactttgtccaatatgtacctcgcgcttgaacacaatcttgagatagtgcctgtaattaacaagatcgatatgcaggcggctgacattccaagagttaaaaagcaaattgataaagacttaggccttgactcggatacggccgttctggtttccgcaaggcagggtatcggtgtagacgaactcttggaggcgatagtgcaaagaataccgtctccctcaggcaaaacggattccccgttacgcgcccttatttttgactgccactacgacccctaccgtggcgtaatagtacacttgcgcctatttgacggaaaaataaaaaaaggaatgaaaatttcttttatgtccaacggctcagtttacgaagtggaaaccgcgggcgtttttaaacttgcccttgtcgagacaggcgagctttccgcgggggatgtcggctacataatcgcaagcataaaaaccgtaagcgacgtgcgcgttggcgataccgtaacaggcgcggacaatccctgcgcacaggcccttcccggctttcgcgaagtaaaacccgtcgtcttttcttccatctaccccgttgattccaatgactacgaagaactgcgtaccagcatggaaaagctaaaactaaacgacgcttcccttgtctatgaaaaagactcttccgccgccttagggtttggttttcgctgcggctttttagggcttttgcaccttgaagttatccaagaacgacttgagcgcgaatttgaccaatcggtaattttcacagccccatccgtcaaatacaaggtgcatcttcgtggcggtgaggaaattatgattgacaacccaatagagtaccccgatgaaggcagggttgacggcgcacaagagccatatatccgcgcttccgtaattactccaaccgattatcttgggaacataatgaccctttgccttgaaaagcggggcgttcaaaccaacatgacttaccttgacgaaaagcgtgtggagctaatctacgatatgccactctccgaagtgttattcgatttttacgaccgcctaaaaagcatttcaagaggttacgcgtcatttgattacgatatttcaggctacaaaccgacggaacttgcaaaacttgacattctccttaacggcaaggcggttgacgccctttcccagcttgttttcaagggcaacgcatacgaccgcgcgagaaaagtttgcgaaaggctaagcgatgaaatcccgcgccagcagttaaaatcnccatccagggcgcgatgggcagtcacattatcgctcgggaaacagtga

SEQ ID NO: 68730 - protein, 545 aa, Unknown
  Obtained from environmental sample
  DOMAIN (491)...(543): GTP-binding protein LepA C-terminus
  misc_feature (1)..(545): Xaa is any amino acid
MAQTKFIRNFCIIAHIDHGKSTLADRLIQKANLVDDRNFQDQILDNMDIERERGITIKSQAVTLPYTAKDGNEYILNLVDTPGHVDFSYEVSRAINSCEGALLLVDATQGVQAQTLSNMYLALEHNLEIVPVINKIDMQAADIPRVKKQIDKDLGLDSDTAVLVSARQGIGVDELLEAIVQRIPSPSGKTDSPLRALIFDCHYDPYRGVIVHLRLFDGKIKKGMKISFMSNGSVYEVETAGVFKLALVETGELSAGDVGYIIASIKTVSDVRVGDTVTGADNPCAQALPGFREVKPVVFSSIYPVDSNDYEELRTSMEKLKLNDASLVYEKDSSAALGFGFRCGFLGLLHLEVIQERLEREFDQSVIFTAPSVKYKVHLRGGEEIMIDNPIEYPDEGRVDGAQEPYIRASVITPTDYLGNIMTLCLEKRGVQTNMTYLDEKRVELIYDMPLSEVLFDFYDRLKSISRGYASFDYDISGYKPTELAKLDILLNGKAVDALSQLVFKGNAYDRARKVCERLSDEIPRQQLKSPSRARWAVTLSLGKQ

SEQ ID NO: 68731 - DNA, 378 bp, Unknown
  Obtained from environmental sample
  misc_feature (1)..(378): n is a, c, g, or t
ttgataaaagggataggggtcgatgctgtttatgttcaccgcatgaaaaagtggctggaaaccccggggcttttggagcgttattttcaaaacgaggaactctcggctgttttggaaaaagggaacagggcagatatgtctttagccgcaagatttgccgccaaggaagcttttggaaaggcgttgggtaccggtcttaggggcattgtgcttaaagacataatggttagtaacaaacataacggtcagcctgaaatattggtttccggtactgctctcctggctctgaaaaattccggcgccgggaagattcacgtttcgcttacccatgagaaggattacgcaatagccatggtggtgcttgaaaatgaattataa

SEQ ID NO: 68732 - protein, 125 aa, Unknown
  Obtained from environmental sample
  DOMAIN (5)...(71): 4'-phosphopantetheinyl transferase superfamily
  misc_feature (1)..(125): Xaa is any amino acid
MIKGIGVDAVYVHRMKKWLETPGLLERYFQNEELSAVLEKGNRADMSLAARFAAKEAFGKALGTGLRGIVLKDIMVSNKHNGQPEILVSGTALLALKNSGAGKIHVSLTHEKDYAIAMVVLENEL

SEQ ID NO: 68733 - DNA, 813 bp, Unknown
  Obtained from environmental sample
  misc_feature (1)..(813): n is a, c, g, or t
atgagctcacctgtcctgtttgcgaaaggtctttaccgcgaagaactgctttcaggcggcggcagacttattgcgggaaaacttacggacgaactgcacaggctctatgagccgtccgcaaaatacggagagatatttccgcttgtgtatcagtctatagtctgcccggaatgctggttttcatcaatggagagcgattttccgcttatcccgaaagaaaatatacaaaaagcgagaaatgacatgacgcagcggataaacgaaacccgccttgtttttccttttattgattataatgaaaaccgcactttaatggaaggagccgcgtcccagtatcttacattacgctgttatgattattacaacaaacaaacatctcccacaattaaacaggggcttgcctcaatacgctgcgcgtggctgttagacgaaatgaacaaaaaatttcccggacagcattatgactggcttgcccttcttttcagaaaaaaagccatgtatctttacaatgaagcgcttgcccgcgagcagaccgggaaagaaaccctttccggcatgaaagccttcggccccgataccgacaaaaattacgcgtacgagggaatgttatacatgtgcgcctatctccgctacaatttcggctccgcacgtgacgaaacggagcggaaagcgtcgcttgaagacgcccgcaggaccatagccaaacttttcggtatgggcaaagcgtccaaggacaagcccggcgcgttccttgaacacgcaagaaaactctatgacaccatcaatcaaaaacttacggaaaatggcggctga

SEQ ID NO: 68734 - protein, 270 aa, Unknown
  Obtained from environmental sample
  misc_feature (1)..(270): Xaa is any amino acid
MSSPVLFAKGLYREELLSGGGRLIAGKLTDELHRLYEPSAKYGEIFPLVYQSIVCPECWFSSMESDFPLIPKENIQKARNDMTQRINETRLVFPFIDYNENRTLMEGAASQYLTLRCYDYYNKQTSPTIKQGLASIRCAWLLDEMNKKFPGQHYDWLALLFRKKAMYLYNEALAREQTGKETLSGMKAFGPDTDKNYAYEGMLYMCAYLRYNFGSARDETERKASLEDARRTIAKLFGMGKASKDKPGAFLEHARKLYDTINQKLTENGG

SEQ ID NO: 68735 - DNA, 819 bp, Unknown
  Obtained from environmental sample
  misc_feature (1)..(819): n is a, c, g, or t
ttgaacacgcaagaaaactctatgacaccatcaatcaaaaacttacggaaaatggcggctgacggcagaaacatcaaactaataatagcttatgacggcacggacttttcaggctggcaaaagcaggacgcgcaaagaaccgtacagggcgaaatagaaaaagctcttgaaaaaatacacggtcatgccgtacctcttacgggctccggcagaacggacgcgggcgttcacgcggccggacaagccgcgaatttttacacaagcataaacagcattcccgcccaaaaatttgttcccgcgcttaatacaattcttccaaaggatgtccgtattcttgaagccggtgaaacagaccctgaatttcacgcccgcttcagcgcggtatcgcgcacttaccgctatcactttatctgccgcccttgtcttccccacgaaaaccgctacaatcttcagctttggcgcttccccatgatagaaacccttaacacctacggcaggctgcttcttggggaaacggactgctccatctttgcgggcagcggggacagcgcgcttgaagaaggtaaatcaacaaacaggtatatatattccgcctgcttttttcctgaagcggaacgccttgttttggaaatacgcgccaatgcctttatgcggaaaatggtgcgctcaatagcaggtactttcctgcactacgaagaaaaagacacgccgcctgaaaagcttagagatattatctcttcgggagaacgttctcttgccggccccactctgccgcctcagggcctcttcctgtggaaagtggaattttcggtctcttaa

SEQ ID NO: 68736 - protein, 272 aa, Unknown
  Obtained from environmental sample
  DOMAIN (164)...(270): tRNA pseudouridine synthase
  misc_feature (1)..(272): Xaa is any amino acid
MNTQENSMTPSIKNLRKMAADGRNIKLIIAYDGTDFSGWQKQDAQRTVQGEIEKALEKIHGHAVPLTGSGRTDAGVHAAGQAANFYTSINSIPAQKFVPALNTILPKDVRILEAGETDPEFHARFSAVSRTYRYHFICRPCLPHENRYNLQLWRFPMIETLNTYGRLLLGETDCSIFAGSGDSALEEGKSTNRYIYSACFFPEAERLVLEIRANAFMRKMVRSIAGTFLHYEEKDTPPEKLRDIISSGERSLAGPTLPPQGLFLWKVEFSVS

SEQ ID NO: 68737 - DNA, 498 bp, Unknown
  Obtained from environmental sample
  misc_feature (1)..(498): n is a, c, g, or t
ttgaaaggcagtgatgttgtcatcaaggatataagcaagttctttggtgattttagggctcttaataatgtgagtctggaaataaaaaaaggagaatttttctccttgctgggaccctccgggtgcggtaaaaccacccttttacggataattgccggttttgaaaatcccgacaagggggaacttaccctggacgggaacgacgtgctttcagcgcctcctaaccggcgtcatacaaatacggtatttcaaaattattcgctttttccccatcttacggtttttgaaaacgtcgctttttcgcttaggcttaaaagggcgtcttccgccgaagttaaaaacaaggtcaacgagtaccttcaccttgtacagcttgtggatcacgcgcacaaaaaaccaaaccagctttccggcggacagaaacagcgggtagccatcgcgcgcgcgctgattaacgaaccgcgcgttcttcttctggacgaacctctttcagcgtag

SEQ ID NO: 68738 - protein, 165 aa, Unknown
  Obtained from environmental sample
  DOMAIN (31)...(165): ABC transporter
  misc_feature (1)..(165): Xaa is any amino acid
MKGSDVVIKDISKFFGDFRALNNVSLEIKKGEFFSLLGPSGCGKTTLLRIIAGFENPDKGELTLDGNDVLSAPPNRRHTNTVFQNYSLFPHLTVFENVAFSLRLKRASSAEVKNKVNEYLHLVQLVDHAHKKPNQLSGGQKQRVAIARALINEPRVLLLDEPLSA

SEQ ID NO: 68739 - DNA, 609 bp, Unknown
  Obtained from environmental sample
  misc_feature (1)..(609): n is a, c, g, or t
atgttaatagagcttgacaccattcatgataaaatcggcataacgtttatttatgttacccacgaccagcaggaagcgctttccgtttcggacaggcttgccgttatgaatcagggggacattttacagataggcacgccccaggaaatttacgaaagcccggcttctgattttgtcgcgcgctttataggcgagacaaatttatttgacgcctccgttattagcgtggaaaagcttaacaaagagtgggatgaatatatggtggagcttgatattccggaactgggacgcattaaagttaccaccgtagacaccgtaaaagcggggcaaaaagtaagttttacaatacgcccggaaaaaatagtaataaatacggacaagcctacgacaaaacgtgaagacattaacctttttaacggaatcgtcgacgagcctatatattcaggctttcaaacgaaattctacgttaaaactactcaggataaaacgcttaaggttatcaaacagcacgcgaattattccgatgacggtcctgccatacgctggaaggataccgtttacctttcatggagcgccgacgacggctatattgtcgaggtaaaaagttga

SEQ ID NO: 68740 - protein, 202 aa, Unknown
  Obtained from environmental sample
  DOMAIN (63)...(123): TOBE domain
  misc_feature (1)..(202): Xaa is any amino acid
MLIELDTIHDKIGITFIYVTHDQQEALSVSDRLAVMNQGDILQIGTPQEIYESPASDFVARFIGETNLFDASVISVEKLNKEWDEYMVELDIPELGRIKVTTVDTVKAGQKVSFTIRPEKIVINTDKPTTKREDINLFNGIVDEPIYSGFQTKFYVKTTQDKTLKVIKQHANYSDDGPAIRWKDTVYLSWSADDGYIVEVKS

SEQ ID NO: 68741 - DNA, 465 bp, Unknown
  Obtained from environmental sample
  misc_feature (1)..(465): n is a, c, g, or t
atggagcgccgacgacggctatattgtcgaggtaaaaagttgaagccgcaatctaacgaacgcagtagcgttctcgaacgcagtagtgttcggcataactacggccctctttattcttccccaatggcaatatggttcagtctctttttccttgctcctattgtaattattattatttacagttttctgaaaaaaggcttgtacggcggcgttgaatgggaactgtcgccggacgcttaccgctaccttggggacaaagtgcttctcaatataacgttgcgaacaattacaacttccgtaatcgccacgattattacaatattaatcgccctgccgtgcggttactgcatagcaagaagcaagcatcaaacggtttttcttgtgcttatcataattccgttctggacgaattttcttatcagagtcttcgcgtggatgaatattttgggcagtaacggtttttaa

SEQ ID NO: 68742 - protein, 154 aa, Unknown
  Obtained from environmental sample
  misc_feature (1)..(154): Xaa is any amino acid
MERRRRLYCRGKKLKPQSNERSSVLERSSVRHNYGPLYSSPMAIWFSLFFLAPIVIIIIYSFLKKGLYGGVEWELSPDAYRYLGDKVLLNITLRTITTSVIATIITILIALPCGYCIARSKHQTVFLVLIIIPFWTNFLIRVFAWMNILGSNGF

SEQ ID NO: 68743 - DNA, 444 bp, Unknown
  Obtained from environmental sample
  misc_feature (1)..(444): n is a, c, g, or t
gtggtaatcttaggaatagatacatcgtcaaccgacttgtccgtaagcctatgtatagacggcgttccgttgtcgtccgttgacaggtacgtgaagaacgcgcacgctgagcatatagcgcaaacggttaccaccgtccttaatttgggcggcgtggatgtgggcgatgttacgcacatagcggtatcggtaggtccggggtcgtttaccggattacggatagggttatcatttgtcaagggattttgtgtggctgtggagcgtaccattctaccgctgtcgtcgctattggtgctcgcccacgccgcggtcgtttgcggcggcggtcggtcccagcgggtattcacggccttagacgcgcgtcagggacgggttcattggggcagttttgcctataacagcggcgacagcggcggtggatacagaagaatattcgcaggctaa

SEQ ID NO: 68744 - protein, 147 aa, Unknown
  Obtained from environmental sample
  DOMAIN (21)...(145): Glycoprotease family
  misc_feature (1)..(147): Xaa is any amino acid
MVILGIDTSSTDLSVSLCIDGVPLSSVDRYVKNAHAEHIAQTVTTVLNLGGVDVGDVTHIAVSVGPGSFTGLRIGLSFVKGFCVAVERTILPLSSLLVLAHAAVVCGGGRSQRVFTALDARQGRVHWGSFAYNSGDSGGGYRRIFAG

SEQ ID NO: 68745 - DNA, 1068 bp, Unknown
  Obtained from environmental sample
  misc_feature (1)..(1068): n is a, c, g, or t
atgtccgcgagcgccaaaaacggcggcaagcctaatgtcaacgtcgtgatgggcggaccgtccgccgagtacgagatctctctgaactccggcgggcaggttctggcctatctcgacagaagcaaatataaccgtctgcgggcggtggttatcaacaaagagaagcagatttactacgccgatgcggacggcgccggcaacgtaccggacatcaagagtttcgaagcgtcgggaggtccgttcaaggggccgctccacccgtcagactgcaaagaggtctgggacggttgcgacgtcgctttcctcgctttgcacggggagttcggcgaggacgggacggttcagggatatttgggcgctttgggcgtcccatataccggctgcggggtctacgccagcgcggtggctatgaacaaaatcacctcgaagttcttatacatgcttggggggctgtcggtgccggattactccgtctacggcgtcaaccatccggagactaccgtcgacggtataattaagaagcacggtttcccctgtttcctcaaatgcccgcagtccggttcaagccgcctcatggggcgtgcggcggatagggagtcgctggtcgctttgctcaaagagctgcaggagagcgccgacgatattttggtggagactatggtcaagggcatagagttttcctgcggcgtgatagacatgccggacggatcgacgtacgcgctgccgcccatagagatccgcccgatgggatcggagtttttcgattacaaggcaaagtacacgcacggatgttcggaggagttggtcccggcgccgcgtgaacccgaactgctggctcagatcgaggagaccgcgctaagggcgcacaagcttctgcggtgctacggggtttcaaggacggacatgatatactgcgattcaaagatgcacgttttagagaccaatactctgccggggatgacgtccgcgtcgcttttgccgcaggcttacaaggcttggcgcggcgggacatacgcggaacttttagacgtattgctgacatcaggcctaaaacgaggaagccgttga

SEQ ID NO: 68746 - protein, 355 aa, Unknown
  Obtained from environmental sample
  DOMAIN (11)...(137): D-ala D-ala ligase N-terminus
  misc_feature (1)..(355): Xaa is any amino acid
MSASAKNGGKPNVNVVMGGPSAEYEISLNSGGQVLAYLDRSKYNRLRAVVINKEKQIYYADADGAGNVPDIKSFEASGGPFKGPLHPSDCKEVWDGCDVAFLALHGEFGEDGTVQGYLGALGVPYTGCGVYASAVAMNKITSKFLYMLGGLSVPDYSVYGVNHPETTVDGIIKKHGFPCFLKCPQSGSSRLMGRAADRESLVALLKELQESADDILVETMVKGIEFSCGVIDMPDGSTYALPPIEIRPMGSEFFDYKAKYTHGCSEELVPAPREPELLAQIEETALRAHKLLRCYGVSRTDMIYCDSKMHVLETNTLPGMTSASLLPQAYKAWRGGTYAELLDVLLTSGLKRGSR

SEQ ID NO: 68747 - DNA, 1056 bp, Unknown
  Obtained from environmental sample
  misc_feature (1)..(1056): n is a, c, g, or t
atgtcgaatatcgcgtatttgatcttggaaaacgggacggtcttcgagggaaagcgcttccgcgcggagggcgaggtgaccggccagatcgtcttcacgacgggaatgaccggatacttggagacactgacggatcacagctatcacgggcagataggcctgcaaactttcccgctcataggcaactacggcgttattcccgaagactttgagagcggcggcgtgggggccaaagcttacatcgtcaagtatccctgcgcccatccctcaaacttcaagaacaaggggacgctcgacacctttttgcgcgagcgcggcatcacggggctccacggcatagacacgcgggcgctgacgaagatcatccgccaaaacggcgtgatgaacgggaagatcaccgcttccccgcccacggacgcggacttggcggaggtcaagaaatacgcggacgtcaacccggtcgccaacgtctcgcggcgcgacgccgagaagctgtcatactgcatacggcgcgtggcgctgctcgactgtggcgcgaaacgaggcatagccgacgccctcgcgaaacgcggatgcgaggtatggtcgttcccctacaacgctccgacggacgaaataatgaaaatcaaaccgcacggcgtaatgctcagcaacggccccggcgacccagccgaccccgcgaacgacgtaatggtcgaaacaatccgcgccataacaaaaaacggaacccctatcttcggcatctgcctcggccaccaactgctcgcgctcgcaaacggctacaaaacacagaaacttaaattcggccaccgcggcgcaaaccaacccgtcaaggaaaccgcaacgggccgcgtatacataaccagccaaaaccacggctacgccgtagtagccgaaaacggctccttcaccaacgtcaacgacggcacatgcgaaggccttgactacggaatctcgttctccgtccaattccacccggaagcaagaggggggccgctcgacactgggttcttgttcgacaggtttatggagaggatgggggctacgcttgcgtga

SEQ ID NO: 68748 - protein, 351 aa, Unknown
  Obtained from environmental sample
  DOMAIN (153)...(327): Peptidase C26
  misc_feature (1)..(351): Xaa is any amino acid
MSNIAYLILENGTVFEGKRFRAEGEVTGQIVFTTGMTGYLETLTDHSYHGQIGLQTFPLIGNYGVIPEDFESGGVGAKAYIVKYPCAHPSNFKNKGTLDTFLRERGITGLHGIDTRALTKIIRQNGVMNGKITASPPTDADLAEVKKYADVNPVANVSRRDAEKLSYCIRRVALLDCGAKRGIADALAKRGCEVWSFPYNAPTDEIMKIKPHGVMLSNGPGDPADPANDVMVETIRAITKNGTPIFGICLGHQLLALANGYKTQKLKFGHRGANQPVKETATGRVYITSQNHGYAVVAENGSFTNVNDGTCEGLDYGISFSVQFHPEARGGPLDTGFLFDRFMERMGATLA

SEQ ID NO: 68749 - DNA, 963 bp, Unknown
  Obtained from environmental sample
  misc_feature (1)..(963): n is a, c, g, or t
atgcaggtgaagagggcgctgcccggaataataaaggcggcggaccatttgcgcggggcgttctcccttatcattgccagcagccaaaacaaactgatagcggtccgcgaccccaacgggtttcggccgctgtgcctaggcaaaaacgaattgggctacgccgtggcgtcggagagctgcgcgcttgagatatgcgggttcgagttcgtcagggacgtgaagccgggtgaaatcatcacaataaaaaacggcgagataacgcatgagagcataagcctaagccacaaggaagagggacgcgggttctgcatattcgaatacgtctacttcgcccgccccgactcggtgctcgacgggctctcgatatacgaggcccgctacaacatgggcgcgattctggctaaggagtatccggtggacgccgacgtggtctgcggcgtgccggacagcggcttggtggcggccaacggctacagcgcggcaagcggcataccgctcgccgacggttttgtcaagaacaggtacatagggcgcagtttcatctaccccacgcaaatacagcgcgacagcgccgtgcggcaaaagctgaaccccttggcggctaacgtgaaagggaaaagggtcgttctcgtggacgactccatagtgcgcggcacgacgtgcgagaagatcatccgcagcctcagaaacgccggggccgcggagattcacatgagagtatcgtcgccgccgttccgccacacctgccactacggaaccgacatcggcggcgaggataaccttatcgcgaacaaaatgggaatagacgacatccgcaagaaattcggcgcggacactttggggtatataagcttagacgggctgaaaaaagcctgcgagaaatgcgttctgccgttctgcacggcctgcttcaccggccacgacgaatcgccggtacgcaccagaaaagatattctcgaataa

SEQ ID NO: 68750 - protein, 320 aa, Unknown
  Obtained from environmental sample
  DOMAIN (114)...(260): Phosphoribosyl transferase domain
  misc_feature (1)..(320): Xaa is any amino acid
MQVKRALPGIIKAADHLRGAFSLIIASSQNKLIAVRDPNGFRPLCLGKNELGYAVASESCALEICGFEFVRDVKPGEIITIKNGEITHESISLSHKEEGRGFCIFEYVYFARPDSVLDGLSIYEARYNMGAILAKEYPVDADVVCGVPDSGLVAANGYSAASGIPLADGFVKNRYIGRSFIYPTQIQRDSAVRQKLNPLAANVKGKRVVLVDDSIVRGTTCEKIIRSLRNAGAAEIHMRVSSPPFRHTCHYGTDIGGEDNLIANKMGIDDIRKKFGADTLGYISLDGLKKACEKCVLPFCTACFTGHDESPVRTRKDILE

SEQ ID NO: 68751 - DNA, 477 bp, Unknown
  Obtained from environmental sample
  misc_feature (1)..(477): n is a, c, g, or t
atgggtcttataaaacaatatttgcgggctgaatttgactttagtaggcaaaataaaatccgcgtccgccacgctggggattttaacggactgccgcccgacattcaaaaagaattgtccgattccatgacggatacggcaagttttgacggaatgcaggttattctggcgattaactacggcggcagggacgagattatcagggcgtttagaaaattcgccgcggaaagcgaaaacgccgacattagcgaggacgttatacaaaattaccttgataatcccgatatacccgatcctgatttaataatccgaagcgccggcgaatacaggacgagtaattttttactgtgggaaggcgcatattcggaattgtacatatcgcagaaattatggcccgattgggataaagaggatttggaaacggcgattgccgaataccaaaatagagacaggcgttttggcggagtaaaagcatga

SEQ ID NO: 68752 - protein, 158 aa, Unknown
  Obtained from environmental sample
  DOMAIN (1)...(155): Putative undecaprenyl diphosphate synthase
  misc_feature (1)..(158): Xaa is any amino acid
MGLIKQYLRAEFDFSRQNKIRVRHAGDFNGLPPDIQKELSDSMTDTASFDGMQVILAINYGGRDEIIRAFRKFAAESENADISEDVIQNYLDNPDIPDPDLIIRSAGEYRTSNFLLWEGAYSELYISQKLWPDWDKEDLETAIAEYQNRDRRFGGVKA

SEQ ID NO: 68753 - DNA, 873 bp, Unknown
  Obtained from environmental sample
  misc_feature (1)..(873): n is a, c, g, or t
atgaaaaaaattattgaaaggttactggtatttataataggaattcccgctgtttatgctcttgtaattctgctcccctaccgcagtaaccttgccttgaatatagtcacaattttattttccgcaatgggcgctgttgaattttctttcttacttgaaaaaaagaaaattgtaatttcaaaaatagaaagttttattttaggcgctgtaattccattggcttttactcttgttttcagttttgaagaattacctgaatggatttttccggttttaataatggcaagcgctggatggatattactaacaaaagttttttctaagtcctcagaaatagaacaaataaccgggcaaataaccggtaaaatttccctgcttatttatcccggactttttatctgctggttagtagttatgagcggatggggggatcccgaagcgacacttttatttttattcgtcacattcagcagtgattcaaccgcatggctttgcggtaatttattcggcgcgaacaacaggggaataattcccgtaagtcccaacaagagcgtcgcgggctttataggcggagcgctcggttctgtaattgtagctgtgggagcctcatttctttttcccaatatatttacttatttaaaccttgaaattccttccggtaaactggcaatcatggcggctattctgggtttctgtaccggtatcgccgcgtcattaggcgatcttgccgaatccgcgataaaaagaagctgtgattcaaaagattcggggaatttgatgctcggacgaggcggcgttcttgattcaattgactccattgccgtagccgctcctgtattttatcttctgttcaacatatttttcagagtttga

SEQ ID NO: 68754 - protein, 290 aa, Unknown
  Obtained from environmental sample
  SIGNAL (1)...(20)
  DOMAIN (5)...(287): Cytidylyltransferase family
  misc_feature (1)..(290): Xaa is any amino acid
MKKIIERLLVFIIGIPAVYALVILLPYRSNLALNIVTILFSAMGAVEFSFLLEKKKIVISKIESFILGAVIPLAFTLVFSFEELPEWIFPVLIMASAGWILLTKVFSKSSEIEQITGQITGKISLLIYPGLFICWLVVMSGWGDPEATLLFLFVTFSSDSTAWLCGNLFGANNRGIIPVSPNKSVAGFIGGALGSVIVAVGASFLFPNIFTYLNLEIPSGKLAIMAAILGFCTGIAASLGDLAESAIKRSCDSKDSGNLMLGRGGVLDSIDSIAVAAPVFYLLFNIFFRV

SEQ ID NO: 68755 - DNA, 1119 bp, Unknown
  Obtained from environmental sample
  misc_feature (1)..(1119): n is a, c, g, or t
ttgatgaaaaagcgcatcgctgttcttggagcgacaggctctatcggaaaaagttccctcgacataatttcccgcgacccggaaaactttgaagtagtccttcttaccagccgctccagccgcggcaaacttgaagaattatcaaaacaattccctgccgccgtttgcgtactcgccgacgaacccaacggcaaacaaaatcttctaaccgcaatcgccgaaacaaaacccgatataacgataaacggcatatcaggcgcggcgggactagaaccctctctcgcggcaatcaatgcgggctctcaccttgctctggcaaacaaggaaacaatcgtcatggcgggtgatttagctatccgctcggcaaaagaaaaaaatgtaaacattattcccgtagattcagagcactccgcaatttttcacctgctccgcttctttgccgagcaaggcggcggaaaaagcgaaaatgtaagcgaaataattttaacggcatcaggcggtccttttagaaatttgagcgttaaagacatggaaaaagtaacggtaaaagacgctctcgcccaccccacatggaacatggggcaaaaaataacaattgattctgcttcaatggcaaacaaaggattggaaataatagaggcttgcgttttttttaacatgcccggcgaaaaaataaaagtggctatccatccgcagagcattgtccactcgatgatccgtctttgcaacggtgtcatttacgcccagctttccaaacccgacatgcgccaccctattcacgacgctatctattatcccgtaacaactaagtcaaccttagaaccaatcagctttgattctctcacccttgaattctcaaaacccgaccccgacaaattccccatgttaaaatacgcatgggaagccgcgaagcgcggggcgttgtatccatgcgcctacaacgccgcaaacgaaacggcggttacggcgtttttggaacaaaagattggtttcctggatattcctaaaataacggaacatgttttacaggcggattggagcgccggtgttttggatttggaagcagtgcttagagcggacaacgcggcaaggcagagagcgaaggctttgataacgtaa

SEQ ID NO: 68756 - protein, 372 aa, Unknown
  Obtained from environmental sample
  SIGNAL (1)...(20)
  DOMAIN (6)...(115): 1-deoxy-D-xylulose 5-phosphate reductoisomerase
  misc_feature (1)..(372): Xaa is any amino acid
MMKKRIAVLGATGSIGKSSLDIISRDPENFEVVLLTSRSSRGKLEELSKQFPAAVCVLADEPNGKQNLLTAIAETKPDITINGISGAAGLEPSLAAINAGSHLALANKETIVMAGDLAIRSAKEKNVNIIPVDSEHSAIFHLLRFFAEQGGGKSENVSEIILTASGGPFRNLSVKDMEKVTVKDALAHPTWNMGQKITIDSASMANKGLEIIEACVFFNMPGEKIKVAIHPQSIVHSMIRLCNGVIYAQLSKPDMRHPIHDAIYYPVTTKSTLEPISFDSLTLEFSKPDPDKFPMLKYAWEAAKRGALYPCAYNAANETAVTAFLEQKIGFLDIPKITEHVLQADWSAGVLDLEAVLRADNAARQRAKALIT

SEQ ID NO: 68757 - DNA, 516 bp, Unknown
  Obtained from environmental sample
  misc_feature (1)..(516): n is a, c, g, or t
atgaaaaaacccattcaatcaataagtgaaatctctcaatctgtgcaaggtataagttcgacaatccgcataattctttcaatagcggcaaatacccttttgctgtcaatgaatgcggcgatgaaagccgcccacgccggagaagctggaaagggctntgcggtagtcgccggagaaatacgccgtctttcggaaaacaccagagaaaatgcaataggtatttcccgtacactaaaaaatattatcagcggaatatccgatacgacaaaacaatccggcgaaacagacgcgcgaatagcccaaatgtccgaagagataaaagggtttgccgaaactatgtctgtttttatggatacatttaatgaattatcggcaaaaagcggaaacattaccgcctctcttgtaagcctaaaagaacaaagttcggcggtaaaaacaagttatgcgcaaatgattgaaatgacaaataaacttgccaaagcgctgaaagacttatccgacttgtcaaaaagataa

SEQ ID NO: 68758 - protein, 171 aa, Unknown
  Obtained from environmental sample
  DOMAIN (1)...(166): Methyl-accepting chemotaxis protein (MCP) signaling domain
  misc_feature (1)..(171): Xaa is any amino acid
MKKPIQSISEISQSVQGISSTIRIILSIAANTLLLSMNAAMKAAHAGEAGKGXAVVAGEIRRLSENTRENAIGISRTLKNIISGISDTTKQSGETDARIAQMSEEIKGFAETMSVFMDTFNELSAKSGNITASLVSLKEQSSAVKTSYAQMIEMTNKLAKALKDLSDLSKR

SEQ ID NO: 68759 - DNA, 2067 bp, Unknown
  Obtained from environmental sample
  misc_feature (1)..(2067): n is a, c, g, or t
atgtttttacgttctttatcagtacctgtaaacacaataggtggaataggaacttccatatctcaaaaacttatgcggcttgggatacgcaccgcctcggatcttcttcttcattatccgcgcgattgggaagatcgggcgaaaattgtcccgttaaaagcgtatagaagcggcaaagtatgcacggttgttaccgtttttacgaaggaatggatttaccacggaggaatgagaactctaaaaatttatatagaggatgaaaacacacaggcggttcttgtatgttataaacgtccgtggctagacaaacaaattattacaggtcaaaaatacatgatttcgggcatttttaaatatagatatggcgaattgcagtcaagcacttttgaagccgaacatgtgtctttaggatcaagttatggaaaaattgtgcctgtttatccgctgacggccggcattatacaaagtaaaatgcgtggctttatttcttccgccataaataaatatgtaaatcaactggaaaatgagcttccaagcgcgataatggaaaaagaaaatcttttaacaaaaactcaggcggttagggaaatacattttccgacttctatggatatgctggaaaaagcaaaaaaaacgcttatttatgaagaacttttttacatggaagttatggttgtccgcagggcgatagagagaaagagtaaaattaaaattgagcggacaaacgataaaaacaaaaaagaaaatatttcgcttttacaacaacgccttatagaaagactgtctttttctttaacggcggggcaaataaacgccattgaggaaataaatagggatatgtcgtctaatatccccatggcgcgtcttttacagggagatgtcggttgcggaaagactttagtgtcatttcttgcagcgttacgcgccgttgaagacaatggtcaggcggcgattatggcccccactgaattgcttgcccgtcagcacgcggaaaacgccgcccgtcttttagagccgcttggaatcagaatcgcttttcttaccggaaatattaaagccaagggccgcaaagaattacttaagaacctggccgccggaaatattgatataatagccggtactcacgcccttttttcaaaggatgtcgagtataaaaacttaaaacttgttgttatagacgaacagcatcgttttggcgtaacgcagagggctcttatcatggcaaaggggcagcaacccggtcttttaatgatgagcgcgactcccattccgcgtactttggcgttaactgtttttggcgacatggacgtaactgtgataaaagatatgcctgtcgggagaaaacccgttattacccatcttgcgaaagagtcaaacgagaaaaaagtttatgattttgtccgcaaagagcttgagaatggaaggcaggcttattttgtctacccgttaatagaaggcggcgaggaaattaaagatacggtatcaatggcgcaaaggcttgcggatgaagttttcccaaaatataaaacggctcttattcactctaaactgcccgaagaagaaaaaaagcagataatggacgattttagaaaaggcgcaataaaaatacttgccgcaacaagcgtcgtggaagtgggggtagacgtgccaaacgccgcgtgcatggttatagaacacgccgagcgttttggtctgtcagcccttcatcaattacgcgggcgcgtcggcaggggaggggagcagtcgtattgttttcttattttttcagacgacctgaccgaagaaggcaagacccgcttaaaagtgatgttggaaaataccgacggctttgtaatcgcggaagaagatttaaaattaagagggcctggacaaatcgctggaacggaacaatcgggttatcttgttcttggaatagccaacccaatccgcgacatggaaattctggaaagagccagaggcgacgtgttttcaattttggagaacgatcccgatctgttactgggaaacaatcgcgtaattgcgagggtactggagcaggcgccgccgtttaatgaagtcgcgctttaa

SEQ ID NO: 68760 - protein, 688 aa, Unknown
  Obtained from environmental sample
  DOMAIN (262)...(424): Type III restriction enzyme, res subunit
  misc_feature (1)..(688): Xaa is any amino acid
MFLRSLSVPVNTIGGIGTSISQKLMRLGIRTASDLLLHYPRDWEDRAKIVPLKAYRSGKVCTVVTVFTKEWIYHGGMRTLKIYIEDENTQAVLVCYKRPWLDKQIITGQKYMISGIFKYRYGELQSSTFEAEHVSLGSSYGKIVPVYPLTAGIIQSKMRGFISSAINKYVNQLENELPSAIMEKENLLTKTQAVREIHFPTSMDMLEKAKKTLIYEELFYMEVMVVRRAIERKSKIKIERTNDKNKKENISLLQQRLIERLSFSLTAGQINAIEEINRDMSSNIPMARLLQGDVGCGKTLVSFLAALRAVEDNGQAAIMAPTELLARQHAENAARLLEPLGIRIAFLTGNIKAKGRKELLKNLAAGNIDIIAGTHALFSKDVEYKNLKLVVIDEQHRFGVTQRALIMAKGQQPGLLMMSATPIPRTLALTVFGDMDVTVIKDMPVGRKPVITHLAKESNEKKVYDFVRKELENGRQAYFVYPLIEGGEEIKDTVSMAQRLADEVFPKYKTALIHSKLPEEEKKQIMDDFRKGAIKILAATSVVEVGVDVPNAACMVIEHAERFGLSALHQLRGRVGRGGEQSYCFLIFSDDLTEEGKTRLKVMLENTDGFVIAEEDLKLRGPGQIAGTEQSGYLVLGIANPIRDMEILERARGDVFSILENDPDLLLGNNRVIARVLEQAPPFNEVAL

SEQ ID NO: 68761 - DNA, 621 bp, Unknown
  Obtained from environmental sample
  misc_feature (1)..(621): n is a, c, g, or t
gtgcagaagcgtggcggaggcatggagaaaataatgcgttttatttttggaattttagcttcaataaccggtatttattcgttaattatttttatacgaataattttttcatggtttggaaacatggttggtggaaaacccgtagaaatcataaatagaattacagacccgtatcttgactggtggaggcaaaaattacatttaagaataggtaattttgatttttcggtaattccggcgattttatttctttcttttattcaaaatttatttcgtattatttcaaaagcggaaagaataactattggatttctgcttgcgcaaatattattatttatatggaatattttttctattatattaggattttatattattgtaattatcatacgccttataggctattttattaacagtaatatatacagccctttctggagtattattgattcaatcacacagccgttattatataggacgaacagaatattttttggtaaaaaaatcggaggctatttaaaaggaatgtttttatcgttattacttttaattgtaatacttttcggcggatggtttgttgtctctttactttccagtattttttataagttgccaatataa

SEQ ID NO: 68762 - protein, 206 aa, Unknown
  Obtained from environmental sample
  DOMAIN (12)...(94): YGGT family
  misc_feature (1)..(206): Xaa is any amino acid
MQKRGGGMEKIMRFIFGILASITGIYSLIIFIRIIFSWFGNMVGGKPVEIINRITDPYLDWWRQKLHLRIGNFDFSVIPAILFLSFIQNLFRIISKAERITIGFLLAQILLFIWNIFSIILGFYIIVIIIRLIGYFINSNIYSPFWSIIDSITQPLLYRTNRIFFGKKIGGYLKGMFLSLLLLIVILFGGWFVVSLLSSIFYKLPI

SEQ ID NO: 68763 - DNA, 447 bp, Unknown
  Obtained from environmental sample
  misc_feature (1)..(447): n is a, c, g, or t
gtgcggcaatacggcaggttgtacgattggaatacggcgacgactgtttgccccgccggatggcatttgccttccgcccaagagtgggatcttttaggggtgtctatagattggaaaacgcctgagcgttattatgacgcttggaggtcaaccggtaaaaagttgaaagcgaaaagcggttgggaggacatatttggcaatggaacggatgattacggattttcagcgctacccggcggcggttactacataccaagtaggcgctacactcccgacggctatttttattatgtcggagaaaaaggctgttggtggacggccgtcgcgcgtagcgccgataacgcttactccaagtacgttaacgacttcgatgcgctatacgaggacggttttggcggcggcacaaacaagaacgaaggtctttcggtgcgctgtgtccaagattga

SEQ ID NO: 68764 - protein, 148 aa, Unknown
  Obtained from environmental sample
  misc_feature (1)..(148): Xaa is any amino acid
MRQYGRLYDWNTATTVCPAGWHLPSAQEWDLLGVSIDWKTPERYYDAWRSTGKKLKAKSGWEDIFGNGTDDYGFSALPGGGYYIPSRRYTPDGYFYYVGEKGCWWTAVARSADNAYSKYVNDFDALYEDGFGGGTNKNEGLSVRCVQD

SEQ ID NO: 68765 - DNA, 2112 bp, Unknown
  Obtained from environmental sample
  misc_feature (1)..(2112): n is a, c, g, or t
atgaagacaccgcatggcaattcgcccgaactgttagctccggccggaagccgcgagtctttttacgccgccgtagactccggagcgaacgccgtttatctcggtcttggcgatttcaacgcccgtctgcgggctaagaacttcacaacccgcgacctgtcgtccctcgttccgtttgcgcattcccgcggtgtgaaggtttacgttacgctaaatacgctgataaagcaaaacgagatcgttcccgccttgaatatgctgtatcaattggatcagcttggcgtggacgccgttatcgccgccgacataggtttgatgaggttgtccgcgaataactttccaaacctgcggatccacggcagtacgcaggcggcggtgcataattcttacggggcagagtttttaaagtcgctcggcgtcaaacgtgcggtgctggcgagggagttgtctttggaggagattgaggagacggccaaagcgtcgcccatagagacggaggtgtttatccacggagcgttgtgctactccatgtccggaatgtgtttggcgagcagtttcataggaggcgcgagcgggaataggggacggtgtacgcaggtttgcaggaggcggtttaaacgtggggatgccgatgggtacttcttctccccgtatgacctgcaggcccttccgttcattaacagattggccaaagccggcgtagcgtgctttaagattgaggggcgtatgaagggcgccgagtatgcgggtaccgtcgttaaggcgtaccgtcacgctatagattttccggatgatatggactatgcggaaaaagcgttacgttttgacttcgggcgggccaagacggtattttttatagacggcaggcgaggggaggcgatagatccggataggccgtcggggacgggaattttcttggggacggttgttgagagtgacggcgggacgtttattatcgacggtatcaacagcattaacaatattaatacggacgatacgttgacaatagagaaaaatgaccgtttacgtatacatcccaaagacgggtttgaaggtattgcgtgtaaagtcggaagttgtcaagtaatagataataataatcatcatcggataaaaatcacgccgtcacaaccgataaagtgttctatagacgacagcgtcttcttaatcggcaaaatcggtattaatgcaagtatcgatacaactatcaataacaacggtatcaataccgctatcaacataaaaccgacctacccgtcagccaaacgaatagccgacagcctaacgccgcgaaataatccagacgatgccgtcaatcaaaatccgccgataaaacccgcgctatggttcaaagccgaccgcttgcaatggctagacctcataaccgccacgccctgtcaacgcctaatcttcgacgccgacgtcggcgaacttgagtcgttaatcaattccccggatattataaagacatggcgctcacgcgtatccatagccctgccgccgtttatcgaagagccgaaattgactctatggcgcaatattattgataaatgcctctccgtaggcctgcgctccttcaccgtatcaaacgtcggccacttcccgctcgtaagaggggctgaccgtatcgtttcggattcactattgtggtgtctgaaccgtttcacccaagcggaacttttaggccgcggcgcagaccgtttcatcttttcgtgggaggacgagtatctaaacgtcagagacaacgtctacccgccgccgccccccgtgtccggcgtcatatccggagtagccccaatctacggcagaccgccgcttttcatatcaaggatgagcccgcccctccgcgacggggagacggtggttgacccgaacggcggcgctttcttcgtatcaaccaaaaacggcctctgctacacgctaccggtgacccccgtatgcctcttcgccaagcgcaaaaaactgtcggagtgcggcgtgaacgagtttctaatagacgtatcgttccacgaaccgagctatgagttgataggggcgttgatgagcgggtataaggacggcgttaggattagcggcggcacgatttttaattttaaggcaggattaaaatga

SEQ ID NO: 68766 - protein, 703 aa, Unknown
  Obtained from environmental sample
  DOMAIN (80)...(292): Peptidase family U32
  misc_feature (1)..(703): Xaa is any amino acid
MKTPHGNSPELLAPAGSRESFYAAVDSGANAVYLGLGDFNARLRAKNFTTRDLSSLVPFAHSRGVKVYVTLNTLIKQNEIVPALNMLYQLDQLGVDAVIAADIGLMRLSANNFPNLRIHGSTQAAVHNSYGAEFLKSLGVKRAVLARELSLEEIEETAKASPIETEVFIHGALCYSMSGMCLASSFIGGASGNRGRCTQVCRRRFKRGDADGYFFSPYDLQALPFINRLAKAGVACFKIEGRMKGAEYAGTVVKAYRHAIDFPDDMDYAEKALRFDFGRAKTVFFIDGRRGEAIDPDRPSGTGIFLGTVVESDGGTFIIDGINSINNINTDDTLTIEKNDRLRIHPKDGFEGIACKVGSCQVIDNNNHHRIKITPSQPIKCSIDDSVFLIGKIGINASIDTTINNNGINTAINIKPTYPSAKRIADSLTPRNNPDDAVNQNPPIKPALWFKADRLQWLDLITATPCQRLIFDADVGELESLINSPDIIKTWRSRVSIALPPFIEEPKLTLWRNIIDKCLSVGLRSFTVSNVGHFPLVRGADRIVSDSLLWCLNRFTQAELLGRGADRFIFSWEDEYLNVRDNVYPPPPPVSGVISGVAPIYGRPPLFISRMSPPLRDGETVVDPNGGAFFVSTKNGLCYTLPVTPVCLFAKRKKLSECGVNEFLIDVSFHEPSYELIGALMSGYKDGVRISGGTIFNFKAGLK

SEQ ID NO: 68767 - DNA, 1107 bp, Unknown
  Obtained from environmental sample
  misc_feature (1)..(1107): n is a, c, g, or t
atgaaaatactgatggtttcaagcgaggctgtcccttgggcgaaaaccggcggtcttgccgacatggtttccgctctttcgataagccttgctaaacttggacacgaagtaaaaatagttatcccccgttactattcgattgatcggggcggtttgaaacttcttcccggcgcaatgggaacgcctatgggcggcggtattgaggaatggagcgcggtttataccgcagatatgcctggaaccggcaaaaaaaatcccgtaaaagtttattttattgatcatgaaattttctttggcagggacggcatttacggcaaccagatagagaccgattttctcgacaactcgcggcgtttttcttttttctgcagagcggcgtttcagctttgccgtaaaattaaatggtatcccgatgtgttacacgcacacgactggcctgcggcggttgcgcccgtctatcttaaattcgctgaaagagtccccggcggagacaaaggatttaaaaaaacagtttcaattcttacgattcacaacctcggctatcagggcatatacggtaaagataattttaactacatgggacttggctgggatgttttttacaacgccggttttgaggactggagtatgcttaacatgcttaaagccggtctttacagcgcggataaactaaacacagtttcacctaactacgccgaggaaacaaagacgcaggctaacggcttcaggctggacggagttctgcgttaccgctccgccgactactgcggaatactaaacggtattgacacaaacgtatggaatcccgcaaaggacaaatatatccctgagccttactcaataaaaaatatggcaggcaaggcaaaagcaaaaaccgccctgcaaaaagaatttggcttgtctcccgatccggaagtaccggttatcggaatggttacccgccttaccgatcaaaaaggagtaggcgatctttttggacccacttacggctgtgcgtggtcaatttgccgcgacttaaatttgcaaatggttttgctgggctccggcgaatactggtgcgagaacgaagtttcaggtctttcttcccgaatatcaatttcagggtaa

SEQ ID NO: 68768 - protein, 368 aa, Unknown
  Obtained from environmental sample
  DOMAIN (2)...(250): Starch synthase catalytic domain
  misc_feature (1)..(368): Xaa is any amino acid
MKILMVSSEAVPWAKTGGLADMVSALSISLAKLGHEVKIVIPRYYSIDRGGLKLLPGAMGTPMGGGIEEWSAVYTADMPGTGKKNPVKVYFIDHEIFFGRDGIYGNQIETDFLDNSRRFSFFCRAAFQLCRKIKWYPDVLHAHDWPAAVAPVYLKFAERVPGGDKGFKKTVSILTIHNLGYQGIYGKDNFNYMGLGWDVFYNAGFEDWSMLNMLKAGLYSADKLNTVSPNYAEETKTQANGFRLDGVLRYRSADYCGILNGIDTNVWNPAKDKYIPEPYSIKNMAGKAKAKTALQKEFGLSPDPEVPVIGMVTRLTDQKGVGDLFGPTYGCAWSICRDLNLQMVLLGSGEYWCENEVSGLSSRISISG

SEQ ID NO: 68769 - DNA, 417 bp, Unknown
  Obtained from environmental sample
  misc_feature (1)..(417): n is a, c, g, or t
atgggtattaaacaaatatcggtttttcttgaaaacacgacgggcagattaagcgaagttacaaagactctcgccggcgccggaataaatcttagggcaatcagcattgccgacaccgcggatttcggaatcttgcgcatcatcgccgataaaaccgacaaggcggttgaaactttaactcaggcgggatttaccacgcggcagaccgacgtagtagcggtggaaattgaagacgttcccggaagtctcgcgaaattgatggcgttgtttcaggagtcgcaggtaaatatcgagtacctttacgcttcgcttgagggacaggttggaaaagcggtcgtcattttcaagttgaaggatcacgaaaagggacagaacatactcagctctaaaggttttaaattagcggataacttctga

SEQ ID NO: 68770 - protein, 138 aa, Unknown
  Obtained from environmental sample
  DOMAIN (4)...(71): ACT domain
  misc_feature (1)..(138): Xaa is any amino acid
MGIKQISVFLENTTGRLSEVTKTLAGAGINLRAISIADTADFGILRIIADKTDKAVETLTQAGFTTRQTDVVAVEIEDVPGSLAKLMALFQESQVNIEYLYASLEGQVGKAVVIFKLKDHEKGQNILSSKGFKLADNF

SEQ ID NO: 68771 - DNA, 1302 bp, Unknown
  Obtained from environmental sample
  misc_feature (1)..(1302): n is a, c, g, or t
atgatttttagtcccgaatatgaatgtatggatcctcaagcgctaaggaaacttcagcttgccgcgcttaaaaaccttgtggaaactttatattcaaaagtgcctttttaccgcgaaagattagacgcggcgggggttactcccagggatattcacactattgcggatatcgaaaaattacccttcactacaaaagatcacttgcggataaattatcctcacggtcttcgcgcctgtcctcaggacagaattgtggaagtccacatgagttccggtactaccggaaaaccggtcgttaacgagtacacaattaaagatattgatatttggcggcagtccatggcgagaactatggcgggagccggttgtacgcgcgatgacattgttcaaaattgttacggttatgggcttttcacaggcggcgcgggcgcgcattacggagcgctcactatcggcgcggaagttctgccaatgtccagcggcaataccgaacgccagttgatggttctgcgcgactttggttcgaccatgcttacctgcacaccttcttacgcgctctacctcgccgaagaagcggctgaagccggcatcgatcttaaagaactgccgatcagcaagggttgtttcggcgcggaaccgtggagcgaaaatatgcgcgtcgagatcgaagagcgattcaaaatgaaagcctacgatatttacggcttaacggaaattatcggaccgggagtcgcttttgaatgcgaggctcaggacgggcttcatgtgaacgaagattttttctaccccgaaattatcgatccgaacacgggaagagttctgcccgccggagaaaaaggcgagcttgtctttaccacgataacaagagaggggactccgctcctgcgctaccgcacaagggacatcacatttataattgaagagccctgctcatgcgggcgcacgacaaggcgcatacacaggctctttggcagaaccgacgacatgttgatcattcgcggcgtaaatgtgttcccaagccagattgagcaggcgcttatcgaaattgaaggaacagagccgcagtacctcatcattgtcaatcgcggcgacagccatttggacgaagtggaactgcaagtcgaagttaagaaagaacttttcagcgatgagacgcgcggacttgaggaacttcgcagccgcatagaacatgtgatgaagagcaaattgcaaatcagcctgaaggtaaaactggttgagccgaaaactatcgagcgttcaatcggaaaagcaaaaagagttatagataacaggaaaatttaa

SEQ ID NO: 68772 - protein, 433 aa, Unknown
  Obtained from environmental sample
  DOMAIN (14)...(357): AMP-binding enzyme
  misc_feature (1)..(433): Xaa is any amino acid
MIFSPEYECMDPQALRKLQLAALKNLVETLYSKVPFYRERLDAAGVTPRDIHTIADIEKLPFTTKDHLRINYPHGLRACPQDRIVEVHMSSGTTGKPVVNEYTIKDIDIWRQSMARTMAGAGCTRDDIVQNCYGYGLFTGGAGAHYGALTIGAEVLPMSSGNTERQLMVLRDFGSTMLTCTPSYALYLAEEAAEAGIDLKELPISKGCFGAEPWSENMRVEIEERFKMKAYDIYGLTEIIGPGVAFECEAQDGLHVNEDFFYPEIIDPNTGRVLPAGEKGELVFTTITREGTPLLRYRTRDITFIIEEPCSCGRTTRRIHRLFGRTDDMLIIRGVNVFPSQIEQALIEIEGTEPQYLIIVNRGDSHLDEVELQVEVKKELFSDETRGLEELRSRIEHVMKSKLQISLKVKLVEPKTIERSIGKAKRVIDNRKI

SEQ ID NO: 68773 - DNA, 435 bp, Unknown
  Obtained from environmental sample
  misc_feature (1)..(435): n is a, c, g, or t
atggtgaaaccggaaagcctgcaaaaatactctctctttggcggacttttagaagagcagatacaagctattataccgctcatgaaggaggaaaaatacaatcccggtgatttaataattaccgaaggaaacgcaaacgacaaaatatttttcataattgaagggcaggtatctgtaagcaagaagaatgtggagctttcccacttcggcgagggcgaggcttttggcgagatggaagtgcttgatgttatgccggctatcgcatccataaaatcaatttcgcaggttacagtgttatcgatatcaaacaaatccctgcgcgaaatttacaagatggatgtaaaagttttcgcgcttatgcttatgaatcttgcccgcgacctttgcagacgtttgcgtaaatcggatgaaaaactcgcttcatcaccgacataa

SEQ ID NO: 68774 - protein, 144 aa, Unknown
  Obtained from environmental sample
  DOMAIN (30)...(115): Cyclic nucleotide-binding domain
  misc_feature (1)..(144): Xaa is any amino acid
MVKPESLQKYSLFGGLLEEQIQAIIPLMKEEKYNPGDLIITEGNANDKIFFIIEGQVSVSKKNVELSHFGEGEAFGEMEVLDVMPAIASIKSISQVTVLSISNKSLREIYKMDVKVFALMLMNLARDLCRRLRKSDEKLASSPT

SEQ ID NO: 68775 - DNA, 453 bp, Unknown
  Obtained from environmental sample
  misc_feature (1)..(453): n is a, c, g, or t
atgaataatccgaatatagttgtctgggacgaaaaatatgccacgggaatacaattaattgacagccagcacaaagaacttatttcccttaccaatgagctttttcaagcctgtctggacggagaaaacgcggttaaagacgtatttaaagagacaatggggcgaatggttgattatgtccgtttccattttggagccgaacaagagctattgcagagggtaaaataccccaactatcaggagcataaaaaacagcacgatacgtttgtaatgcaagttattactacggtaaaggaatataacgagggaaaaaaattagcgcccaaccagtttgtacgcactcttagagactggatattaggtcatattgcccattatgatagactttacgcgtcttatatcgccgcccagattaaaaaaggttttataagcaataaagatattaccggatag

SEQ ID NO: 68776 - protein, 150 aa, Unknown
  Obtained from environmental sample
  DOMAIN (16)...(74): Hemerythrin HHE cation binding domain
  misc_feature (1)..(150): Xaa is any amino acid
MNNPNIVVWDEKYATGIQLIDSQHKELISLTNELFQACLDGENAVKDVFKETMGRMVDYVRFHFGAEQELLQRVKYPNYQEHKKQHDTFVMQVITTVKEYNEGKKLAPNQFVRTLRDWILGHIAHYDRLYASYIAAQIKKGFISNKDITG

SEQ ID NO: 68777 - DNA, 684 bp, Unknown
  Obtained from environmental sample
  misc_feature (1)..(684): n is a, c, g, or t
ttgctgcttacccctaaccccaaaggatcaaccacaatgcgcaaactcatactgactacggcggcggtcgcggcggcgattgcgggggctttcgccgcagagccgtctttcggaacattcaccgacacaagagacgggcagacgtacaagacggtgaagattgggaagcagacttggatggcgcagaatctcaattatcagaccgaaagcgggtcttggtgttacatggacagcgcgtcctactgcaaacaatacggcaggttgtacgactggaatactgctaaaacagtctgtcctaaaggatggaaattgccgtttcgcgaggattgggattctttggggcaagcggtaggaggcaagaaagagctggtggatgatgatagtaggggtaggatttattgggacggcgcggctaagaagttgaaatcaaagagcgggtggaacaaaaacggtaatggtacggacgattacggattttcggccttgccgggcggcaacctcggccacttggatggcggtttcggcaatgccggcaacattggtctctggtggacggctacggatagcgattatttcgacgacgcctacagccgggagatgtactactcctccgacggcgtgcgcgaggacaacgattacaagagcctcggcttctcggtgcgttgcgtcgccgacagcccatga

SEQ ID NO: 68778 - protein, 227 aa, Unknown
  Obtained from environmental sample
  SIGNAL (1)...(28)
  misc_feature (1)..(227): Xaa is any amino acid
MLLTPNPKGSTTMRKLILTTAAVAAAIAGAFAAEPSFGTFTDTRDGQTYKTVKIGKQTWMAQNLNYQTESGSWCYMDSASYCKQYGRLYDWNTAKTVCPKGWKLPFREDWDSLGQAVGGKKELVDDDSRGRIYWDGAAKKLKSKSGWNKNGNGTDDYGFSALPGGNLGHLDGGFGNAGNIGLWWTATDSDYFDDAYSREMYYSSDGVREDNDYKSLGFSVRCVADSP

SEQ ID NO: 68779 - DNA, 825 bp, Unknown
  Obtained from environmental sample
  misc_feature (1)..(825): n is a, c, g, or t
atgcgcaaactcatactgactacggcggcggtcgcggcggcgattggattggcggggtgctctaagacaccgacaccgaaatccgtctccgcgacgcctgatacgccgcccgccgacgcttccgctttttccgaaacggcggtcggcgggcaaagttttgaaatggcgttcgtggcgggcgggacgtttacgatggggtgcgccgccgaacaggacagcgattgcgacgaagacgaacgtccggcgcattccgtgacgctgagcgattactacatcgggaagcatgaggtaactcaggggttgtggaaagcggtgacgggcggcaatccgtcatattttacagggagcgataatttgcccgttgaaaacgtccgttggaatgaggtcagcgcgtttatagacagtttgaatagaaagaccggcaggacgtatagactgccgacggaggcggagtgggagtatgcggcgcgcggggggaataagagcggaggatacaaatattcaggtagtaatacgttgggaagcgttgcttggtatttggataatagcggtcgtgaaactcatgaggcaggtacgaaagcgccgaatgaacttggtatctatgacatgagcggcaacgtgtgggagtggacgggcgattggtatggcgattacggttcggatgcgcagactaatcctatagggccgtcaacgggctctaaccgcgtgtttcggggcggtagttggttctacgttgcgaggaactgccgtgtctctaatcgcggcgacatcatccctgactaccgctacgacgacataggttttcgccttgctgtttccccctag

SEQ ID NO: 68780 - protein, 274 aa, Unknown
  Obtained from environmental sample
  SIGNAL (1)...(21)
  DOMAIN (51)...(272): Domain of unknown function (DUF323)
  misc_feature (1)..(274): Xaa is any amino acid
MRKLILTTAAVAAAIGLAGCSKTPTPKSVSATPDTPPADASAFSETAVGGQSFEMAFVAGGTFTMGCAAEQDSDCDEDERPAHSVTLSDYYIGKHEVTQGLWKAVTGGNPSYFTGSDNLPVENVRWNEVSAFIDSLNRKTGRTYRLPTEAEWEYAARGGNKSGGYKYSGSNTLGSVAWYLDNSGRETHEAGTKAPNELGIYDMSGNVWEWTGDWYGDYGSDAQTNPIGPSTGSNRVFRGGSWFYVARNCRVSNRGDIIPDYRYDDIGFRLAVSP

SEQ ID NO: 68781 - DNA, 846 bp, Unknown
  Obtained from environmental sample
  misc_feature (1)..(846): n is a, c, g, or t
atgcgcaaactcatactgactacggcggcggtcgcggcggcgattgggttggcggggtgctctaagacaccgacgccgaaatccgtctccgcgacgcctgatacggcggccctatcggtcgatacgccgcccgccgacgcttccgctttttccgaaacggcggtcggcgggcaaagttttgaaatggcgttcgtggcgggcgggacgtttacgatggggtgcgccgccgaacaggacagcgattgcgacgacgacgaacgtccggcgcattccgtgacgctgagcgattactacatcgggaagcgcgaggtgacgcaggggctgtggaaagcggtgacgggcggtaatccgtcacattttacaaggagcgataatttgcccgttgaaagcgtcagttggaatgaggtcaacgcgtttatagacaaattgaatagaaagaccggcaggacgtatagattgccgacggaggcggagtgggagtatgcggcgcgcggggggaataagagcggaggatacaagtattcaggtagtaatacgttgggaagcgtcgcttggcattgttataatagcggtaataaaacccatgaagtaggtacgaaagcgccgaatgaacttggtatctatgacatgagcggcaacgtgtgggagtggacaggcgattggtatggagattacggttcggatgcgcagactaatcctatagggccgtcaacgagctctcaccgcgtgccgcggggcggtggttggtacggcgacgaggggtactgccgtgtctcgtctcgctacggctactaccccgacgcccgcttcagcttcttaggcttccgccttgctgtttccccctag

SEQ ID NO: 68782 - protein, 281 aa, Unknown
  Obtained from environmental sample
  SIGNAL (1)...(21)
  DOMAIN (58)...(279): Domain of unknown function (DUF323)
  misc_feature (1)..(281): Xaa is any amino acid
MRKLILTTAAVAAAIGLAGCSKTPTPKSVSATPDTAALSVDTPPADASAFSETAVGGQSFEMAFVAGGTFTMGCAAEQDSDCDDDERPAHSVTLSDYYIGKREVTQGLWKAVTGGNPSHFTRSDNLPVESVSWNEVNAFIDKLNRKTGRTYRLPTEAEWEYAARGGNKSGGYKYSGSNTLGSVAWHCYNSGNKTHEVGTKAPNELGIYDMSGNVWEWTGDWYGDYGSDAQTNPIGPSTSSHRVPRGGGWYGDEGYCRVSSRYGYYPDARFSFLGFRLAVSP

SEQ ID NO: 68783 - DNA, 573 bp, Unknown
  Obtained from environmental sample
  misc_feature (1)..(573): n is a, c, g, or t
ttggatataacttntgttcttttccccataagtattcttgttgctcaagtgatttctttgccttttggtcatagtgtatcacaatttaaatttgttgaaaacatgtctttttctgccggcatttttcccgcatggtttttacttataatcgctcctatattggaggaatttggctggcatacttacggaatacattgtttgagaaaccgccttaacctattaatgacttgtgtaatatttggtatagcatggggaatttggcatatgccgttatcatttgtaaaaggatattatcaaaatgtattagttgaaactggtataatttattcaataaattttatggcaagtcttattccatatcttattatagggaattggatgtattacaagacaaacaggaatatgtttttagtggttgtttttcatttattggcagggttttcaaatgaaattttccaaacgcatcctgatagtaaggttatacaaacagtattattattgatattgtcggtaataattatttgcaaagaaaaagtatttttctttaataaatcgcatgaagaaatattgtaa

SEQ ID NO: 68784 - protein, 190 aa, Unknown
  Obtained from environmental sample
  misc_feature (1)..(190): Xaa is any amino acid
MDITXVLFPISILVAQVISLPFGHSVSQFKFVENMSFSAGIFPAWFLLIIAPILEEFGWHTYGIHCLRNRLNLLMTCVIFGIAWGIWHMPLSFVKGYYQNVLVETGIIYSINFMASLIPYLIIGNWMYYKTNRNMFLVVVFHLLAGFSNEIFQTHPDSKVIQTVLLLILSVIIICKEKVFFFNKSHEEIL

SEQ ID NO: 68785 - DNA, 1518 bp, Unknown
  Obtained from environmental sample
  misc_feature (1)..(1518): n is a, c, g, or t
atgcgagatatacaagattttgattcgataatgatacggctggcttcacctgatatgatcaggtcgtggtcttacggcgaagtaaaaaaacccgagacgattaactatcgtactctgcgcccggaaaaggaaggtcttttctgcgagcgtatctttggaactaccaaagaatgggaatgttactgcggaaaattcaaatcgatccgttacaagggcgttatctgcgaccgttgcggcgtcgaagttacgcactttaaggtgcgccgtgaaagaatggggcacattgaattagccgctcccgtttcgcatatctggtactaccgttcagtccccagcagaatgggtcttctcctcgaccttcccacaggtcagcttcgttccgttctttactatgaaaaatatatcgtcatagattcaggcgacaccaacctgaaaaaaggtcagcttctttccgaagaggaatactacgaagcgcaggaacgtttcggcggcggctttacagccggaatgggagccgaagcgatcagcgtcttgctggaaaaccttgaccttgatcaaatggcggcagaccttcgggcgaaaatgatcgagaagggcgcaaagacagataaacgtcttcttaaaagaatcgacattgtagaaaatttccgtaactcaaacaacaaacctcagtggatgatcctcacggtaattcccgtaattcccccggaactgcgcccgatggttcagcttgacggcggacgttttgccacaagcgatcttaacgatctttaccgcagggtaattaacaggaacaaccgtcttaaaagactgcaggcccttaacgcgccggaaattattatccgcaacgaaaagcgtatgctgcaggaagcggtagacgcgttattcgacaattccaagaaaaagaaagtggtaaaaggttcgtccaacaggccgcttaaatctatcagcgacatgctcaagggcaaacaggggcgtttccgccagaacctgctcggaaagcgcgttgactattcggggcgttcggtaattacagtcgggccggatctgcgaatgtggcagtgcggcattcccacaaagatggcgcttgaattgtttaagccctttataatgaaaaaacttgtagacaaggacgttgtctttaatattaaaaaagcaaagatgcttgtagagcaggaaacacccgaagtcttcgccattcttgacgaagttgtaaaagaacacccggtgcttcttaaccgcgcccctaccctccacaggcttggtattcaggcttttgaacccgtgctggtagaggggaaagcgataaaactgcatccgcttgtctgtcacgcttttaacgcggactttgacggcgaccagatggcggttcacgtcccgcttactcaggcggcccagatggaatgctggacgctcatgctttccgcgcgcaacctccttaaccccgccaacggcaagacaatagtgttcccgtctcaggacatggttttggaatcaactcttctcggccgattctga

SEQ ID NO: 68786 - protein, 505 aa, Unknown
  Obtained from environmental sample
  DOMAIN (333)...(475): RNA polymerase Rpb1, domain 2
  misc_feature (1)..(505): Xaa is any amino acid
MRDIQDFDSIMIRLASPDMIRSWSYGEVKKPETINYRTLRPEKEGLFCERIFGTTKEWECYCGKFKSIRYKGVICDRCGVEVTHFKVRRERMGHIELAAPVSHIWYYRSVPSRMGLLLDLPTGQLRSVLYYEKYIVIDSGDTNLKKGQLLSEEEYYEAQERFGGGFTAGMGAEAISVLLENLDLDQMAADLRAKMIEKGAKTDKRLLKRIDIVENFRNSNNKPQWMILTVIPVIPPELRPMVQLDGGRFATSDLNDLYRRVINRNNRLKRLQALNAPEIIIRNEKRMLQEAVDALFDNSKKKKVVKGSSNRPLKSISDMLKGKQGRFRQNLLGKRVDYSGRSVITVGPDLRMWQCGIPTKMALELFKPFIMKKLVDKDVVFNIKKAKMLVEQETPEVFAILDEVVKEHPVLLNRAPTLHRLGIQAFEPVLVEGKAIKLHPLVCHAFNADFDGDQMAVHVPLTQAAQMECWTLMLSARNLLNPANGKTIVFPSQDMVLESTLLGRF

SEQ ID NO: 68787 - DNA, 2544 bp, Unknown
  Obtained from environmental sample
  misc_feature (1)..(2544): n is a, c, g, or t
atgcccggcgaatcaattacggttgatcaggcggataaagatttaacgggaatgtttttctcggatcgccgctacgatctcggcaaagtgggacgctataaattaaataaaaagttcagcctcgatcttcccacaaataaatttactcttaccattgacgatattatcgctaccatgaagcaccttattaaagtgtatgtcggcgatgaaattattgacgatatcgatcatcttggaaacaggcgtatacgttctgtcggcgaattaatggcgaaccaaatgaaaaccgcattcagccgaatggagcgcattgcaaaagaaagaatgagtttgaaagagaccgatacaattaaaccgcaggaattaatttccattaaaccgattgtcgcggctatcaaagaatttttcgggtcgagccagctgtcccagtttatggatcaggtaaatccgcttgcggaacttacgcataaaagaaggcttaacgctctcggtcccggcggtctttcacgagacagagcgggttttgaagtgcgtgaaattcattacacccactacggcagaatgtgcccgattgaaactcccgaaggaccgaatatcggtcttattgtttcactggcgaattacacccgtgttaatgaatacggatttttggaaacgccgtatcgtaaagtaaacaaaggcatcgctacaaaagatatcgagtatctttcagcgatggacgaagataaatattacatcgctcaggcttcggcgaaggtaaacgataacggctctttcgccgacgatcaaatttcctgccgaagtaagggcgattacattaccagagcgcctgaagaaattcagtacatggacgtttctccgaaacagattatttccgtttctgcctcgctcattccgttccttgaacacgacgacgcaaaccgcgccttgatgggctccaatatgcagaggcaggcagtgcctctggttttcccggaagcgccccgtgtcggtacgggaatggaagtgaagtgcgcctacgattcgggcgttcttgtaaaagcgcgcagagcgggcactgttcttcgagtaacgtcgcaggaagtaattgtaaagcctgaaagagcgggaaatgtaaaaccggcggcgcaggtttcgttagacgaaaacggcaacgatgtttatcagcttatcaaattccaaagaaccaatcaggacacttgtttcaatcaacgccccattgttaaagcgggcgaaaaaattgtaagcggacaggtaattgccgacggtcccgctacccaaaacggagaactagctcttggaagaaatatccttgtaggctttatgccgtggaacgggtacaactatgaggactcgatacttatctctcagcgtgttgtaaaagatgatatgtttacttcaatacatatcaaagaatttgttgtcgaagtaagggaaacaaaacttggtcccgaaaaaattacccgtgatattcccaacacttcggaaaaaagccttgataacatggacagcgaaggcattatccgcattggagcgaaagtgcgctccggcgatatattggtcggcaaagttacgccgaaaagcgaaactgagaccacgccggaattcaaactgctcaattcaatcttcggcgagaaggcgaaagaagtgcgcgacacttcgcttaaagttccgcacggaattgacggaacggttatcgacattcagcggcttaaacgcacggatcatgactcattgagtcccggcgttgatgaagttgtaaaagtgcttatcgccacaaagcgcaaactgcgtgagggcgataaaatggcgggtcgccacggtaacaagggcgttgtcgctcgtattctgccggaagaagatatgccgtttatggaagacggaacgccgttggatatttgtttaacgccgctcggcgttccctctcgtatgaatatcggtcagcttttggagacggaactcggctgggctggctctacgcttgacgaatggtattcaacgcctgtgttccaatcgccgtctaccgaacaaattgaggtaaaacttaaagaagccgggcttcctttaaccagcaaggcgacattgaaagacggaagaacaggcgaagaatttgtaaatcagattttctgcggaataatctacttccttaaattgcaccaccttgtcgacgacaagatgcacgcccgttcaacaggtccgtactcgcttgttacacagcagccgttgggcggaaaagcgcagttcggcggtcagcggttaggtgaaatggaagtatgggcgcttgaagcgtacggcgctgcgaatacattgcaggaacttttaacgattaagtcggacgatatgacaggacgctccaagatttacgaggcgattgtaaagggagaaccttcaacgaccgccggtattcccgaatcgtttaacgtactggttcaggaattgcggggtcttgcgctggacttgtcaatctttgacgtaaaaggaaaacaaataccgctcaccgaaaaagatgaggaattaataactaagtcgggaagtaatttctaa

SEQ ID NO: 68788 - protein, 847 aa, Unknown
  Obtained from environmental sample
  DOMAIN (143)...(212): RNA polymerase Rpb2, domain 3
  misc_feature (1)..(847): Xaa is any amino acid
MPGESITVDQADKDLTGMFFSDRRYDLGKVGRYKLNKKFSLDLPTNKFTLTIDDIIATMKHLIKVYVGDEIIDDIDHLGNRRIRSVGELMANQMKTAFSRMERIAKERMSLKETDTIKPQELISIKPIVAAIKEFFGSSQLSQFMDQVNPLAELTHKRRLNALGPGGLSRDRAGFEVREIHYTHYGRMCPIETPEGPNIGLIVSLANYTRVNEYGFLETPYRKVNKGIATKDIEYLSAMDEDKYYIAQASAKVNDNGSFADDQISCRSKGDYITRAPEEIQYMDVSPKQIISVSASLIPFLEHDDANRALMGSNMQRQAVPLVFPEAPRVGTGMEVKCAYDSGVLVKARRAGTVLRVTSQEVIVKPERAGNVKPAAQVSLDENGNDVYQLIKFQRTNQDTCFNQRPIVKAGEKIVSGQVIADGPATQNGELALGRNILVGFMPWNGYNYEDSILISQRVVKDDMFTSIHIKEFVVEVRETKLGPEKITRDIPNTSEKSLDNMDSEGIIRIGAKVRSGDILVGKVTPKSETETTPEFKLLNSIFGEKAKEVRDTSLKVPHGIDGTVIDIQRLKRTDHDSLSPGVDEVVKVLIATKRKLREGDKMAGRHGNKGVVARILPEEDMPFMEDGTPLDICLTPLGVPSRMNIGQLLETELGWAGSTLDEWYSTPVFQSPSTEQIEVKLKEAGLPLTSKATLKDGRTGEEFVNQIFCGIIYFLKLHHLVDDKMHARSTGPYSLVTQQPLGGKAQFGGQRLGEMEVWALEAYGAANTLQELLTIKSDDMTGRSKIYEAIVKGEPSTTAGIPESFNVLVQELRGLALDLSIFDVKGKQIPLTEKDEELITKSGSNF

SEQ ID NO: 68789 - DNA, 336 bp, Unknown
  Obtained from environmental sample
  misc_feature (1)..(336): n is a, c, g, or t
atgtcgataaccgttccgtcaattccgtgcggaactttaagcgaagtgtcgcgcacttctttcgccttctcgccgaagattgaattgagcagtttgaattccggcgtggtctcagtttcgcttttcggcgtaactttgccgaccaatatatcgccggagcgcactttcgctccaatgcggataatgccttcgctgtccatgttatcaaggcttttttccgaagtgttgggaatatcacgggtaattttttcgggaccaagttttgtttcccttacttcgacaacaaattctttgatatgtattgaagtaaacatatcatcttttacaacacgctga

SEQ ID NO: 68790 - protein, 111 aa, Unknown
  Obtained from environmental sample
  misc_feature (1)..(111): Xaa is any amino acid
MSITVPSIPCGTLSEVSRTSFAFSPKIELSSLNSGVVSVSLFGVTLPTNISPERTFAPMRIMPSLSMLSRLFSEVLGISRVIFSGPSFVSLTSTTNSLICIEVNISSFTTR

SEQ ID NO: 68791 - DNA, 810 bp, Unknown
  Obtained from environmental sample
  misc_feature (1)..(810): n is a, c, g, or t
atgaagcttgaatttgagcattacaccttcgacgaagaaaatatcaaagtaaccgaatttgaatgtaaacaaaaaggtcttaattacgccgtccctcttaaagccagaataaatcttgtttttcagcagaccggagaaatccgccagaaagatatttacatgggcgatattcccctcatgacagagagaggaacatttatcatcaacggagcggagagagttgttgtttctcagatacaccgctcgcccggcgttattttcagccatgaaaaaggaattttttcatcgcgtattattccttatcgcggcagttggatcgaatttgaaatcgatcagaagcgcgatttaatttacacgaagattgacagaaaaaaaagaattctcggaacaattttccttcgggcgcttgggttctcttcaagagaagaaataatcgaagcgttttatgttaccgaaactttaaaaataaaagacgaccgcgagacaaaagaaaaaatttccggcatggttcttgccaagcctgtaatgattaaagatgaaagcagttctaaaggcgcggaaaaagttctttacagagccggcgaaaaacttcatccgcataatgttgatgagcttataaatcacggaattaaatctatttgttatattgattttgaagccgaaggttctcttaactcgccgatgattcttaattgttttgaacgcgaggatattaaatttgtaaaagaagccggaagcgagccagcgaaagacgacgcattaatggctgttttattcggtattaatgcccggcgaatcaattacggttga

SEQ ID NO: 68792 - protein, 269 aa, Unknown
  Obtained from environmental sample
  DOMAIN (1)...(269): RNA polymerase beta subunit
  misc_feature (1)..(269): Xaa is any amino acid
MKLEFEHYTFDEENIKVTEFECKQKGLNYAVPLKARINLVFQQTGEIRQKDIYMGDIPLMTERGTFIINGAERVVVSQIHRSPGVIFSHEKGIFSSRIIPYRGSWIEFEIDQKRDLIYTKIDRKKRILGTIFLRALGFSSREEIIEAFYVTETLKIKDDRETKEKISGMVLAKPVMIKDESSSKGAEKVLYRAGEKLHPHNVDELINHGIKSICYIDFEAEGSLNSPMILNCFEREDIKFVKEAGSEPAKDDALMAVLFGINARRINYG

SEQ ID NO: 68793 - DNA, 534 bp, Unknown
  Obtained from environmental sample
  misc_feature (1)..(534): n is a, c, g, or t
atgacggaaaaatcgctgtttgccggattcggagggcaggggataatctctatgggccagctttgggtctattttgccatgcaggaggggaaaaacgttacattcttcccgttttacggcgctgaaaagcgcggaggcgtcgccagagcgggcgtaattgtgtccgatgaggaaatagcaagccctttggtgacaatgccggactcaaccctcgttatgaacagtgattctctccctgtttgcgaaaaaattgtcaaagaaaacggcctaatactgttaaattccagtcttgtaaaggaagaacctacccggaaaggcttaaaaatcgctaaaattgaggctacgggcattgccgaacagattggaaacctcgtttttgccaatatggtggctctcggagccatggtaaagctaaccggagccatgaaattagccgatattgaaggtatgttgatgaaatttttcccgccggataaacatcaatatgttccgatgaatgttaaggcgatacaggcggggtatcaagccgtatag

SEQ ID NO: 68794 - protein, 177 aa, Unknown
  Obtained from environmental sample
  DOMAIN (11)...(175): Pyruvate ferredoxin/flavodoxin oxidoreductase
  misc_feature (1)..(177): Xaa is any amino acid
MTEKSLFAGFGGQGIISMGQLWVYFAMQEGKNVTFFPFYGAEKRGGVARAGVIVSDEEIASPLVTMPDSTLVMNSDSLPVCEKIVKENGLILLNSSLVKEEPTRKGLKIAKIEATGIAEQIGNLVFANMVALGAMVKLTGAMKLADIEGMLMKFFPPDKHQYVPMNVKAIQAGYQAV

SEQ ID NO: 68795 - DNA, 819 bp, Unknown
  Obtained from environmental sample
  misc_feature (1)..(819): n is a, c, g, or t
gtgcggaattatccccacggaagaagaagtattcgaaaaggtaaaggaaatattaaagaaatgaaaaaattattgggatatcctgaaagtttaactaaagtgcagacaaagtactgcggcggctgcgggcatggaataatccacagggttattacaagcgtaatagatgaaatgggtttaagggaaagggcaataatcacaaacccggtaggatgcgctgtctgggcggatctgtattttgattttgactccgttcagcccccgcacggcagaactcccgcggcggcgacgggaattaagcgcgttcatcctgatcatcttgttatctgctatcagggagacggggacatggccgccatcggaactgcggaaatgatccacgcggctaatcgcgctgaaaaatttaccactatatttgtgaacaacgcgatttacggcatgacgggcgggcaaatggcgcccacaaccctgcttggccagaaagcgactaccgcccccaggggacgggacgcggaggaagccggcatgggctatccaatcaaagtagcggaacttctcgcgtcgctggacgggacgcgctatatcgccagaggcgcggtaaacaacgccgtcaatatacgcaaggttaagcagtatataaagaaggcttttgaagctcaaatggcgggttttggaagcactataatagaagttctttctccctgcccgacaaactggactatggatcccattcaagctgtcgaatggctggaaaagaacatgattcccgtattcccgcttggagagattaaaaacacgttagacggaggctcaaaatga

SEQ ID NO: 68796 - protein, 272 aa, Unknown
  Obtained from environmental sample
  DOMAIN (69)...(231): Thiamine pyrophosphate enzyme, C-terminal TPP binding domain
  misc_feature (1)..(272): Xaa is any amino acid
MRNYPHGRRSIRKGKGNIKEMKKLLGYPESLTKVQTKYCGGCGHGIIHRVITSVIDEMGLRERAIITNPVGCAVWADLYFDFDSVQPPHGRTPAAATGIKRVHPDHLVICYQGDGDMAAIGTAEMIHAANRAEKFTTIFVNNAIYGMTGGQMAPTTLLGQKATTAPRGRDAEEAGMGYPIKVAELLASLDGTRYIARGAVNNAVNIRKVKQYIKKAFEAQMAGFGSTIIEVLSPCPTNWTMDPIQAVEWLEKNMIPVFPLGEIKNTLDGGSK

SEQ ID NO: 68797 - DNA, 1089 bp, Unknown
  Obtained from environmental sample
  misc_feature (1)..(1089): n is a, c, g, or t
atgggcgaaaaagttttaatgaagggaaatgacgccatcgccgaagccgcgataagggcgggctgcggcgcgtactttggttatccgatcacgcctcaaaacgaacttattgcctacatggcgaaacacatgctcgaccgcggacggatttttattcaggcggagagcgaagtcgccgccattaacatggtgttcggcgcttcgtgcgcgggagtgcgcgcgatgacaagttcttccagcccgggcgtcagcttaaaacaggaaggaatgtcctacgccgccggcgctgacgttccccttgtcatggtaaacgtaaaccggggcggccccggcctcggcaacatcgcgcctgcgcagagcgattatcttcagtctacgcggggcggcggccacggcgattaccactgcatagtgctcgctcccaagagcgtgcaggaatgcgccgaccatacctacctcgcgtttgatctggcggacaagtaccgtatgcctgtcatcgttctcgcggacggacttatcggccagatgatcgaaggcgtcgttctgccgccggaaattaatccgcccaaaagaaactgggctgtcggcaacatgaaggatagaaccggagcggataaagcttctcgtcacataacatcgatagagcttgttccggaaaaacttgaagctataacaaagaaccgctttgtccgttacgagaaagttaaagaggcggaaatccgttacgagaataacggatgtaacggcgccgaccttgttatggtcgcgtacggaacctgcgccagagtttgtctgggcgcgcagacgctggcaaaaaaagagggaattaaactcggcattttcaggcctattactctttggcctttcccctacgacgctttgggaaaatatatatcggaaggaaaaagtattttatcggtggaaatgtcgctgggtcagttaattgaggatgtaaaactttcggcttacgaagcctttgttaaatcgaacggcgctaaagccgacattcatcttttgggtcacgcgtgcggaattatccccacggaagaagaagtattcgaaaaggtaaaggaaatattaaagaaatga

SEQ ID NO: 68798 - protein, 362 aa, Unknown
  Obtained from environmental sample
  DOMAIN (15)...(234): Pyruvate flavodoxin/ferredoxin oxidoreductase, thiamine diP-binding domain
  misc_feature (1)..(362): Xaa is any amino acid
MGEKVLMKGNDAIAEAAIRAGCGAYFGYPITPQNELIAYMAKHMLDRGRIFIQAESEVAAINMVFGASCAGVRAMTSSSSPGVSLKQEGMSYAAGADVPLVMVNVNRGGPGLGNIAPAQSDYLQSTRGGGHGDYHCIVLAPKSVQECADHTYLAFDLADKYRMPVIVLADGLIGQMIEGVVLPPEINPPKRNWAVGNMKDRTGADKASRHITSIELVPEKLEAITKNRFVRYEKVKEAEIRYENNGCNGADLVMVAYGTCARVCLGAQTLAKKEGIKLGIFRPITLWPFPYDALGKYISEGKSILSVEMSLGQLIEDVKLSAYEAFVKSNGAKADIHLLGHACGIIPTEEEVFEKVKEILKK

SEQ ID NO: 68799 - DNA, 477 bp, Unknown
  Obtained from environmental sample
  misc_feature (1)..(477): n is a, c, g, or t
atggaaataatgtttattttcttgacttccaaaatggcaattcgtaatttatataatggggttaaaaaaatgggaaatacgacaaatattctcattacctcaaataataatgaggattttcaatgtattcttgattcgcttaacagccaaagcagcttaaatataatcgacattgaaaatgatgaagccgatacaataataaaatccgaaaaattaaaacctgacgtactaatcctggacttaatacagtcagcaatggacggaacggaacttgcgcctattattcacagaaaatcgcccaatacagctatcatcatgatatgcgataaagatgaaaatgaatatgccggaaaagcgctcaaggcgggaatactcggctatatgctgagaaatgaggatttgaacaaaatactatacgttgtaagaatagtatctctgggcgggtactttatcagcgcttcattancaccaggataa

SEQ ID NO: 68800 - protein, 158 aa, Unknown
  Obtained from environmental sample
  DOMAIN (28)...(142): Response regulator receiver domain
  misc_feature (1)..(158): Xaa is any amino acid
MEIMFIFLTSKMAIRNLYNGVKKMGNTTNILITSNNNEDFQCILDSLNSQSSLNIIDIENDEADTIIKSEKLKPDVLILDLIQSAMDGTELAPIIHRKSPNTAIIMICDKDENEYAGKALKAGILGYMLRNEDLNKILYVVRIVSLGGYFISASLXPG

SEQ ID NO: 68801 - DNA, 600 bp, Unknown
  Obtained from environmental sample
  misc_feature (1)..(600): n is a, c, g, or t
atgagttctacccccgaactggttgtggacgaagaaaaaatcaaaaaagccatacagtccggtcttccgcttacaattaccacttatactcaccccaaagagatagaaatttacattgagcaagtcatagattcgtttctaaaacacatgaatcaaatgaaacttcgggattatatcgtctattgcgtacaggaacttgtagtaaacgcgaaaaaggccaacacaaaacgtgtatattttgcggaacgcggtttagatattaacaatgacggcgattacgttcttggaatgaaggactttaaagaagacacgataagtaacatatcccattatctgcaattacaaaaagaaaaaggtctttatataaaaattattttacaagtgaaaagaaatacaattcttatagaaatacgcaacaacgttacggcaaataaaatggaacaactgcgtattcaggataaaatggcgcgttcaagacaattcggcagtttggaagacgcattatctcaggttcttgatgattctgaaagcgcgggtcttggacttgtaatcctggtactcatgctgaaaaaaaggggaattgacgatgacgctttttga

SEQ ID NO: 68802 - protein, 199 aa, Unknown
  Obtained from environmental sample
  misc_feature (1)..(199): Xaa is any amino acid
MSSTPELVVDEEKIKKAIQSGLPLTITTYTHPKEIEIYIEQVIDSFLKHMNQMKLRDYIVYCVQELVVNAKKANTKRVYFAERGLDINNDGDYVLGMKDFKEDTISNISHYLQLQKEKGLYIKIILQVKRNTILIEIRNNVTANKMEQLRIQDKMARSRQFGSLEDALSQVLDDSESAGLGLVILVLMLKKRGIDDDAF

SEQ ID NO: 68803 - DNA, 603 bp, Unknown
  Obtained from environmental sample
  misc_feature (1)..(603): n is a, c, g, or t
gtgagcgaaaatgaaaaaccggtaacgttaaatagatgcgaatggtgtacaggcagcgaattgtacatggaataccacgataaagaatggggaacgccggtttttcatgatcgcaaacattttgaatttctggtgcttgagtcggcccaggccggtttaagctggattacaattttgaaaaagcgtgagaattaccgcttggcttacgatggctttgatcctgaaaaagtagcccgttacggagaaaagaagaaagcggctcttctggctaactcgggaataattcgtaaccgcttaaagattgaggcttctataaacaacgccgcgcgttttctggaaattcaagaggaatgggggagtttttcggattatatttggtcattttccaaaaataaggcaattaagggaaaatggaaaacccttgaagagattcccgccaaaacagaactgtctgaccgtgtcgcggcggatttgaaaaagcgcggctttaagtttcttggcagtacaataatatactcacatttgcaggcaacaggcgttgtaaatgatcatattgtaagctgtttcagatataaggaattgggtaacccgggatctttatag

SEQ ID NO: 68804 - protein, 200 aa, Unknown
  Obtained from environmental sample
  DOMAIN (15)...(193): Methyladenine glycosylase
  misc_feature (1)..(200): Xaa is any amino acid
MSENEKPVTLNRCEWCTGSELYMEYHDKEWGTPVFHDRKHFEFLVLESAQAGLSWITILKKRENYRLAYDGFDPEKVARYGEKKKAALLANSGIIRNRLKIEASINNAARFLEIQEEWGSFSDYIWSFSKNKAIKGKWKTLEEIPAKTELSDRVAADLKKRGFKFLGSTIIYSHLQATGVVNDHIVSCFRYKELGNPGSL

SEQ ID NO: 68805 - DNA, 1245 bp, Unknown
  Obtained from environmental sample
  misc_feature (1)..(1245): n is a, c, g, or t
atggacgaggaacatgaagtaactcagtcgaatcaggacgtaactcagttgaaccaaggcgtagcaattctgtcgaacaaggaactgcgggctaaggctaggcggcagttgcggggtgtgtgggggcagatgattctcgcggtttttattttcggtctcatcagttccataccgtctactgtcgcgttaaaaataaacgagtcggtccaagcgaagattaccgcgattaccgtgggaatcgataaaaaaagtaaggagcgtatagggcggttgctgccactatttgaaaatatgataaaaagcggagaattatcagccgatgtggattccgcgcttacagaagagatagcgcgtcttcagagtgaattgtcaacctccgaagcggattccgcgattaaagaagagatggggcgcatgctgtcgtccctcaaaaaaagaggggctgtgcgcggcggatcaaattccggcgttgaggatacatcggaaagcgaaccgtttgatttaagttcgtcccaagatagtatacactattcgccgtggtcgcaaacaatgacgctagtaatgttagacttcttggggaaaaggactgataagctttctgtaaataaagactatattgctaacatattcgtcgagctattagttatactgttattatgtttggtcggatttacgatatacggcccgttcctactaggcatatccggctattttttaaaaagggttcgcgacaaagaaatagccgtaaaagatattttttgcggttttaagcgtttttggccgagtttttggctatactcttttacgacgctttttacattattgtgggcgctgttgctgataatcccaggaataataaagatgctaggctactctatggcattctacatcatgaacgataatcccaatataggttctcgtgaggctttaaagagaagtcaggctatggtgaaagggcataagtggaagttatttaagcttggattgagctttgcgggatggtttattcttgctatgatacctatgtttattgctgcgttaccgatagcagcgttgtctagttttacctcgagtttcgcggggtggtttattcttgatttattatcgttatcgttggtgggtttttatatactatccccgtacatgtttctttcaatggccaacttttatgaagacttgaaacaaaaacaggaaaagacgattgctaacggtataaataaggaaatcggtcaaaatccagaataa

SEQ ID NO: 68806 - protein, 414 aa, Unknown
  Obtained from environmental sample
  DOMAIN (188)...(397): Protein of unknown function (DUF975)
  misc_feature (1)..(414): Xaa is any amino acid
MDEEHEVTQSNQDVTQLNQGVAILSNKELRAKARRQLRGVWGQMILAVFIFGLISSIPSTVALKINESVQAKITAITVGIDKKSKERIGRLLPLFENMIKSGELSADVDSALTEEIARLQSELSTSEADSAIKEEMGRMLSSLKKRGAVRGGSNSGVEDTSESEPFDLSSSQDSIHYSPWSQTMTLVMLDFLGKRTDKLSVNKDYIANIFVELLVILLLCLVGFTIYGPFLLGISGYFLKRVRDKEIAVKDIFCGFKRFWPSFWLYSFTTLFTLLWALLLIIPGIIKMLGYSMAFYIMNDNPNIGSREALKRSQAMVKGHKWKLFKLGLSFAGWFILAMIPMFIAALPIAALSSFTSSFAGWFILDLLSLSLVGFYILSPYMFLSMANFYEDLKQKQEKTIANGINKEIGQNPE

SEQ ID NO: 68807 - DNA, 2280 bp, Unknown
  Obtained from environmental sample
  misc_feature (1)..(2280): n is a, c, g, or t
atgttgctataccgttacatagtaaaagaacacatattcccgttcttagcctcgttgagcatcatcgtcttcctgttcataatgcagcaggcgatactgatgttggacaagattgtgtccaagaacattgatcccatcatagtgcttgaggtgtttctcatacagcttggatggattttggcgctcggcataccgatggccgtcctctcctccgccctaatgacctttgggcgcatggccggcgacaacgagataacgtccatcaaggcctccggacgcggcatggcgacgctcgtggtaccggttatgtcggctgcggcggtggtgacggtggcgctcttcttcttccacgacctcgtcctgccggaggcgaaccaccgcgccgcgaatcttctcggcgacatctcccgtaagcgtccggcggcgttcatcgagccgggagtgctgatacgcgattttcaagattacgcgctatacgtggaggaggtcaacgcattgagcggcaacctgaagggcatccgcgtattcaccgataacccggggcaagacccgacggtaacggtggcggagagcggcaacatccgaatgacgagcgacggggagtacttagagttatcgcttttcaacggggagacgcacggcgcttcgcgtgaaaatagcaaggattacttcgtagccggtttcgagaagcaggtcgtctacataaaaaacgtggactcccgcctcgagcgtacttcgtccgacggccgcggggacagggagatgaccatagcggagttgttgagcgaagttcgcgggataaaggaggcaaacgcgcaattaatggcggagcgtttgcaaacgcttgattcgatagaggccataaagactcggataagcgcggattccgccgaatcggcggacgaatcgacggtatcagcaaagcctgtgaatcctaaagttaatgacgagtcggccgtttcatcacaattaataaaaagggcgcaacggattgaccgcaggtcaacaaaccgcctagacctatatgaaggccgcatcgaccaaatatcaaagaatcaaaaggccaacaacgccgttatcgcgcaatatatggtggaggttcacaagaagttcgctattccggcggcttgcctgattttcgtgctaatcggggcgccgcttgggataatggcgcgtcgcggcgggcttgccgtgggggcgagctactcggtattcttcttcatcatgtactgggtcttcctgatcaccggcgagaatctggcggataggatgatcatcgcgccggccgtcgccatgtgggcgggcaacgtctttttgggtctctgncgcgtggttctcattgtgctgatgactcgcgagacgactatcagcttcggatttcttaaggtctatttagggaagctgtcgccatttttcaggcggctttcaaacgtttgggtattccgtttgccgggtatgctgtcgcgctttccgcgaaggctcctgattatggctacggggacgcttcccggctacctcatcgggatatttttgggctacgcggtcggtcttttggcggcgcacatcgtgatcttcgtcaccatagattacgtgagcagcatacggaagttcgatagcgccgctttcagtcaggtcattctctactattggtacttcctgccgcacataatccagacgatgctccccatagtcctatttctctcgtcgatgttctccgtgggcaggctcgccaagtccagcgagcttacggcgatgaaggccgccggggtgaacgtgcggcagctgaccatgccgctgatgcttctcgggctattgctaaccggcgtggttttctacggcggggagatggtgcttccgcgcgccaacgagcggcgggcactgctcaacgcctccttcggcggcaagccggcgattccgcaggagagcgcgaacgccaatgccgcggcgcaggcgcagggcgcggccgttgtgcgcgagtaccgccggaatttcttctacttcgccgcgccaaacgtcatgtacagtttcaatgagttctgcacgaacccgcagttcttccgcggcgtacggcgctacgctttcacgccaagcgggctgcgtgagcgcatagacgcggcggaggcggaattcgacaacgcggggtggcgctttgtgaacggcgaggctcgaactttcgcgtcggagaatctgaccgcaaacagctttgataccctgccggacagcgttcttacggcccttcccgcagacattgtgaagcggttaagtcaaaggaggccatga

SEQ ID NO: 68808 - protein, 759 aa, Unknown
  Obtained from environmental sample
  DOMAIN (5)...(449): Predicted permease YjgP/YjgQ family
  misc_feature (1)..(759): Xaa is any amino acid
MLLYRYIVKEHIFPFLASLSIIVFLFIMQQAILMLDKIVSKNIDPIIVLEVFLIQLGWILALGIPMAVLSSALMTFGRMAGDNEITSIKASGRGMATLVVPVMSAAAVVTVALFFFHDLVLPEANHRAANLLGDISRKRPAAFIEPGVLIRDFQDYALYVEEVNALSGNLKGIRVFTDNPGQDPTVTVAESGNIRMTSDGEYLELSLFNGETHGASRENSKDYFVAGFEKQVVYIKNVDSRLERTSSDGRGDREMTIAELLSEVRGIKEANAQLMAERLQTLDSIEAIKTRISADSAESADESTVSAKPVNPKVNDESAVSSQLIKRAQRIDRRSTNRLDLYEGRIDQISKNQKANNAVIAQYMVEVHKKFAIPAACLIFVLIGAPLGIMARRGGLAVGASYSVFFFIMYWVFLITGENLADRMIIAPAVAMWAGNVFLGLXRVVLIVLMTRETTISFGFLKVYLGKLSPFFRRLSNVWVFRLPGMLSRFPRRLLIMATGTLPGYLIGIFLGYAVGLLAAHIVIFVTIDYVSSIRKFDSAAFSQVILYYWYFLPHIIQTMLPIVLFLSSMFSVGRLAKSSELTAMKAAGVNVRQLTMPLMLLGLLLTGVVFYGGEMVLPRANERRALLNASFGGKPAIPQESANANAAAQAQGAAVVREYRRNFFYFAAPNVMYSFNEFCTNPQFFRGVRRYAFTPSGLRERIDAAEAEFDNAGWRFVNGEARTFASENLTANSFDTLPDSVLTALPADIVKRLSQRRP

SEQ ID NO: 68809 - DNA, 339 bp, Unknown
  Obtained from environmental sample
  misc_feature (1)..(339): n is a, c, g, or t
atgagctattgggagctgtctaaccacatagaggcggcaaagcataggggcgagaaggtggaaaagttcatggcggagctgcagttcaaaatcgcgctgccttttatgaacttcatcgtaatcctattcgggctctccctcgcctgccgcgccggacgtcgtggcggggcggcgctcttcggagtggggctgctgctttcgttcttatattggatgctcagccgctttgcgctcgtcttcgcgcaaaacggatatttgccgacacttgtgggagcgtgggtcggtaatgtaattttctttatagtggggctcgtactatacagaaaggccgcgcactga

SEQ ID NO: 68810 - protein, 112 aa, Unknown
  Obtained from environmental sample
  misc_feature (1)..(112): Xaa is any amino acid
MSYWELSNHIEAAKHRGEKVEKFMAELQFKIALPFMNFIVILFGLSLACRAGRRGGAALFGVGLLLSFLYWMLSRFALVFAQNGYLPTLVGAWVGNVIFFIVGLVLYRKAAH

SEQ ID NO: 68811 - DNA, 378 bp, Unknown
  Obtained from environmental sample
  misc_feature (1)..(378): n is a, c, g, or t
atgcctaagatactgattgtggacgacgaccacgccgcgctcgacctattggagctgtttttgtacagcgattacgaggtcgtcacggcgctaaacgggttcgacgggatgaccaaagccgagaaggaggtgccggatctcataatcaccgacatcacgatgccggtaatggacgggatacgcttcttcaacttagcgtctaagaacgaggcgatcaggcgtgtgcccatagtcgcggtcacctcatttgccgagggcgtaacggcgaagagcctaatcaacatgggtttttccggggtgatacccaagccgcttgaacgggggcttgtcttaactataatagccgatacgctgagggtggcggcggagaaatcatga

SEQ ID NO: 68812 - protein, 125 aa, Unknown
  Obtained from environmental sample
  DOMAIN (2)...(115): Response regulator receiver domain
  misc_feature (1)..(125): Xaa is any amino acid
MPKILIVDDDHAALDLLELFLYSDYEVVTALNGFDGMTKAEKEVPDLIITDITMPVMDGIRFFNLASKNEAIRRVPIVAVTSFAEGVTAKSLINMGFSGVIPKPLERGLVLTIIADTLRVAAEKS

SEQ ID NO: 68813 - DNA, 474 bp, Unknown
  Obtained from environmental sample
  misc_feature (1)..(474): n is a, c, g, or t
ttgagccccggtatttcacgccggacttggccggccgcatacgcgccctttacgcccaataattccgaacaacgctcgccccttacgtgttaccgcggctgctggcacgtaattagccggggcttattcacagacctttgtcaccggcagggcattccctggccgccttattctgcgcctgcaaaaggattttacaacctttcgaccttcctcatccacgcggcgtcgctccgtcagactttcgtccattgcggaatattcttagctgctgcctcccgtaggagtctgggccgtatctcagtcccagtgtggccgttcgccctctcaggccggctacccatcttcgccttggtgggcttttaccccgccaacaagctaatgggacgcgggcccatcccggggcggggccgtagcccctttcctcgccatgcctcggcatggcgaacgtattcggtattacccagctatttctaa

SEQ ID NO: 68814 - protein, 157 aa, Unknown
  Obtained from environmental sample
  misc_feature (1)..(157): Xaa is any amino acid
MSPGISRRTWPAAYAPFTPNNSEQRSPLTCYRGCWHVISRGLFTDLCHRQGIPWPPYSAPAKGFYNLSTFLIHAASLRQTFVHCGIFLAAASRRSLGRISVPVWPFALSGRLPIFALVGFYPANKLMGRGPIPGRGRSPFPRHASAWRTYSVLPSYF

SEQ ID NO: 68815 - DNA, 405 bp, Unknown
  Obtained from environmental sample
  misc_feature (1)..(405): n is a, c, g, or t
gtgcgccgcctggggagtatgcccgcaagggtgaaactcaaaggaattgacgggggcccgcacaagcggtggagcatgtggtttaattcgatggtacgcgaggaaccttacctgggtttgacatgggggcggatgcgtcagagatggcgcagcgtagcaatacgcgcccctgcaggtgctgcatggctgtcgtcagctcgtgccgtgaggtgttgggttaagtcccgcaacgagcgcaacccctaccgccagttaccagcagttaggctggggactctggcggaactgccggcgacaagctggaggaaggcggggatgacgtcaagtcatcatggcccttatgtccagggctacacacgtgctacaatggccggcacaaagcgaagcgagtccgagaggacatag

SEQ ID NO: 68816 - protein, 134 aa, Unknown
  Obtained from environmental sample
  misc_feature (1)..(134): Xaa is any amino acid
MRRLGSMPARVKLKGIDGGPHKRWSMWFNSMVREEPYLGLTWGRMRQRWRSVAIRAPAGAAWLSSARAVRCWVKSRNERNPYRQLPAVRLGTLAELPATSWRKAGMTSSHHGPYVQGYTRATMAGTKRSESERT

SEQ ID NO: 68817 - DNA, 336 bp, Unknown
  Obtained from environmental sample
  misc_feature (1)..(336): n is a, c, g, or t
gtgggtttacggtttcaggttctatttcactcccctcacaggggttcttttcgcctttccctcacggtacttctgcgctatcggtcgtatccagtatttagccttggatcgtggtcgacccggcttccgacagggtttctcgtgccccgccgtactcaggataccgctaccttattcccatcgtttcgcttacggggctttcaccctcttaggcaggctttcccaagcctttccgctacaatgaaaacaaagacatcgcggtccttcaaccccaccctaacgggtggtttgggctcttccgatttcgctcgccgctactttcggaatctctgttga

SEQ ID NO: 68818 - protein, 111 aa, Unknown
  Obtained from environmental sample
  misc_feature (1)..(111): Xaa is any amino acid
MGLRFQVLFHSPHRGSFRLSLTVLLRYRSYPVFSLGSWSTRLPTGFLVPRRTQDTATLFPSFRLRGFHPLRQAFPSLSATMKTKTSRSFNPTLTGGLGSSDFARRYFRNLC

SEQ ID NO: 68819 - DNA, 480 bp, Unknown
  Obtained from environmental sample
  misc_feature (1)..(480): n is a, c, g, or t
atgaatatcgacgcgctttctcttttctggacaagcaaagcgttcctgccttccatgatagaaagaaacactggtcacattgttaccatttcttcgtccgccggaattatcggcgtaaagggattgtcggattattgcgccgcaaaattcgccgctttcggctttgacgaatcactgcgtatggaactgcggcgcatgaaaagcgctataaaaacaacaatagtttgtccgttttttattaataccggaatgtttgaaggcgtaaagacgcgcttcccgcttgtcctgccgattcttaaaaaagaatatgttgtaaaaagaatagttaaagccgtattgaaaaaccaaaaaaggcttatcatgccgcgttttgtatattcggtgtattttctgcggcttctgcccctgaccgtaatggatgggatcgccgactttttcggcataagccacgcaatggacgacttcaaaggcagagcgtga

SEQ ID NO: 68820 - protein, 159 aa, Unknown
  Obtained from environmental sample
  misc_feature (1)..(159): Xaa is any amino acid
MNIDALSLFWTSKAFLPSMIERNTGHIVTISSSAGIIGVKGLSDYCAAKFAAFGFDESLRMELRRMKSAIKTTIVCPFFINTGMFEGVKTRFPLVLPILKKEYVVKRIVKAVLKNQKRLIMPRFVYSVYFLRLLPLTVMDGIADFFGISHAMDDFKGRA

SEQ ID NO: 68821 - DNA, 1482 bp, Unknown
  Obtained from environmental sample
  misc_feature (1)..(1482): n is a, c, g, or t
atgggaacgcaggaattatttaaacctaactcttacgtttattttgtcgggataaaagggacaggcgtctgcgcgcttgccgaacttgtgcataattccgggattaaagtttccggcagcgatatttccgaaaaattttatacagacgaaatattgcaagaacttaaaatcccgtactacgaagaattcgacgcaaaacatatcgataaaaatatcgatatgataatttattccgccgcgtacggcgcggatacaaatccggaactggaaagggcgcaggaacttaaaatccctatgcttaaatataccgacgctctcggcgcgtggtcggcaaaatttgactcgacaggcgtttgcggtgtgcatggaaaaaccacaaccacggcgatttgcggcgtaatgatgaaagccgcccgtcttcccgcgcagatacttgtcggaagcgcggtaattgatttcggcggcaggtcaacaatcagtctgggcgataaatattttatcgcggaaacctgcgagtaccgcaaacattttttgtcttttcatcccaaacggataattttaacctcggtggaaagcgatcatcaggattttttcccaacttatgaatcaatccgcgacgcgtttgtcgagtactgccgcctgcttcccgacggcggtcagttgatatattgcgccgatgatgcgggcgcgtgcgaggtcgcgaatattattaaaaatgataatcacggtatacaacttgttccgtacggtttcacggcagagggcgattataaaataaatttttataaagttgaaaacgaaaaaggcgttttttccgtcgcgggatttcccgaagaatttaatatgcgtattccgggaagacatcaggcattgaatacggcggcagggttagcgcttgcttcttcgctggcaaaaaatgacggcgcggcaagcggaaccgcgttaaacaaagaacaactggagtccgttaaagacgcgttgttaaattttaaaagcactaaacgccgaagcgaaatagtgggcgagacaggcggaataatttttatggacgattacggacatcaccccacggcgattaaaacaacgcttgcgggcattaaaagtttttatcctaaacggcggttaattgtaagttttatgtcgcatacatatacccgtacgtccgctttactcgacgaattttcaaattgttttaatgacgccgatattctttacctgcataaaatttattcctccgcaagagaaaattataagggcggagttaacggatttacgctctacgaaaaaacatccgcagttcgctccggcgcgggtaaaggacaaactttctataccgaagaaatagacgacgcgtttaagccgttaagtgaaactttaaaaagcggcgacatatttatcacgcttggggcgggaaacaactggcccctcggcgttaaactttttaaatattttagttctaagaatgaggaaaaacatggttag

SEQ ID NO: 68822 - protein, 493 aa, Unknown
  Obtained from environmental sample
  DOMAIN (116)...(300): Mur ligase middle domain
  misc_feature (1)..(493): Xaa is any amino acid
MGTQELFKPNSYVYFVGIKGTGVCALAELVHNSGIKVSGSDISEKFYTDEILQELKIPYYEEFDAKHIDKNIDMIIYSAAYGADTNPELERAQELKIPMLKYTDALGAWSAKFDSTGVCGVHGKTTTTAICGVMMKAARLPAQILVGSAVIDFGGRSTISLGDKYFIAETCEYRKHFLSFHPKRIILTSVESDHQDFFPTYESIRDAFVEYCRLLPDGGQLIYCADDAGACEVANIIKNDNHGIQLVPYGFTAEGDYKINFYKVENEKGVFSVAGFPEEFNMRIPGRHQALNTAAGLALASSLAKNDGAASGTALNKEQLESVKDALLNFKSTKRRSEIVGETGGIIFMDDYGHHPTAIKTTLAGIKSFYPKRRLIVSFMSHTYTRTSALLDEFSNCFNDADILYLHKIYSSARENYKGGVNGFTLYEKTSAVRSGAGKGQTFYTEEIDDAFKPLSETLKSGDIFITLGAGNNWPLGVKLFKYFSSKNEEKHG

SEQ ID NO: 68823 - DNA, 939 bp, Unknown
  Obtained from environmental sample
  misc_feature (1)..(939): n is a, c, g, or t
ttggggcgggaaacaactggcccctcggcgttaaactttttaaatattttagttctaagaatgaggaaaaacatggttagtatgacaggttacgcgtaccgcgaaaaatcagggcaggaattatcggtctctgtggaaattaaaggctgtaacagccgctatctggaaatatccgtaaatcttccgccgtggctttcaatgctggaaatgaagatccgcgaaaaaatttcatcggactgcggcagggggaaagtcgatatttttgtccgcctcagggagcataacgcgcctgtcaatatcagcgtgaataaaaacgcggcaaaagcttattacaacgcgattaatgaaatggcgaaagaactcggcgtaaaagaaaaacccgccctgtctgcaattttgggaatggaaaatgttttagagatagaaaaaaaccgcgatgaagaacgctattggcgtgaaattgaaccgctgttgaatgaggctgttaaaattttttgcgaggagagggagagagagggcaagcatacgcaggacgatattatttctcatcttggagaaatagaatcgtcattaaaaaaagtttcctcgtttgctcccgtgattgagcaaactttaaaagaaaatattaaaacgcggtttgcggaattgcttgggaatcagattgatgaaaacaggatacttgccgaaacagcgtctcagcttttaaagtatacaatttccgaggaaatctcccgtcttacatctcaccttgcggaattcaaggcggagaccgaaaaaaatccgcgaccgggtaaaaaactggattttctttgtcaggaaattaaccgcgaggtcaacacaatcggttcaaaaagcgctataattgaagtaaccaatgaagttgtaaaaatgaaagaaacgctggaaaacataagagagcagttaaggaatattgaataa

SEQ ID NO: 68824 - protein, 312 aa, Unknown
  Obtained from environmental sample
  DOMAIN (225)...(312): Domain of unknown function (DUF1732)
  misc_feature (1)..(312): Xaa is any amino acid
MGRETTGPSALNFLNILVLRMRKNMVSMTGYAYREKSGQELSVSVEIKGCNSRYLEISVNLPPWLSMLEMKIREKISSDCGRGKVDIFVRLREHNAPVNISVNKNAAKAYYNAINEMAKELGVKEKPALSAILGMENVLEIEKNRDEERYWREIEPLLNEAVKIFCEEREREGKHTQDDIISHLGEIESSLKKVSSFAPVIEQTLKENIKTRFAELLGNQIDENRILAETASQLLKYTISEEISRLTSHLAEFKAETEKNPRPGKKLDFLCQEINREVNTIGSKSAIIEVTNEVVKMKETLENIREQLRNIE

SEQ ID NO: 68825 - DNA, 531 bp, Unknown
  Obtained from environmental sample
  misc_feature (1)..(531): n is a, c, g, or t
atgaaagaagacataaaaatcgctatttcgggaagaagcggatgcggaaatacaacagtcagcagaatggttgcggaaaaattaaatttacaatttatcaattttacttttcgatctttggcggaagaaagaaatgtaactttaaaagatataattgagcttgcgggaaaagacgattcgatagacaaggaagtagacgagcggcagacaaaacttgccgctgaaagcggcggctgtgtattaggctctcgtcttgcggtttggatactgaaagaagcggatttaaaaatctatcttgacgctgatccgcggataagagcgtcgagaattgtaaccagagaaggcggcaaacttgatgaagtagccgcgtttacggcggaacgcgacaaaaaagatcacgacagatacttgcgcctttacaacattgataccgatgactttaaatttgttgatttaattattgacgccggaaattacacagccgaacaaattagagatatgattattgaacgtgccaagcgtgtaaaatga

SEQ ID NO: 68826 - protein, 176 aa, Unknown
  Obtained from environmental sample
  DOMAIN (13)...(173): Shikimate kinase
  misc_feature (1)..(176): Xaa is any amino acid
MKEDIKIAISGRSGCGNTTVSRMVAEKLNLQFINFTFRSLAEERNVTLKDIIELAGKDDSIDKEVDERQTKLAAESGGCVLGSRLAVWILKEADLKIYLDADPRIRASRIVTREGGKLDEVAAFTAERDKKDHDRYLRLYNIDTDDFKFVDLIIDAGNYTAEQIRDMIIERAKRVK

SEQ ID NO: 68827 - DNA, 1392 bp, Unknown
  Obtained from environmental sample
  misc_feature (1)..(1392): n is a, c, g, or t
atgggttacccgaaactttacgccgttcaaaaagagcgcgaggcgatttacgcgaaggaaaacttcagcgaagcggacggaatgagggcaagcgagcttgaggcggacttcgcggaactgggcggatgggaagcggaagcgcaggcgggccagcttctttcaggccttggccttgacgaagatgaccacggcaaattaatggcggaacttgacgaatcaaaaaaagtgcgcgtacttttggcgcaagccctgttcggcagcccggacatcctgctccttgacgagcctaccaacggtttagacttagaatccatctcatggctggaggactttcttatagattttccaaacacggttattgtcgtctcgcacgaccgccatttcttaaacgcggtctgcacaaacgtatgcgacatagatttcggcaaaatcaccccgtattccggcaattacgatttctggtatcagatgagccagatattacagcgtcaggcgcgggatcagttaaaaaaacgggaagacaaagcgaaagaattaaaagagtttattcaaaggtttgcgtctaacgcaagtaagagcagacaggcgacaagccgtaaaaaagtactggaaaaacttgaccttgaaaatattcccgtaacaagccgtaaattcccatacgccggctttaagccggatcgtgaaataggcaataatgttctgcgcgtggaaaaattaaattattcctttgaaggcaaagctctattaaaagatttttcgctgacaataaataaaaacgacaaaatagcctttgtcggtcttgaacactcctccaaatcagcgttatttgatattatttcaggcgttaaacaagctgaaagcggcgattgttattgggggcagaccacgtccttttcctatttcccgaaagacaactcgtctttctttgattccgatttatcaattacagactggttaagacagtattcccccgatcaggacgaaacctatgtccgcagttttttaggacgtatgctcttttcaggcgaagaagccctaaagcccgtaaatgttctttcgggcggcgaaaaagtgcgttgtatgctctcaaggatgatgctatccggcgcaaacgtcttaattcttgatgaaccgaccaatcaccttgaccttgaagcgataaccgccctaaacgacgggcttacatcattccccggcgttatactttttaattctcatgatcacgaatttatcaattcaatagcgaaccgaattatcgaaattctgccgcagggagaaagcccggaaagctatatcgaccgcatgatgacttttgacgactatcttacggattcaaacgtaaaagaacttcgcagcgcggcgtatcatcatgtggaaagattgaggatttaa

SEQ ID NO: 68828 - protein, 463 aa, Unknown
  Obtained from environmental sample
  DOMAIN (6)...(142): ABC transporter
  misc_feature (1)..(463): Xaa is any amino acid
MGYPKLYAVQKEREAIYAKENFSEADGMRASELEADFAELGGWEAEAQAGQLLSGLGLDEDDHGKLMAELDESKKVRVLLAQALFGSPDILLLDEPTNGLDLESISWLEDFLIDFPNTVIVVSHDRHFLNAVCTNVCDIDFGKITPYSGNYDFWYQMSQILQRQARDQLKKREDKAKELKEFIQRFASNASKSRQATSRKKVLEKLDLENIPVTSRKFPYAGFKPDREIGNNVLRVEKLNYSFEGKALLKDFSLTINKNDKIAFVGLEHSSKSALFDIISGVKQAESGDCYWGQTTSFSYFPKDNSSFFDSDLSITDWLRQYSPDQDETYVRSFLGRMLFSGEEALKPVNVLSGGEKVRCMLSRMMLSGANVLILDEPTNHLDLEAITALNDGLTSFPGVILFNSHDHEFINSIANRIIEILPQGESPESYIDRMMTFDDYLTDSNVKELRSAAYHHVERLRI

SEQ ID NO: 68829 - DNA, 1008 bp, Unknown
  Obtained from environmental sample
  misc_feature (1)..(1008): n is a, c, g, or t
atgctgacagaagatcaattatttaaaaagaaagcccttattatggctcccacaagggagttggccgtacagattgaggaagaggcgaaaatgctgggaaagcacctgccttttaagacaggaagtttttacggaggcgtaggctatactcagcaggaaaaacttttaagggaaaacgcgcaaattctggtcggaaccccgggccgcgtgcttgaccttaacaaatccggccgcatgaatttaatggacatcgctttccttgtccttgacgaagccgacagaatgttcgatatgggtttttatcccgacttgcgtaaacttatcaaagttgtcccttccgtcgaccgccgccaaactatgcttttcagcgcgaccttgaacgcgtgggtaaaaaatctggcatgggaatacacaaagaaaccttttgagattgagataaagccggaaataattacggtggaagaagtaacgcaaattctctaccatgtcccgtcggaagaaaagatgccgctcctcttaggtataatacagcgtgaacagcccgaaagcatgataattttttgcaatacaaagaagagcacagaaattgtcgcaaagcgtctgaaaattaacggatacaactgcgagtttatcataggggatcttccgcagagcaagcggctgaaaataatcgacgacgtaaaagccggaaaaattaaaacccttgtcgccaccgatgtcgcggcgcgcggccttgacatcgaaagcctcgctatggtgattaattacgatcttcccgctggaagcggaaaattacgttcaccgcataggcaggaccgcgcgcgccggaaagaccggcaaagcgattaccctttccagcgagcaggacgtatactagttacccgccatagagcgatatataggaaagaaattccgtcccacatcgcgggacaggaactttacgcgcgggataaaagcgcaggacagataattcgaaccgatctttatgaagaacgccaccacacatga

SEQ ID NO: 68830 - protein, 335 aa, Unknown
  Obtained from environmental sample
  DOMAIN (200)...(277): Helicase conserved C-terminal domain
  misc_feature (1)..(335): Xaa is any amino acid
MLTEDQLFKKKALIMAPTRELAVQIEEEAKMLGKHLPFKTGSFYGGVGYTQQEKLLRENAQILVGTPGRVLDLNKSGRMNLMDIAFLVLDEADRMFDMGFYPDLRKLIKVVPSVDRRQTMLFSATLNAWVKNLAWEYTKKPFEIEIKPEIITVEEVTQILYHVPSEEKMPLLLGIIQREQPESMIIFCNTKKSTEIVAKRLKINGYNCEFIIGDLPQSKRLKIIDDVKAGKIKTLVATDVAARGLDIESLAMVINYDLPAGSGKLRSPHRQDRARRKDRQSDYPFQRAGRILVTRHRAIYRKEIPSHIAGQELYARDKSAGQIIRTDLYEERHHT

SEQ ID NO: 68831 - DNA, 963 bp, Unknown
  Obtained from environmental sample
  misc_feature (1)..(963): n is a, c, g, or t
ttggccaaagaccttgagccgctgaaaactctcttggacgagaaccgtataacgcttgcgtatcagagtttttcaccggacgggaactggtatgtggcgggatgcgttatacctgaaatgcccgccgacgcgccgcaaagcccgtattttatcgccatacctgttgtttccggcggcaaggggcgtcaaaattttcttgacatgagtaatttgactgtactcggtcaagtcaagaatatgacttccattgcgtggacgcgcgaaccggcctcttacgtggtctccgacggcgagcgtcttcgcaagtgggacttgggcaaactgccaaaagccggtgtttttacggcgtcggaggctaatgcggtcaagggcgccgagccggccggggccgccgccgggacatttaccgacgagagagacgacatgacttacaagacggtgacaatcggcggcaaaacgtggatggcggagaatctgaattataaggcagacaagtctcggtgttatgaaaacaacgccgacagctgcgccaaatacggcaggctgtacgattggaacgcggcaatgtccgcttgccccgccgcttggcgcttgccgacaagcgatgattggggcgcattgatagcggcggcgggcggcccttccgtggcgggcagaaagttgaaagcgaaaagcggttggcgctacgacagaaagaatgacgaagacggcaacggcactgacgactatggattttcggccctgcccggaggtcacagccactcccacggccattttctcggcaccggatatttcggttgctggtggacggccacggaagtcggcggtaaagacgcttaccacctgtccatggattacaatcgttactactttgacgaagacagccgcgaaaaagacggcggctactcggtgcggtgccttcgggatggcggttgccaaaacgtcaactccccgaccccatga

SEQ ID NO: 68832 - protein, 320 aa, Unknown
  Obtained from environmental sample
  misc_feature (1)..(320): Xaa is any amino acid
MAKDLEPLKTLLDENRITLAYQSFSPDGNWYVAGCVIPEMPADAPQSPYFIAIPVVSGGKGRQNFLDMSNLTVLGQVKNMTSIAWTREPASYVVSDGERLRKWDLGKLPKAGVFTASEANAVKGAEPAGAAAGTFTDERDDMTYKTVTIGGKTWMAENLNYKADKSRCYENNADSCAKYGRLYDWNAAMSACPAAWRLPTSDDWGALIAAAGGPSVAGRKLKAKSGWRYDRKNDEDGNGTDDYGFSALPGGHSHSHGHFLGTGYFGCWWTATEVGGKDAYHLSMDYNRYYFDEDSREKDGGYSVRCLRDGGCQNVNSPTP

SEQ ID NO: 68833 - DNA, 1941 bp, Unknown
  Obtained from environmental sample
  misc_feature (1)..(1941): n is a, c, g, or t
gtggtcgttggggctacgataatctcggacgttgcggtgctggggttgctcgccgttattgccgaccctgcgaaggggttcagcataccgatacagtactggatcatgctattcggcggttgggtgctctttatatgcgcgatactctatttccttcccaagatcgcgcggcgggttttcagcgccttttccgaagacggttacgcgcaattcctcttcgtcttcgccgcggcttgcctgctctcgtgggcggcgcacttcttgcgcctcgagtcgctcatcggcgcctttttctgcggactggcgctcagtaagcttataccgaatcacagcatattgacgacgaagatcaactttgtgggaaacactatcttcattccgttcttcttcatatcagccggaatgttgatagacccgaactactttatgtggagcggcgaggcgctcatccttacgttcgtccttaccgcccttgccattgtcacaaagaccgccgcgagctttatctgcggaaagacgttcaagttttccatggacgcgatactgatggcgtcagggatgacgattcaacaagccgccacgacgatagtctgcgccgttatcggttacgaggtcggcgttttgaacgagacgatattcaacgccgggatgttgcacatactcctcacctgcaccatcggcgaggtgatctccgtgcactacgcggagaagtacgcgcgtagcctgcatgcgaaaacgggcgggttcggcgcgtttgagagcagcaagacgctggtcttcataccgaacccggcggcttgcggcggccttcttgactttgcctgtctctttaggcactacgcgaagacgtacatgatatcgccgctggcgctggcgacggacgatagggaatccgccgccgaagcggagacgatactcggtatatgcatgaaccacgctcgcgaactggaggagctataccatccggagatgcgcatagccggcagcgtgtcggacggcatcctgcacgcggcggcggagacaagggccgggacggtcgtctgtccgttggaacaccatagccgggcattgattgacgaatgcgaaacgcgtttagtattcacaagaataacgcaaaatatctccatgacaaaacgtctgttggtggttttcatgcccacaagcgaagaccggccggacttggcgctgctcatggccgagatcaaacatctggcgcaacaaataagcgccgagatagtcttccacatctccgagcatcaacgcgaaaaaatcggcacggtgatcgacaagtatctaagaggcggcgtaaagtacgtaacgacggttaagagccaatggaacgcggtcaagcgtgatttgccgggtcagataagggtcggcgacgcggtggtaatatctatgggtacgaggcagaagctcttccgcctgccgtcggcggacaactatccgtaccatttggctcaacagttcaaagataacaccgtaacggcttcctacccgcccatgtcattagttgggaccggcgagagcgacgagtcggcgcttttctacgatgaatcgccgcagggcgcggcggcggcgacggatggtccggcattggaggctgttgatacctgtggaaataatttgatggaaatcaccgccgccgtcgccgacaagatcggggcggaggcgaacgatctatacgatttgctgctctcgagcatagaactatatccggtggaacttgcgcccgggaccgtcctaatccacgcccacacggaattggtcgacgttccgcgggttttcgcgtggcatcagaaagagaagtcgcagatcgcgcctacggttgcggcgccgaatgtattgattatcgtactgaacccgatccacggcgacccgcagacgcacttgaagacgctgtcgaggatcgcggggatgttcatggggtcggggagttga

SEQ ID NO: 68834 - protein, 646 aa, Unknown
  Obtained from environmental sample
  misc_feature (1)..(646): Xaa is any amino acid
MVVGATIISDVAVLGLLAVIADPAKGFSIPIQYWIMLFGGWVLFICAILYFLPKIARRVFSAFSEDGYAQFLFVFAAACLLSWAAHFLRLESLIGAFFCGLALSKLIPNHSILTTKINFVGNTIFIPFFFISAGMLIDPNYFMWSGEALILTFVLTALAIVTKTAASFICGKTFKFSMDAILMASGMTIQQAATTIVCAVIGYEVGVLNETIFNAGMLHILLTCTIGEVISVHYAEKYARSLHAKTGGFGAFESSKTLVFIPNPAACGGLLDFACLFRHYAKTYMISPLALATDDRESAAEAETILGICMNHARELEELYHPEMRIAGSVSDGILHAAAETRAGTVVCPLEHHSRALIDECETRLVFTRITQNISMTKRLLVVFMPTSEDRPDLALLMAEIKHLAQQISAEIVFHISEHQREKIGTVIDKYLRGGVKYVTTVKSQWNAVKRDLPGQIRVGDAVVISMGTRQKLFRLPSADNYPYHLAQQFKDNTVTASYPPMSLVGTGESDESALFYDESPQGAAAATDGPALEAVDTCGNNLMEITAAVADKIGAEANDLYDLLLSSIELYPVELAPGTVLIHAHTELVDVPRVFAWHQKEKSQIAPTVAAPNVLIIVLNPIHGDPQTHLKTLSRIAGMFMGSGS

SEQ ID NO: 68835 - DNA, 399 bp, Unknown
  Obtained from environmental sample
  misc_feature (1)..(399): n is a, c, g, or t
atgtacgacaaacttttagtattctccgtcctcctcttctccgtcttcgccgtccccctgatctccggcaggacaaagattccggccattgtcttttacatactttccggcgtgctctttgagcgctttgtcttcaagcttgagaatatcagcgagtccttcggcctcttttcggaaataggcaagctctacctgatgtttatagccggcgtcgagatagatatattcttatttaagaaaaacgtcgccaagagcgttatctttgggacgctctcctttatcgtgccgcaggttttggggacggtggtgattttctgcgttttcggttattccatgaacgcggcgcttctcacggcaagcctcttcgcctcgcacacgctttgtcgctcggcatcataa

SEQ ID NO: 68836 - protein, 132 aa, Unknown
  Obtained from environmental sample
  SIGNAL (1)...(17)
  misc_feature (1)..(132): Xaa is any amino acid
MYDKLLVFSVLLFSVFAVPLISGRTKIPAIVFYILSGVLFERFVFKLENISESFGLFSEIGKLYLMFIAGVEIDIFLFKKNVAKSVIFGTLSFIVPQVLGTVVIFCVFGYSMNAALLTASLFASHTLCRSAS

SEQ ID NO: 68837 - DNA, 969 bp, Unknown
  Obtained from environmental sample
  misc_feature (1)..(969): n is a, c, g, or t
atgataaaattaccgataggacaatctgaaaacggatctcggttagaccgcttgttgcgcaagcggctgccgcttttgagcctttccgcaatctatggtttgatacgtcggggcagcgtgcgcgttgacggccgcaaggtcaagcaggatcaccgcctttcagagggcgagcaactggaaatagatgttgacgaatcggaattttcggagcaggaacgcccgcaaaacgcgcttattaaattgacgaaaacggagtttttcaaacgcaatttccacgtattatttgaggacccgtccatcctagtatgtaataaacctgccggcttagtggttcacccgggcagcgggcaccaacatagcgataatcttatagatttagcaacggcctacatcttgtcgacgcataacaatcaacctccggacccgccggtattgatgcaccgcttagaccgcgatacctccggcgtcatactcttagccaaaaatacgggcatagtgcgacaactccacgacgacatgcgcgccggcaaattcaaaaaacaatacgccgccgtaacccacaaccgcccgccggagttcgagggaacggtaacgctcggcatgaagagaagcgaccgtagccgcgccggtatgaagatgagcgtctcggaggatggcgatgggtcaacggcatcgagcacatcatacaaaattgccgaatatcggaacgatatgtcacgattggagatactgctgcacacgggaaagacgcaccagatacgcgtacacatggcgcacttaaaatcgccggttttaggcgacgaacgttacggggatcgccgcttagacaacaattttttcgcgtcgtcgcaattaccgcgacgattgtatttacacgctcacaagttgagctttccacacccgaagacgaaaaagatgatgacggttacggcgccggtgccgaaagaatttaatttggcgttaggataa

SEQ ID NO: 68838 - protein, 322 aa, Unknown
  Obtained from environmental sample
  DOMAIN (13)...(59): S4 domain
  misc_feature (1)..(322): Xaa is any amino acid
MIKLPIGQSENGSRLDRLLRKRLPLLSLSAIYGLIRRGSVRVDGRKVKQDHRLSEGEQLEIDVDESEFSEQERPQNALIKLTKTEFFKRNFHVLFEDPSILVCNKPAGLVVHPGSGHQHSDNLIDLATAYILSTHNNQPPDPPVLMHRLDRDTSGVILLAKNTGIVRQLHDDMRAGKFKKQYAAVTHNRPPEFEGTVTLGMKRSDRSRAGMKMSVSEDGDGSTASSTSYKIAEYRNDMSRLEILLHTGKTHQIRVHMAHLKSPVLGDERYGDRRLDNNFFASSQLPRRLYLHAHKLSFPHPKTKKMMTVTAPVPKEFNLALG

SEQ ID NO: 68839 - DNA, 486 bp, Unknown
  Obtained from environmental sample
  misc_feature (1)..(486): n is a, c, g, or t
gtgggacctttaaccaggtaccgagaacccgtggtggtggcccccgacgccggcagcgccaaacgggccggcgcctacgcggtgcgcctaggcctgccgctggctatattggacaaacgccgccacgacgacactgaaaaacccgctatccacaacgtcatcggagacgtaaaaggcaagcgggcattaatcttcgacgacgaaatagccaccggcgggtcgattttggaggtggttaaggcgttggaaaacttaggcgtaacggagatatcggcttgttgcgtgcacgccgtgctgtccgcaaacgcgccggagaggttgaaaaattcgtcgttgaatcaatttgtggtgacagactcggtgtttattccggaggagaaaaagttcgacaggatgacggtgatctcggtggcggaattgttcgccaaggcgattatgtatacgaatagggggacgtctatcagcggactttacaacgggtactag

SEQ ID NO: 68840 - protein, 161 aa, Unknown
  Obtained from environmental sample
  DOMAIN (1)...(117): Phosphoribosyl transferase domain
  misc_feature (1)..(161): Xaa is any amino acid
MGPLTRYREPVVVAPDAGSAKRAGAYAVRLGLPLAILDKRRHDDTEKPAIHNVIGDVKGKRALIFDDEIATGGSILEVVKALENLGVTEISACCVHAVLSANAPERLKNSSLNQFVVTDSVFIPEEKKFDRMTVISVAELFAKAIMYTNRGTSISGLYNGY

SEQ ID NO: 68841 - DNA, 795 bp, Unknown
  Obtained from environmental sample
  misc_feature (1)..(795): n is a, c, g, or t
atgggccctaagaaacacctcggtcaacattttttaaccgctccggcttttgctaagagaatagccgagtctgtgcccgcgtctacgggagagtgtgttcttgaaatcggcccgggacgcggggcgctgagcgtgcatttgcttacgcgttttccgtctatgcatttagttgagatcgataccgattccattaatacgttaacgagtaagttgggcgacggtaattaccgtattcataacgaggatgtgatgagctttgatttttccaaagtcggatttccattgcacgtggtagggaatctgccgtataacatcggagcgcttatcataaagaagacgcttttggaggcgcctaaggtggcctcttgtacgtttatggtgcaacgtgaggtcgcgtcgcggattgtcagcgggccgcgtagccggcaaaacggttttttgtccgtattctgtcaattcttcggcgacgcgaaactgctcttccacgtgccgccgggcgcctttttcccgcgtccgaatgttgattcgtcggtatttcaaattatagtcgatgccgctattgagggaaaactgcgccgtgagttgtgggagaaattctttgcgtttgtggacagcgggttttccatgcggcgcaaacagcttgctaaggtattatcgttacgatacggacgcgacaaggatcactaccgcgacgcgttgaccgatatggggatagacgcggcggcgcggcccgaggatttgggcgtggcggagtggctgagattgtacgggcgggtgcgcgatgagtcaatttag

SEQ ID NO: 68842 - protein, 264 aa, Unknown
  Obtained from environmental sample
  DOMAIN (1)...(261): Ribosomal RNA adenine dimethylase
  misc_feature (1)..(264): Xaa is any amino acid
MGPKKHLGQHFLTAPAFAKRIAESVPASTGECVLEIGPGRGALSVHLLTRFPSMHLVEIDTDSINTLTSKLGDGNYRIHNEDVMSFDFSKVGFPLHVVGNLPYNIGALIIKKTLLEAPKVASCTFMVQREVASRIVSGPRSRQNGFLSVFCQFFGDAKLLFHVPPGAFFPRPNVDSSVFQIIVDAAIEGKLRRELWEKFFAFVDSGFSMRRKQLAKVLSLRYGRDKDHYRDALTDMGIDAAARPEDLGVAEWLRLYGRVRDESI

SEQ ID NO: 68843 - DNA, 456 bp, Unknown
  Obtained from environmental sample
  misc_feature (1)..(456): n is a, c, g, or t
atggcgaaaattttaaacacgcttgcatcaggcgtaataaatactgcaataaataaagcggtaaaccccatgaaaaatcccataggaaaccctatgggaagccacatgggcggcgctccgaataaaaacgcaaacgcggctccgccgccggtcggctggaattgttcctgcggcaacaaagggaacaccggcaaattctgctccggatgcggaaagccgcagcctagcctttgggactgcccatgcggcaaaaagggaaactccggcaacttttgcgcagactgcgggaagcccaaacccgtattgtgggactgtccctgcggctacaaaggaaactcaagtaaattctgcgcagagtgcggaaaacccaaacccgtattgtgggactgtccctgcggctgcaaagaaaactcaagtaaattctgcgcagagtgcgggaaacccaagccggagtag

SEQ ID NO: 68844 - protein, 151 aa, Unknown
  Obtained from environmental sample
  misc_feature (1)..(151): Xaa is any amino acid
MAKILNTLASGVINTAINKAVNPMKNPIGNPMGSHMGGAPNKNANAAPPPVGWNCSCGNKGNTGKFCSGCGKPQPSLWDCPCGKKGNSGNFCADCGKPKPVLWDCPCGYKGNSSKFCAECGKPKPVLWDCPCGCKENSSKFCAECGKPKPE

SEQ ID NO: 68845 - DNA, 1065 bp, Unknown
  Obtained from environmental sample
  misc_feature (1)..(1065): n is a, c, g, or t
atgaccgcgtatttatctttggaaaatgggacggtactaaaaggcgaatattttggcgctcagggtgaaatcataggggaagttgtttttgctaccggcatgaccggctatctggaaactcttaccgaccaaagctactatgggcaaattgttctgcaaacttttccgttaataggaaattacggcgtcatccctcccgattttgaaagcgccaatgtaggggcaagagcgtacatcgtcaaacacccttgcgaaaacccatccaacttccgcagcgaaggaactctggacgcgtttttaaaagaacgaaacataataggattatacggaattgatacaagggctcttacaagaatcatccgcgaaaacggcgtaatgaacggtaaaattatggcgaaccctcctactcccgccgacatcaaacaaataaaagcgtattcaattattaacgctgtcgccgccgtgtcgtcgcatactgttacaaaaactccgccgaaaaattcgcaggtaaaaaaacgcgtggcgttaatggacttcggcgcaaaacgcggtatagcgaacgcccttgcggcgcgcggctgtgaagtgtggacttttccgcatgacacaagcgctcaggagatactgaaaatgaatccggacggaataatgctcagcaacggtcccggagatccggcggaaaaagccaacgacggaattatcaagactcttatctctttgcaaaagagcaatacgacaatattcggcatatgcctcggacaccaactgctggcgctggcaaacggttattcaaccaaaaaactcaaattcggccaccggggagccaatcagccggttaaggaattggcaaccgggcgcgtgtacatcaccagtcagaatcacggctacgcggttgttgcggataacggttcgtttgtgaatgtcaacgacggtacctgcgaaggcatggattacggcagctcgttttccgtgcaatttcaccccgaagcgtgcggcgggccgcttgacacggctttcctgtttgaccgctttatagaaaggatgaatgctcatatattgagctaa

SEQ ID NO: 68846 - protein, 354 aa, Unknown
  Obtained from environmental sample
  DOMAIN (175)...(347): Glutamine amidotransferase class-I
  misc_feature (1)..(354): Xaa is any amino acid
MTAYLSLENGTVLKGEYFGAQGEIIGEVVFATGMTGYLETLTDQSYYGQIVLQTFPLIGNYGVIPPDFESANVGARAYIVKHPCENPSNFRSEGTLDAFLKERNIIGLYGIDTRALTRIIRENGVMNGKIMANPPTPADIKQIKAYSIINAVAAVSSHTVTKTPPKNSQVKKRVALMDFGAKRGIANALAARGCEVWTFPHDTSAQEILKMNPDGIMLSNGPGDPAEKANDGIIKTLISLQKSNTTIFGICLGHQLLALANGYSTKKLKFGHRGANQPVKELATGRVYITSQNHGYAVVADNGSFVNVNDGTCEGMDYGSSFSVQFHPEACGGPLDTAFLFDRFIERMNAHILS

SEQ ID NO: 68847 - DNA, 468 bp, Unknown
  Obtained from environmental sample
  misc_feature (1)..(468): n is a, c, g, or t
atgaatttaacatcagataatattatcgcctactttcagcccattttttccgccgattcaaatgacgtatacgcctatgaagttctgggacgctatatagacgacgacggagaggtaaaatctttggggcctttttttaacgaccctgatgtatcacatgatgaagccctgagggtagacagaatagtaagaagattcgccatgaagaaatacatcgaagaaaaacgcagcgaatatctttttatcaatatcagattggcgtggttgctgccattcgcgataaacccggaagacatggtaactttgcagttggcaaaagaattcggcattcccaatgacaggctggttatagaaattaccgaagaagattttaacgcaagcgaagaatatatccgcgccatagtccactacaagaaaatgggctgccgcatcgcgcttgacgattacggaaaaaagccagcgatatag

SEQ ID NO: 68848 - protein, 155 aa, Unknown
  Obtained from environmental sample
  misc_feature (1)..(155): Xaa is any amino acid
MNLTSDNIIAYFQPIFSADSNDVYAYEVLGRYIDDDGEVKSLGPFFNDPDVSHDEALRVDRIVRRFAMKKYIEEKRSEYLFINIRLAWLLPFAINPEDMVTLQLAKEFGIPNDRLVIEITEEDFNASEEYIRAIVHYKKMGCRIALDDYGKKPAI

SEQ ID NO: 68849 - DNA, 729 bp, Unknown
  Obtained from environmental sample
  misc_feature (1)..(729): n is a, c, g, or t
ttggcgaagataaagcccgatataatcaaaataaacatggattacatacacagaagcgaaaattcctaccattaccgcgaatatttgcagtctgtcgccgattttgccgaatcggtcggaattgaagtgctgtatgaaggcatagaaacccaaaaacagcttgatatctgcatgtcattaaagggaaggtattatcagggattcctcatcgccctgcctcagccttcaatgcgtgacgcgaaaataaacgacgccgttttttccacgtcaattgaaaacgtatacacgctttttcaggatgaaataatcgtgacggaagctttgcgaaaatctttggacacgcgggtagagcgttttctgtcgcagaacccttttaattttgaggaagaggagcatgacaactaccttgtaaatctctgccatgaattatcgaacgtaaggctggtttttctatgcgacaggcgcggctaccagcttacttccaatattatatggcagcctggaggcgccgcgtttatcaacagcggccgcatggcaaagtataaaaacagaaactggatatggcgcggttatttttacgaaacgctgaaatccgtcgctacgggccaaaaaagctatatgtccggcgcttatcatgatttcacgacaaaagacaatgtccgtacctattcttatgccataaacgaggatattttcctattcgtagatgttggaacagctagggaataa

SEQ ID NO: 68850 - protein, 242 aa, Unknown
  Obtained from environmental sample
  misc_feature (1)..(242): Xaa is any amino acid
MAKIKPDIIKINMDYIHRSENSYHYREYLQSVADFAESVGIEVLYEGIETQKQLDICMSLKGRYYQGFLIALPQPSMRDAKINDAVFSTSIENVYTLFQDEIIVTEALRKSLDTRVERFLSQNPFNFEEEEHDNYLVNLCHELSNVRLVFLCDRRGYQLTSNIIWQPGGAAFINSGRMAKYKNRNWIWRGYFYETLKSVATGQKSYMSGAYHDFTTKDNVRTYSYAINEDIFLFVDVGTARE

SEQ ID NO: 68851 - DNA, 702 bp, Unknown
  Obtained from environmental sample
  misc_feature (1)..(702): n is a, c, g, or t
atgcttgaagttaaagcgataaaaaaaacttacggcaattttactatatcgctggatttatcagttggagcgggagagactcttacgctggctggtccttcaggctgcggcaagactacggcgcttaaccttatcgcgggccttatcgaacctgaatcggggagcatttgcatagacggcggggacattacgcgccttcccgcgtggaagcgaaatatttccgtagtttttcaggatcttgcgctgttcccccaccttgatgtcggcggaaatatcgcctacggcctttttatcaaaggagtcccaaaaaaagagcgccgtcttattgttgagcaaaccctggaaattgtccgccttcaaggttacgcgccgcgctgcatagacaccctctccggcggagaacgccagcgtgtagcaatcgcgcgcgcactcgcgtccaatccgcgtcttttactgttggacgaacctttttcaagcctggacgcgcctttgcgaaaaactctccgccgtgattttcttgaaatccgcgcccattcaaaagccccctgcatattcatcacccacgaccaggaagaagccttaatgttaggcgacaaggtcgcgcttatgaaagacggccgcatagtggaaaccgctgttggagaggaaataatttccgcgccaaaaactgaattcgcaaaagagttttttaacaaagaatag

SEQ ID NO: 68852 - protein, 233 aa, Unknown
  Obtained from environmental sample
  DOMAIN (25)...(206): ABC transporter
  misc_feature (1)..(233): Xaa is any amino acid
MLEVKAIKKTYGNFTISLDLSVGAGETLTLAGPSGCGKTTALNLIAGLIEPESGSICIDGGDITRLPAWKRNISVVFQDLALFPHLDVGGNIAYGLFIKGVPKKERRLIVEQTLEIVRLQGYAPRCIDTLSGGERQRVAIARALASNPRLLLLDEPFSSLDAPLRKTLRRDFLEIRAHSKAPCIFITHDQEEALMLGDKVALMKDGRIVETAVGEEIISAPKTEFAKEFFNKE

SEQ ID NO: 68853 - DNA, 831 bp, Unknown
  Obtained from environmental sample
  misc_feature (1)..(831): n is a, c, g, or t
atgtcggtaaaaacaaatattaacgaatatgccgaaacagggaaaagctcctccgcctcaaggattataatgatcgtgtactttgcggtaatggccgtttttattctcggcccgctgctttctatcccgcttgagtcatttttatacaggccttcgcgcgccacggcgcaggttttaagtttcagatggtggagcaacttaggcggcacctgccttcccgcgcttgggcgctctcttttacttgcttttctgtccgcgacaaccgcctgtattctggcgttcttcgcggctggggcggtaaaactccttgaatcagacaaaaaagaaacttcccttccaaccaacattatccgcttttttgccgtctcaccgataatatcgtcgggcattgttttggggttgggctggatcattttatatggaagaaatttctcccgctctcccgccgcgctggtgatacttcacggggtaagcgcaatgcccttcgcttttaattttatttacgaaggcttccgctcccttccctccaatacattgaacgccgcggccgtcttcggcgcggacccactgcgcgggcttttaaccgccgccctgccgctttcgctgcccagagtacgttccgcgtggggcttcgccgcggcgctcagtcttggagaacttaacgcggtgatgatgcttggcatggaaggctgggaaactttgcccctgtacatataccgcgccgccgcgtcttaccgttacgggacagcctgcgccgccggaaccttgctgataatttgctgcgccgcctgctttctgctttccgaaacagggagagaaaaatatgcttga

SEQ ID NO: 68854 - protein, 276 aa, Unknown
  Obtained from environmental sample
  misc_feature (1)..(276): Xaa is any amino acid
MSVKTNINEYAETGKSSSASRIIMIVYFAVMAVFILGPLLSIPLESFLYRPSRATAQVLSFRWWSNLGGTCLPALGRSLLLAFLSATTACILAFFAAGAVKLLESDKKETSLPTNIIRFFAVSPIISSGIVLGLGWIILYGRNFSRSPAALVILHGVSAMPFAFNFIYEGFRSLPSNTLNAAAVFGADPLRGLLTAALPLSLPRVRSAWGFAAALSLGELNAVMMLGMEGWETLPLYIYRAAASYRYGTACAAGTLLIICCAACFLLSETGREKYA

SEQ ID NO: 68855 - DNA, 972 bp, Unknown
  Obtained from environmental sample
  misc_feature (1)..(972): n is a, c, g, or t
ttgacaaaacttttctgtccacttgtaatttttattagtgatttttatactattcctatggttcaataccagccgcaaatccaatgggaactcacccgcgccgtggtgagcattgccgcatggtgggtgctattttaccgtctccacaggccggaagcgcaatggcggcgcattgcccttcttatcgccatgccggcggcttatgctttttggatactcgtgccaatgagcattgtcgccaactcaatttcatgggcggttattaccgtaatctttgccttcatctgcggagatttacgccgttccctttttacagcgttcttctacattggtatggaagcctctatagacaatacccgttccgcgttaattgccttgctctttgatcaatttttcccttctcattcacccagccaatatttacagtacaatctgcaatacctcgttgtgtttgccttgtgttgttgcttttatttgataatgagacggtattcaggcaaactgccgattgccggttggatactcattattataccgcctatgattctgggggcaattctgacttatttcacacatgtcgcggatccgcttctgataaatcagggaatcaacatctatggtccttgtttctgtttcgggctatttagtatattactgaatattgggatactctatctctatatccgccaattgattattaccaatgcccagcatttggcaatggcgatctccaacgtagagtctgtctggacgccggaaaacggcctgtctgataatttctgtaaacgctaccaattgactgacagggaaaaagacatagttgaagttatgatgcatggaaagagtaacaaggaaattgccgataccctgcacatttcaatcaggacagtaggcgcgtatcttcaaaatgtctacaagaaaaccggcgcgcccaaccgtttcgctctttactcgcttataaaaggggaatag

SEQ ID NO: 68856 - protein, 323 aa, Unknown
  Obtained from environmental sample
  DOMAIN (263)...(320): Bacterial regulatory proteins, luxR family
  misc_feature (1)..(323): Xaa is any amino acid
MTKLFCPLVIFISDFYTIPMVQYQPQIQWELTRAVVSIAAWWVLFYRLHRPEAQWRRIALLIAMPAAYAFWILVPMSIVANSISWAVITVIFAFICGDLRRSLFTAFFYIGMEASIDNTRSALIALLFDQFFPSHSPSQYLQYNLQYLVVFALCCCFYLIMRRYSGKLPIAGWILIIIPPMILGAILTYFTHVADPLLINQGINIYGPCFCFGLFSILLNIGILYLYIRQLIITNAQHLAMAISNVESVWTPENGLSDNFCKRYQLTDREKDIVEVMMHGKSNKEIADTLHISIRTVGAYLQNVYKKTGAPNRFALYSLIKGE

SEQ ID NO: 68857 - DNA, 1578 bp, Unknown
  Obtained from environmental sample
  misc_feature (1)..(1578): n is a, c, g, or t
atgaataacaagaaatacacgtttcttgcccttattattggaacagggcttgccatgattgcggctgattttctgatactgctcttctttgagaatactttttcccagcttcgtttccgtttcggccttccggctctgctcttcctcgccctttactgccttattttagggcggggcgcgcggtattttgattatacttggtttaccaaactggacggggaacactatctattatggcttaaaaaaatcggagctgtaccgattaaaaggattgcccttaacgtggttagtcacgccgcttttttggggattgttttttcaggcaattatctggggattaatccttcaataaaggtaaccttgtttctggcggccctgtcttttgggatgctggtggggacttttgtgtatgtggcgggagacgggctggtctccagcaccctgcttgctcacaattttacgagatacccgaatgattgccgtgaaaaacggcaggaagcaaaggcatggatagttcccattgcggcaattctggtaactctctgttttacctattccgttaccatgctcggccttcataaggccggggtgtctctggacgtaatgaaggggagcgcaatgtcatccatattgattcccctggttgttttttttatcagcatttccgccctggcgctcaccctcaaaaagaacattggaacgctctacacttcggtaatcgcgcagcttgaaaatctttcctccgagcagaaagaccttacaaagagaatttcaatttgttccgtggatgaacttggcactatcgccggcatggtgaacgctttttgcgaacatctgggcggcggaataaaaaacatcaggagcgaaacggatgttttatccggcattggcaacgccctttcttccaacatgaatgacaccgccgcggcggtgaaccagattaccgccaatgtacaaagcatcaaaagccttatattaaaccagagcgccggcgtgagcgaaacccacgccacgatggaacagcttgtagtcaacatcaacaaactcaataaccatgtcgggaaccagagcggcgacatatcccaggtttcatcttctattgaagaaatgattgccaacatagactccgttaccggaacccttgtcagcaacgccggtaatgtaaaaaccttacaggacgcttcggaagtaggccgcgccggattgcatgaagtagcggccgacattcaggaaatcgcccgcgagtccgaagggcttttggaaatcaactcggtcatggcgaacatcgccagccagaccaacctgctgtcgatgaacgccgcgatagaggctgctcacgccggagaaacgggcaaaggcttcgccgtagtcgccgatgaaatacgcaaacttgctgaaagctccggagagcaatccaaaacgattggcacggtactcaaaaagataaaaggttccatcgacaagataaaacattctacggaaaacgttcttaacaagtttgaagccattgactcaagcgtcaagactgtcgcgcagcaggaagaaaacatacgaaacgcgatggaagacagggcatag

SEQ ID NO: 68858 - protein, 525 aa, Unknown
  Obtained from environmental sample
  SIGNAL (1)...(22)
  DOMAIN (354)...(525): Methyl-accepting chemotaxis protein (MCP) signaling domain
  misc_feature (1)..(525): Xaa is any amino acid
MNNKKYTFLALIIGTGLAMIAADFLILLFFENTFSQLRFRFGLPALLFLALYCLILGRGARYFDYTWFTKLDGEHYLLWLKKIGAVPIKRIALNVVSHAAFLGIVFSGNYLGINPSIKVTLFLAALSFGMLVGTFVYVAGDGLVSSTLLAHNFTRYPNDCREKRQEAKAWIVPIAAILVTLCFTYSVTMLGLHKAGVSLDVMKGSAMSSILIPLVVFFISISALALTLKKNIGTLYTSVIAQLENLSSEQKDLTKRISICSVDELGTIAGMVNAFCEHLGGGIKNIRSETDVLSGIGNALSSNMNDTAAAVNQITANVQSIKSLILNQSAGVSETHATMEQLVVNINKLNNHVGNQSGDISQVSSSIEEMIANIDSVTGTLVSNAGNVKTLQDASEVGRAGLHEVAADIQEIARESEGLLEINSVMANIASQTNLLSMNAAIEAAHAGETGKGFAVVADEIRKLAESSGEQSKTIGTVLKKIKGSIDKIKHSTENVLNKFEAIDSSVKTVAQQEENIRNAMEDRA

SEQ ID NO: 68859 - DNA, 468 bp, Unknown
  Obtained from environmental sample
  misc_feature (1)..(468): n is a, c, g, or t
gtgacacaaactctcggtatcccagctgcgcaaggctatttcccgttcccgaatcccaactattcctcattcgaagttgtttctctctggtatgtcatcgaacattttcgtgactgcgttccggcgctggcggaagtacggaaactgctcaaacccggcggagtgctggctttcgcgacgccttcattcacaggggtttcgggacgcggttcgctgaaacgctttcttgaaaacagcccgcaggatcactggactgtctggtccccggcggtatgcaggaatgccctgggaaaagccggctttaaggtaaaaaaaatcgtgagcagcggccaccatcctgaacgcttcccgtttttcggtaaattcgcgtataacaggaattcgctcttgtacaggctgctgatggcggtaagcaaaatttttgcgttaggcgatacaatagaagtctacgctgtaaaggattcttaa

SEQ ID NO: 68860 - protein, 155 aa, Unknown
  Obtained from environmental sample
  misc_feature (1)..(155): Xaa is any amino acid
MTQTLGIPAAQGYFPFPNPNYSSFEVVSLWYVIEHFRDCVPALAEVRKLLKPGGVLAFATPSFTGVSGRGSLKRFLENSPQDHWTVWSPAVCRNALGKAGFKVKKIVSSGHHPERFPFFGKFAYNRNSLLYRLLMAVSKIFALGDTIEVYAVKDS

SEQ ID NO: 68861 - DNA, 942 bp, Unknown
  Obtained from environmental sample
  misc_feature (1)..(942): n is a, c, g, or t
ttggaagacaatcttcgcataccgtccggcgcatcctatcctttaattgcaagagagttaagccgaatcgccaaccccgacgcttatgcaaacaatgacgtgagggacaatcgcaactactcggatatgctgcatgaaactatggattttgtaaactgcggcggattgaacgtaatattaacgcccggcagatacaacgcagcgtactttgaacattcatactttgcggaacgcacgggcgcattacttgttaagccgtcggaattaaccgttgaagacgctgttctgtacatgaaagattatctcggcgtgaaagcaaaggtaggagctgtataccgccgtatctccgacgaatatctcgacccaatgacatttttggctgactcccttatcggcgtgccgcatatcatggacgcttaccgtaaggggaatgtcgcaatactcaacgctccgggaaacggagtcgcggacgacaagggcatttattactttgtgccgaaaatgataaaatattatcttaatgaagagcctattttgaaaaacgcgccgacatatctgccctactacaatgatgatctaaagttcacgcttgataacctcaagcggcttgttataaaagacgtgtcggaagcgggcggctacggcgtagtgtttggcagcgagttatcaaaagataaattagcggaaataaaagagctcataataaaagagccgagacggttcatatcgcaggaagttatcgactttatcgatcttgatatcatggatgaaaacggcggtattatccgccggaaagcggatttgagggcgttcgtgctgacaggcaaaaccacgcgcgtgtgggcaagcgggcttacgcgtttctcgcgtgtaaaaggatcgttcattgttaattcttcgcaaggaggagggtttaaagacacatgggtactatttcgatag

SEQ ID NO: 68862 - protein, 313 aa, Unknown
  Obtained from environmental sample
  DOMAIN (2)...(143): Domain of unknown function (DUF404)
  misc_feature (1)..(313): Xaa is any amino acid
MEDNLRIPSGASYPLIARELSRIANPDAYANNDVRDNRNYSDMLHETMDFVNCGGLNVILTPGRYNAAYFEHSYFAERTGALLVKPSELTVEDAVLYMKDYLGVKAKVGAVYRRISDEYLDPMTFLADSLIGVPHIMDAYRKGNVAILNAPGNGVADDKGIYYFVPKMIKYYLNEEPILKNAPTYLPYYNDDLKFTLDNLKRLVIKDVSEAGGYGVVFGSELSKDKLAEIKELIIKEPRRFISQEVIDFIDLDIMDENGGIIRRKADLRAFVLTGKTTRVWASGLTRFSRVKGSFIVNSSQGGGFKDTWVLFR

SEQ ID NO: 68863 - DNA, 690 bp, Unknown
  Obtained from environmental sample
  misc_feature (1)..(690): n is a, c, g, or t
atgggtactatttcgatagagtacagctcaaatctgtactggcttggaagatatgtcgagcgcgcttatactacgcttaacacattctttaattatcacgacaaaacactcgacaaagataaaaacgcctacagggaattccttgacaatttggacatcgaagataagtacggcgatcacaccagttttatcaaagggtatttatacgacgagactgacttcttcaccgtcaactcgacgcttcgttccgcatacgacaacgcgcttgtatgccgcaacgtaatcggcagcgaggcgttagcctacattcaactggcgattgacaagtttcattccagccgcaacgaaaaaaacttgcgtctgtcgttgatacctgtcattgattatttgctggcattctggggcagtgtagaagacaaaatatccagcggcgaggcgcgcacaattataaaattcggcaaattggttgagaggcttgacttatacttcagattttcgtacgactacaagcttatcaacagcgaatatgaaaaattgtgccacgtaatcgcgcgggtacgcaaaggtttttgcaacacacagcatctggcagtactggttgaagcgctcgcaatagaagaaagctacaaggaacgctttgacgaggtactcgcaagtttaaacaatctgtttcaggagcaggtcgcttga

SEQ ID NO: 68864 - protein, 229 aa, Unknown
  Obtained from environmental sample
  misc_feature (1)..(229): Xaa is any amino acid
MGTISIEYSSNLYWLGRYVERAYTTLNTFFNYHDKTLDKDKNAYREFLDNLDIEDKYGDHTSFIKGYLYDETDFFTVNSTLRSAYDNALVCRNVIGSEALAYIQLAIDKFHSSRNEKNLRLSLIPVIDYLLAFWGSVEDKISSGEARTIIKFGKLVERLDLYFRFSYDYKLINSEYEKLCHVIARVRKGFCNTQHLAVLVEALAIEESYKERFDEVLASLNNLFQEQVA

SEQ ID NO: 68865 - DNA, 789 bp, Unknown
  Obtained from environmental sample
  misc_feature (1)..(789): n is a, c, g, or t
ttgaagactgttcattttaagtatcaaacggaattggtattctcatcgcctgcgtcggaacatcagtttctgcttaggatactgccgcaaagcgatgacagacagcagataaaaaatctgtcgtggtttataaaacctgattcaattaatactctatgggaaactgttgacggcttcggcaacaacgcgctcgcaggtgaaatcaacgaaccgcacaaccatttcagtttcggaatagaaggaaccgctgaagtatccggcgaaccgtacataaaatccgacgaacctcaccgcatactgctctacccgacagagttaacccgcgctcatagcgctcttattgatttttacaatgacattaaaaaatcctctcctcccggcgtattcggccgtattcagcaattctcaaacgctgtccactctcatctgcgatacgaacgcggcgtaaccgtaaactcaactaccgccgccgaggcatttgatctgggcgcaggcgtctgccaggactacacgcaaatattgctcactctcctgcgtcttgataaaattccatgccgctatgtcgccggtcttgcttccgattacggggaaactcatgcgtgggttgaagcgtggacggaaaaaaaatactgcgccatagaccctactcgcgataaactcatagacgagggctacattgccgtctcaagaggacgcgacttcgccgacagcgccattgaacgcggagtattcacaggtatatgccgaggaacacagactattagtttgagtatggatatttcacagtaa

SEQ ID NO: 68866 - protein, 262 aa, Unknown
  Obtained from environmental sample
  DOMAIN (3)...(85): Bacterial transglutaminase-like N-terminal region
  misc_feature (1)..(262): Xaa is any amino acid
MKTVHFKYQTELVFSSPASEHQFLLRILPQSDDRQQIKNLSWFIKPDSINTLWETVDGFGNNALAGEINEPHNHFSFGIEGTAEVSGEPYIKSDEPHRILLYPTELTRAHSALIDFYNDIKKSSPPGVFGRIQQFSNAVHSHLRYERGVTVNSTTAAEAFDLGAGVCQDYTQILLTLLRLDKIPCRYVAGLASDYGETHAWVEAWTEKKYCAIDPTRDKLIDEGYIAVSRGRDFADSAIERGVFTGICRGTQTISLSMDISQ

SEQ ID NO: 68867 - DNA, 507 bp, Unknown
  Obtained from environmental sample
  misc_feature (1)..(507): n is a, c, g, or t
ttggccgagcgcacgggcaagagcattagttccaacaatgagcttgcagaaaaaattcttgcggctattgaacggcgtataaaatcattgccgacagaaaaaaccgcccgagcttctttgaacgcaggcggcttaattatcgtctataaaacacaggaagaggcgatccgaatcgctaacacaatagcgccagaacaccttgaacttcaaaccgcaaacgcggacacttggatacccaaacttaaaaattacggttcgctttttatcggcagtctttgcgccgaagtcctcggcgattattcggcgggaataaatcacaccctgcccacatcaacaagcgcccgttttacaggcggtttatctgtccgccacttcctgaaaaccgtaactactctgcgctgcgcccagggcgaaggctttgaaaaagcgcgaaacgccgctgaaatacttgcaagagcggaaggattggaagggcatgcgcagagcgcggcggcgaggaagaattaa

SEQ ID NO: 68868 - protein, 168 aa, Unknown
  Obtained from environmental sample
  DOMAIN (1)...(168): Histidinol dehydrogenase
  misc_feature (1)..(168): Xaa is any amino acid
MAERTGKSISSNNELAEKILAAIERRIKSLPTEKTARASLNAGGLIIVYKTQEEAIRIANTIAPEHLELQTANADTWIPKLKNYGSLFIGSLCAEVLGDYSAGINHTLPTSTSARFTGGLSVRHFLKTVTTLRCAQGEGFEKARNAAEILARAEGLEGHAQSAAARKN

SEQ ID NO: 68869 - DNA, 1314 bp, Unknown
  Obtained from environmental sample
  misc_feature (1)..(1314): n is a, c, g, or t
atggtaggggtcacaagttcaaatcttgtatcgtccattatgccctacatagcaatggcaaggaaatggcgaccacgctcatttggcgagatggtggggcaagaacatattgcgcaaactcttaaaaatgctataaccactggcaacattcaccacgcttttttgttttctgggacaagaggagttggcaaaaacacttcggcgcgaattttggctgcgatgctgattgccagcggcaagcgaacaaaaccctgcggacagtgcgaaagctgcaaagccataacagcaggcttgtctatggatgttatggaaatggatgcggcaagcaacaacggcgtggatgatatgcgtgaagttcttgaaggcacacagtatccgcctatgaatagcaaatacagggttttgataatagacgaagttcatgctctttcaaaaccagcttggtattctatgttaaaaacattggaagagccgccttcgtatttggtttttatatttgccaccacagatccaaacaaaatccctgccacaattttatccagagtgctttgctttgattttaaaagactttcttccttgcaaatttcaaagcgactcgcttttatatgcgaacaagagggcataaaggttgcaccagaagctctttccataatatctgaaaaagcagatggctcaatgcgcgatgctttaacgatttttgacgaggtttttgcatacagcggaaattccataacggcagaatccgctcaaaaagcacttggaataccaccagatgctctctatgttgaactcatcaaggcatttgaagcccacgatgcaaaaggcagttttgcaattttggaaaaagcaactcttgctggtgcagaagtacaggtgtttttagatggcttcataagatttttgcgaaactttctctatgcgcgtctcggtatttctgcagagcagcttgaaatatcgccggagagtttggataatttgaaaaaactcgcacccgaattagaacaaggcgatattttgcgaatttcaaaaatgataatggaactgagcggaaagtgttccgcaaagcacggcttgaatccgcgtttgattgcagaggctgaattttcaaaaattgcttggctggatagggtagtgaatataaatgaagcgttgaaaaacatttcaaatgttcccttgaataaggaaaaccaaaaaaaaatcggtggttttgccagcaccagtggtagcaccagcagcaccagctccggtagcggtaccaactccggcaccagcaccggtaccacctccgacagctccgtccggctcaatatatga

SEQ ID NO: 68870 - protein, 437 aa, Unknown
  Obtained from environmental sample
  DOMAIN (53)...(242): ATPase family associated with various cellular activities (AAA)
  misc_feature (1)..(437): Xaa is any amino acid
MVGVTSSNLVSSIMPYIAMARKWRPRSFGEMVGQEHIAQTLKNAITTGNIHHAFLFSGTRGVGKNTSARILAAMLIASGKRTKPCGQCESCKAITAGLSMDVMEMDAASNNGVDDMREVLEGTQYPPMNSKYRVLIIDEVHALSKPAWYSMLKTLEEPPSYLVFIFATTDPNKIPATILSRVLCFDFKRLSSLQISKRLAFICEQEGIKVAPEALSIISEKADGSMRDALTIFDEVFAYSGNSITAESAQKALGIPPDALYVELIKAFEAHDAKGSFAILEKATLAGAEVQVFLDGFIRFLRNFLYARLGISAEQLEISPESLDNLKKLAPELEQGDILRISKMIMELSGKCSAKHGLNPRLIAEAEFSKIAWLDRVVNINEALKNISNVPLNKENQKKIGGFASTSGSTSSTSSGSGTNSGTSTGTTSDSSVRLNI

SEQ ID NO: 68871 - DNA, 315 bp, Unknown
  Obtained from environmental sample
  misc_feature (1)..(315): n is a, c, g, or t
atggatatgcagcagatgattcgctcaatgcagaaaatgcaaactcaaatgaagaaaactcaggagaatttgcagagccagagctttaacgccgaagcgggtggcggtgcggttaaaattaccataaatggaaacggtgaggtaaccgaactgaaaattgctccggttgcagtggatgcaagcgatgtagaagctttggaagaccttattatggcagcattcaatgaagccattgcaaaaaaagacagtgcttaccaagaaagcgtgggagccataaccaaaggcttaaaaattcctggtatgtcaggtttttga

SEQ ID NO: 68872 - protein, 104 aa, Unknown
  Obtained from environmental sample
  DOMAIN (7)...(99): Uncharacterised BCR, YbaB family COG0718
  misc_feature (1)..(104): Xaa is any amino acid
MDMQQMIRSMQKMQTQMKKTQENLQSQSFNAEAGGGAVKITINGNGEVTELKIAPVAVDASDVEALEDLIMAAFNEAIAKKDSAYQESVGAITKGLKIPGMSGF

SEQ ID NO: 68873 - DNA, 1182 bp, Unknown
  Obtained from environmental sample
  misc_feature (1)..(1182): n is a, c, g, or t
atggacgattcccaggctctgctgaaagttatgagccaaacgctcactgagcacggctatgaagttgaaacagccttaaacggcgtgatagggttgcaaaaaatggaaaccttccgccccgggcttgccataatagatataatgatgccagaaatggatggttatgtggcaaccagaaaaatcagaactgcctatccagacgtgaacattgtgatgttttctgcccagccagccgcagtggttgaaaaacaggctttttctgccggagcagatatatttttgcaaaagccaatcagggagcctgtattgctgggactagcaaaaaaatacacatccactgaaattgcagcagaagaagaagaacacgaaacaattttgcactacgattcagaccaaccttataccatacacattagaacttgttatttttgcggttgcgatcacgtaaacttttttgtgcctcgcccagaagcttacgaagagctatgggattacggcttattcccaagatacgttcccaaggaaggctttccaaaatgggactttatgcgcacaatggttgccgtttgcccaagttgcctatttgcttcttacgatataaacgattttgcagtggacgctaggcacacaaattttccttatagcggagacgccaagcgaattctttcaagaggaatagcggctcgcaaaaaaatgattggcgcagaaaacacagaaactatattctctaatccaaaccgaaattttcaaagagttgtggaatctttcctcttagccgaaaagggcggaaacgggcttgtgattggcgataaagagggagtttattgcgatatcggtttttattcaactatgtctgcagtacttgaacattccagaacccaagacaaaattgaatttcaaaacagcttgagaaaatctcttgacttatttttaaatcagttgaagattcacaacacatcaagaatcacaagggcaaaaacatactatttcataataaccctcaacatggcaaccggagcttctattcgcgcaaacgaaatgaaattggaattggaaaattattaccgcaaaataggcggtgcagacgatgccacccaagaagagagaatgtggaacgaaaggttgctgtatatctggaaagagggtgttaacgcagatgttgtaagggacgttgcttggtaa

SEQ ID NO: 68874 - protein, 393 aa, Unknown
  Obtained from environmental sample
  DOMAIN (1)...(108): Response regulator receiver domain
  misc_feature (1)..(393): Xaa is any amino acid
MDDSQALLKVMSQTLTEHGYEVETALNGVIGLQKMETFRPGLAIIDIMMPEMDGYVATRKIRTAYPDVNIVMFSAQPAAVVEKQAFSAGADIFLQKPIREPVLLGLAKKYTSTEIAAEEEEHETILHYDSDQPYTIHIRTCYFCGCDHVNFFVPRPEAYEELWDYGLFPRYVPKEGFPKWDFMRTMVAVCPSCLFASYDINDFAVDARHTNFPYSGDAKRILSRGIAARKKMIGAENTETIFSNPNRNFQRVVESFLLAEKGGNGLVIGDKEGVYCDIGFYSTMSAVLEHSRTQDKIEFQNSLRKSLDLFLNQLKIHNTSRITRAKTYYFIITLNMATGASIRANEMKLELENYYRKIGGADDATQEERMWNERLLYIWKEGVNADVVRDVAW

SEQ ID NO: 68875 - DNA, 3027 bp, Unknown
  Obtained from environmental sample
  misc_feature (1)..(3027): n is a, c, g, or t
atgaccgcctacaacatcatagccagcaccgacgaatccacagtcgtagccgagtattcccccgaataccgagcagtggccgactaccagtccgaagcggatttagagcgcgagtttatacgtctgcttgccggacagggttatgagtatatccaaattcatgatgaaagcgcgttaataaaaaacctgcgtattcagcttgaaacgttaaacggcgttacgtttaccgattcggagtgggagcgttttttcagcgagaacgtagccggcgcgaacgacggtattgtcgagaaaacccgaaagatacaagacgattatattcaagttttaaagcgtgacgacggcactacgaaaaacgtgtatttgttggacaagaagaacatccacaacaatcgtttgcaggtgattaatcagtatgaggaatccggcggggcgcgtgaaacgcgttacgacgttacgattttggtcaacgggttgccgcttgtccatattgagttgaagcgtcgcggcgtggcgattcgcgaggcgtttaatcagataaagcggtatcagcgtgacagtttttgggcggcgtcggggctttacgagtatgttcagattttcgttatttccaacggtacgaatacaaaatattattcaaacactacccgcaacgcccatatcaaagaattcgtagaaagcgggcggcggaatagcaaaaagaccggcaatagttttgagtttacctgttattgggccgacgcgggtaacaagattatagccgatttagcggattttaccaagacattttttgcgaggcatacgttgctcaatatcctcacgcggtattgcgttttcacgagcgaggagttattgctcgttatgcgtccgtaccaaatagcggcgaccgagaagatattggggcgtattgcgatgtccgtcaattataagaagacgggggctatagaggccggcgggtatatatggcacactaccggcagcggcaagacgctgaccagtttcaagacggcgcagcttgccacggggttagagggtattgacaaggtgctgtttgtagttgaccgcaaagacttagattatcaaaccatgaaggagtatgaccgttatgaaaagggcgcggcgaacagcaatacctccacgaagattttgcaggcgcagcttgaggattctaacgctcgtattatcattaccactatacaaaaactcgatattttcgtaagcaggaataaagcgcatgatatttataaaaaacatattgtaatcatctttgacgagtgccaccgctcgcaattcggcgatatgcacaaaaagattgttaaggcgttccgcaattaccatatattcggctttacgggcacgcctattttcgcggtcaacgccggggcgggcggcaatccgcttttgcggacgactcagcaggcgtttggcgataagctccatacttataccattgtagacgccatcaacggcggaaacgtgttgccgttccgtattgattttataaataccgtcaaagaaaaagggaatgtgcctgataaaaacgttaaggcgattgatgttgaaagggcgatgggcgccgccgagcgtgtccgtgaggtggtcgcgtatatcattgagcattttgaccagaaaaccaagcgcaattcgttttattcgctgaaagggcagcgcgtcgccggattcaattcgattttcgccgtttcgtctatacctatggcgaagaagtattatgaggagtttaagaaacaacttgcggaacgtaaccgcgatctgtctgttgcggttatattcagttacagcgctaacgaggacgatccggaagacgccttgccggacgaagactttgataatgacaggctggataaaagttcccgcgactttcttgaagcgtcgataggcgattacaacgcaatgttcagcacgaattacgatacatcgtctgacaagtttcagaatttctacaaagacgtttcggagcggatgaaaaagcgtgagatagatttgcttatagttgtgaatatgttcctaaccggcttcgacgctaccacgctcaatacgctgtgggttgataaaaatcttaaactgcatggattgatacaggctttttcccgaaccaaccgaatacttaacagcgttaagactttcgggaacatcgtctgtttccgcgaattgaagcaggccaccgacgaggctatagcgttgttcggcgacaaggatgccggcggcgtagtgcttcttaaaacatacggcgattattacaacggctacgatttaaacggcaaacatcaacccggatatacggaacttatcgccgatttgcttaaacgttatccgctaggagaagcaattataggagagcaatctcaaaaagaatttattaaattatacggcgcgatattacgcataaaaaatatccttacggcgtttgacgattttgagggtaatgaaatcttgagtagcagagattttcaagattatcagagcatttacattgacttatatcaagagttacgtccggcagataagggtgacaaggagaacatcaacgacgatattgtttttgagttggagcttataaagcagattgaggtaaacatagactatatcctgatgcttgtggaaaaatatcatgaatcaaactgcggggataaggctatactcgcaacgattgataagacgatcaattcaagcatagagcttaggagtaaaaaagagttgatagagcgtttcatcgaacgggtgaatctatcggcgcgggttagcgacgactggcagaagttcgtaaacgagcggaaggaagaggatttgaccgcgttgattgccgaagaaaaactgaagtccgaagaagcgcgccgtttcattgaaatggctttccgcaacggcatactgaaaacgacaggaaccgacatagacaaaatcctcccgccggtatcgcgttttgggggagatggaagccgaaccattaaaaaacagagtattatagaaaagttgatgatattttttgaaaaatatcttgggctggtgtaa

SEQ ID NO: 68876 - protein, 1008 aa, Unknown
  Obtained from environmental sample
  DOMAIN (289)...(460): DEAD/DEAH box helicase
  misc_feature (1)..(1008): Xaa is any amino acid
MTAYNIIASTDESTVVAEYSPEYRAVADYQSEADLEREFIRLLAGQGYEYIQIHDESALIKNLRIQLETLNGVTFTDSEWERFFSENVAGANDGIVEKTRKIQDDYIQVLKRDDGTTKNVYLLDKKNIHNNRLQVINQYEESGGARETRYDVTILVNGLPLVHIELKRRGVAIREAFNQIKRYQRDSFWAASGLYEYVQIFVISNGTNTKYYSNTTRNAHIKEFVESGRRNSKKTGNSFEFTCYWADAGNKIIADLADFTKTFFARHTLLNILTRYCVFTSEELLLVMRPYQIAATEKILGRIAMSVNYKKTGAIEAGGYIWHTTGSGKTLTSFKTAQLATGLEGIDKVLFVVDRKDLDYQTMKEYDRYEKGAANSNTSTKILQAQLEDSNARIIITTIQKLDIFVSRNKAHDIYKKHIVIIFDECHRSQFGDMHKKIVKAFRNYHIFGFTGTPIFAVNAGAGGNPLLRTTQQAFGDKLHTYTIVDAINGGNVLPFRIDFINTVKEKGNVPDKNVKAIDVERAMGAAERVREVVAYIIEHFDQKTKRNSFYSLKGQRVAGFNSIFAVSSIPMAKKYYEEFKKQLAERNRDLSVAVIFSYSANEDDPEDALPDEDFDNDRLDKSSRDFLEASIGDYNAMFSTNYDTSSDKFQNFYKDVSERMKKREIDLLIVVNMFLTGFDATTLNTLWVDKNLKLHGLIQAFSRTNRILNSVKTFGNIVCFRELKQATDEAIALFGDKDAGGVVLLKTYGDYYNGYDLNGKHQPGYTELIADLLKRYPLGEAIIGEQSQKEFIKLYGAILRIKNILTAFDDFEGNEILSSRDFQDYQSIYIDLYQELRPADKGDKENINDDIVFELELIKQIEVNIDYILMLVEKYHESNCGDKAILATIDKTINSSIELRSKKELIERFIERVNLSARVSDDWQKFVNERKEEDLTALIAEEKLKSEEARRFIEMAFRNGILKTTGTDIDKILPPVSRFGGDGSRTIKKQSIIEKLMIFFEKYLGLV

SEQ ID NO: 68877 - DNA, 678 bp, Unknown
  Obtained from environmental sample
  misc_feature (1)..(678): n is a, c, g, or t
atggcgagaagcggagcttacgcgagaaagaagcagtatgagtattataaaaacaatatcatgagcttcgatgaatcggattcagatgttagatggctggcgttaggcgagatagcgactgatatatataggggttttggtataaagcgcgatgaagtaaccgaagcaggaacaccatgcgtccgttacggagagatttataccacctatggcgtatggttcgatacctgcgtatctcatacaaatacaggtacaaagatgttttcatacggtgatattctatttgctataacaggagagaacgttgatgagatatctaaatcgtgtgcctatttggggcaagagacgtgcttcgccggtggagatattgtagtaatgaagcatgagcaaaatcctaaatatttagcctacgcattatcaacgtccaacgctcaagagcaaaagagcaagggtagagtaaaaagtaaggttgttcattcgagcataccagccttgaaagaaatcgtcatacccattccgccccttgccgaacaagaacgcattgccgccattttagaccgtttcaacgccctaaccaccgacatcgcaaccggcctccccgccgaaatatcagcgcgtcagaagcagtatgaatattacagagataaattattaacattcgacggaattaacccatga

SEQ ID NO: 68878 - protein, 225 aa, Unknown
  Obtained from environmental sample
  DOMAIN (30)...(190): Type I restriction modification DNA specificity domain
  misc_feature (1)..(225): Xaa is any amino acid
MARSGAYARKKQYEYYKNNIMSFDESDSDVRWLALGEIATDIYRGFGIKRDEVTEAGTPCVRYGEIYTTYGVWFDTCVSHTNTGTKMFSYGDILFAITGENVDEISKSCAYLGQETCFAGGDIVVMKHEQNPKYLAYALSTSNAQEQKSKGRVKSKVVHSSIPALKEIVIPIPPLAEQERIAAILDRFNALTTDIATGLPAEISARQKQYEYYRDKLLTFDGINP

SEQ ID NO: 68879 - DNA, 624 bp, Unknown
  Obtained from environmental sample
  misc_feature (1)..(624): n is a, c, g, or t
ttgaacctaaaggcaaagaaaaattacggtccgctctactccgccccaatggctgtttggttcactctcttttttcttgcgccgatcatcatcatcatcatttacagctttttaaaaaaagggctttacggcggagtagaaaatgtattctcgcttgaagcgtatcactatctaggcgactccgtatttttaagcataacttttcgtaccatagtaacttcaataatagcaacagttattacaattttaatcgctctcccctgcggttatttcatggcaagaagcaaaaatcaaactttactgcttttgcttatcatcattcccttctggacaaattttcttatcagggtattcgcgtggatgactattctgggaaataacggcttccttaatgagatgctgtcccacatcggaatagttaaggattatattcccttcctttacaaccaaaaagccgtaatccttgttttggtttacatgtatctgccctacgctattctgcccttattctcaactatcgataaatttgatttttctttgctggaagcggcgcgcgatctcggcgcgaataaacttgtatcgatgataacgatactgctccaaatatccggggctcggccataa

SEQ ID NO: 68880 - protein, 207 aa, Unknown
  Obtained from environmental sample
  misc_feature (1)..(207): Xaa is any amino acid
MNLKAKKNYGPLYSAPMAVWFTLFFLAPIIIIIIYSFLKKGLYGGVENVFSLEAYHYLGDSVFLSITFRTIVTSIIATVITILIALPCGYFMARSKNQTLLLLLIIIPFWTNFLIRVFAWMTILGNNGFLNEMLSHIGIVKDYIPFLYNQKAVILVLVYMYLPYAILPLFSTIDKFDFSLLEAARDLGANKLVSMITILLQISGARP

SEQ ID NO: 68881 - DNA, 1140 bp, Unknown
  Obtained from environmental sample
  misc_feature (1)..(1140): n is a, c, g, or t
ttgataggcagcaatgttgtcatcaacgggatttgtaaatcctttggtgattttgaagtgctcaaaaatgtgagccttgaaattaaaaagggagaatttttttccctgctgggaccgtcaggatgcggaaaaactacgttgttgcgcataattgccggttttgaacatcctgatgaagggacccttacccttgacggtaacaatgtgctttcgcttcctccaaacaagcgtcatacaaacacggtatttcaaaattacgctctgtttccccacctgtcagtttatgaaaatgtcgctttctcgccgcgcctaaaaaaactttcagaatcggaaataaaaactaaagttgaacaatatttaaaccttgtccgtcttgaaggacacgccgataaaaaacccaatcaattatcgggcggacaaaagcaaagagttgctatagcccgcgctctcattaatgagccgcgcgttctgctgcttgacgagcctctttccgcccttgacgcgaaactgcgtcagcacatgctcatagaacttgatcgtatccacgatgaaatcggcataacatttatttatgtaacgcatgatcaacaggaagcgctttccgtctcagaccgtcttgcggttatgaacctcggcgatattttacaaataggcacgccccatgaaatttacgaaagcccttctaaggattttgtcgcccgttttatcggagagaccaatctgtttgacggcgtaattacaagcgtggaaaaagtaaaaatcagcgagaacagcgacgaaatggaatatcttgcggaagttgaaattccggaattaggcaaaattaaagttaccgatattgacgaggtaaaagtcggacagcgtgtaagttttaccataagaccagaaaaaatcgccattacaaaagaaatgccgactactaaacgtccgtatataaatcatttacagggaatggtagacgagcctatttattccggttttcagacaaagttttatgttaatgtgcaggacaaaactcttatccgcgtaataaaacagcacgctaattattcggacgagggaccggatatccgctggaaggattccgtattcctttcatggagcgccgttgacggctacattgtcgaggttaaaagttga

SEQ ID NO: 68882 - protein, 379 aa, Unknown
  Obtained from environmental sample
  DOMAIN (291)...(375): TOBE domain
  misc_feature (1)..(379): Xaa is any amino acid
MIGSNVVINGICKSFGDFEVLKNVSLEIKKGEFFSLLGPSGCGKTTLLRIIAGFEHPDEGTLTLDGNNVLSLPPNKRHTNTVFQNYALFPHLSVYENVAFSPRLKKLSESEIKTKVEQYLNLVRLEGHADKKPNQLSGGQKQRVAIARALINEPRVLLLDEPLSALDAKLRQHMLIELDRIHDEIGITFIYVTHDQQEALSVSDRLAVMNLGDILQIGTPHEIYESPSKDFVARFIGETNLFDGVITSVEKVKISENSDEMEYLAEVEIPELGKIKVTDIDEVKVGQRVSFTIRPEKIAITKEMPTTKRPYINHLQGMVDEPIYSGFQTKFYVNVQDKTLIRVIKQHANYSDEGPDIRWKDSVFLSWSAVDGYIVEVKS

SEQ ID NO: 68883 - DNA, 648 bp, Unknown
  Obtained from environmental sample
  misc_feature (1)..(648): n is a, c, g, or t
gtgatagaagacgcgctggaaaaactgcacagtcatcctgtaagcctgacaggttcgggcagaactgattcaggcgtccacgcggcggggcaagttgccaacttttacacggatatcgacagcattcccccggatcgtttcgctcccgcgctgaactcatctctgccccatgaagtaagagttcttgaatccggcgaaacagacaaggaatttcacgcccgtttcagcgcaaaggcgcggacttaccgttaccaatttatctgccgtccgctcctgccgcatgaaagccgttacaatcttcaattacgccgtttcccgcgcgtagaaattcttaacgaatacggcagattactcttgggagaaacagattgctccatttttgcgagcgcgggagacacaagcgcctcaaagaaccgctatgtttacagagcgtatttttacatggctgggaacacgcttatttttgaaatctgcgccaacgctttccttcgcagcatggttcgctccgtcgccggaacattccttcactacgaagaagccgacacgccgcctgagaaactgcgggaaataatcgcgtcaggtgagcgagccctcgcgggtcccacactgccccctcagggactcttcctgtggcaagtggaatattaa

SEQ ID NO: 68884 - protein, 215 aa, Unknown
  Obtained from environmental sample
  DOMAIN (1)...(76): tRNA pseudouridine synthase
  misc_feature (1)..(215): Xaa is any amino acid
MIEDALEKLHSHPVSLTGSGRTDSGVHAAGQVANFYTDIDSIPPDRFAPALNSSLPHEVRVLESGETDKEFHARFSAKARTYRYQFICRPLLPHESRYNLQLRRFPRVEILNEYGRLLLGETDCSIFASAGDTSASKNRYVYRAYFYMAGNTLIFEICANAFLRSMVRSVAGTFLHYEEADTPPEKLREIIASGERALAGPTLPPQGLFLWQVEY

SEQ ID NO: 68885 - DNA, 879 bp, Unknown
  Obtained from environmental sample
  misc_feature (1)..(879): n is a, c, g, or t
atggtaaggaaaaaaaagaaagttgaagacgaagataaagaactaaaattaacatatttatcaaaaaaagaatttacctgccccgtttgtaacgcgcaattccgtaaagaagagcttttttcaggcggcggcagattaatagcgggaaaacttacggatgaacttcacaggctttacgatccttcaaaaaaatacggagtaatatttccgcttgtatatgaatcaattgtctgccccgaatgctggtttgcgtccatggaaaatgattttcagttactgccgaaggaaaacgcgggtaaagcaaaagccgatatggaaaaccgccagaaagatactttgtccatttttcccggcgtcgattttcatgaaaacagaactttaatggacggagcggcgtcattgtatcttacattgcgctgttatgattttttcaataaaccgaattcccctacaattaagcagggactcgccgctattcgctgcgcatggcttttagacgaacttaataccaaataccccgatcagcactatgactggcttgcgattcttttccgaaaaaaagcgcattatctttacaacgaagctctttcacgcgagcagagcggcagggaaacgctttccggtataaaaattttcggtcccgacaccgataaaaattacgcttacgaaggaatgttatacatgtgcgcctaccttcgttacaaatacggtcccgcgcacaacgaagatgaaagaaaatcgtctcttgaagacgcgcgccgcacaatagcaaagctcttcggcatgggaaaagcgtcaaaggacaaaccgggcgcgttccttgaacacgcgagaaaactctacgacacaatcaataaggaactttccgaanacgagtga

SEQ ID NO: 68886 - protein, 292 aa, Unknown
  Obtained from environmental sample
  misc_feature (1)..(292): Xaa is any amino acid
MVRKKKKVEDEDKELKLTYLSKKEFTCPVCNAQFRKEELFSGGGRLIAGKLTDELHRLYDPSKKYGVIFPLVYESIVCPECWFASMENDFQLLPKENAGKAKADMENRQKDTLSIFPGVDFHENRTLMDGAASLYLTLRCYDFFNKPNSPTIKQGLAAIRCAWLLDELNTKYPDQHYDWLAILFRKKAHYLYNEALSREQSGRETLSGIKIFGPDTDKNYAYEGMLYMCAYLRYKYGPAHNEDERKSSLEDARRTIAKLFGMGKASKDKPGAFLEHARKLYDTINKELSEXE

SEQ ID NO: 68887 - DNA, 375 bp, Unknown
  Obtained from environmental sample
  misc_feature (1)..(375): n is a, c, g, or t
atgattacgggaataggcattgatataatcgaagttaaacgcatggaacgctggcttgataaatcagagctcctaaaaagatattttcatccgcaggagataacgcttgccttctccagaaaaaaaatcgcggctcaaactcttgccgcaagatttgccgcgaaagaagcgtttggcaaggctctgggaacaggacttgccggaattgaattaaaagatattattgtaattaacaacgacaacggaaaacccgacgtaaaattaacgggaaccgcggaaaatgagtttgtaaaatcgggcgcaaataaagtgcatctttctcttacccatgaaagagaaaacgcaatagccatgatcgttttggagggggcgtaa

SEQ ID NO: 68888 - protein, 124 aa, Unknown; identical to SEQ ID NO: 44080
  Obtained from environmental sample
  DOMAIN (5)...(71): 4'-phosphopantetheinyl transferase superfamily
  misc_feature (1)..(124): Xaa is any amino acid

SEQ ID NO: 68889 - DNA, 396 bp, Unknown
  Obtained from environmental sample
  misc_feature (1)..(396): n is a, c, g, or t
ttggaagtatcagttgttcccgtagatatccatcttcttcttgaacaaaaaataacgcgtaacgtcagcgtatttccggtattgcgggggtctgtcgctgaaggttatgaacttacaagtcaatcgctgactccggcaagcataatagtcgaaggtccgcgttcaataattgacaatcacattgaatttaacaccgaggcaatcgaacttgacaggcgaaatgaggacttttccgtcatggtaaatataaaaaatgataaccctttgctctttattcacggaagcaattttcttgaattccacggctctataagccgtatagcgcgcggagtacatgaaaatattactcatcaggcaataatagaagaagagcatttaccgagcgaggaagaatga

SEQ ID NO: 68890 - protein, 131 aa, Unknown
  Obtained from environmental sample
  misc_feature (1)..(131): Xaa is any amino acid
MEVSVVPVDIHLLLEQKITRNVSVFPVLRGSVAEGYELTSQSLTPASIIVEGPRSIIDNHIEFNTEAIELDRRNEDFSVMVNIKNDNPLLFIHGSNFLEFHGSISRIARGVHENITHQAIIEEEHLPSEEE

SEQ ID NO: 68891 - DNA, 516 bp, Unknown
  Obtained from environmental sample
  misc_feature (1)..(516): n is a, c, g, or t
atgatgaaagacccatacaattttgattttttgcgcctatcggataaggtaatggaagcagacctcgaaaaagcgcttgtgcaacatatttcgcaatttctgctggaattgggtataggatttgcttacatgggacggcagtttctgttgaaagtcgggaagaaagagtatcgtaccgatttgttgttttatcacacgcggttgaaatgttacgtggttatcgaattgaaaacaaaagagtttgaacctgaatttatcggaaaattgaatttttacatcacggcgattaatgaactagtgaaagataaccaagataaaccggctatcggtatactattatgcaaaaacaaagacaattatgaggtggagttttcgctcaaagatgtaaacaatcccataggcgtgagcactttccattataccgagctggatgacaatataaaagccgcattgccatcgatggaagaattgcaaaatgagcttttaacttttgaacgtgagcatgggaatagataa

SEQ ID NO: 68892 - protein, 171 aa, Unknown
  Obtained from environmental sample
  DOMAIN (1)...(154): Protein of unknown function (DUF1016)
  misc_feature (1)..(171): Xaa is any amino acid
MMKDPYNFDFLRLSDKVMEADLEKALVQHISQFLLELGIGFAYMGRQFLLKVGKKEYRTDLLFYHTRLKCYVVIELKTKEFEPEFIGKLNFYITAINELVKDNQDKPAIGILLCKNKDNYEVEFSLKDVNNPIGVSTFHYTELDDNIKAALPSMEELQNELLTFEREHGNR

SEQ ID NO: 68893 - DNA, 957 bp, Unknown
  Obtained from environmental sample
  misc_feature (1)..(957): n is a, c, g, or t
atgttaattgatggattacttaagcgtaacgatgtttttttatgggagaattgcggcgcaatgcgaaaaatagtgataaccggcgcgactagtatgatcggttccgctttagctagatgcacgcttgagcggggggcggatgttctctgtattgtgcggaagggtacggggcggcttgataaccttccgaaatcggagcggcttgaagtcgtttatgccgatatagcggaatacgcggggcttgatgtttccgggggttacgatgttttctgtcatctcgcgtgggagaaaacttccgcggcttcccgtgatgatattgatgtgcaggtcgcgaatgttcagtatactttggatgctgttcgtctcgcgaagcgtttggggtgtaaaaagtttgtcggcgcgggttctcaggcggagtacggtgtcgtagccgtgccgctgaggtccgatacgccggtgaatccgcagagcggttacggtgtggcgaaatacgccgcgggcaggttgagccggttgcattgttctcagcttggtttacagttcaactgggtgagaatactgagcgtttacggtccatttgacggggcgcatacgcttattatgtacgcgatacgtgaattacgggcggggcgttcgccggagttttccaaatgcgaacagatttgggactatctgtactgcgacgacgcggccagagcgcttcttgccgtcggggatagcggggtggacggcaaaacgtatccgctcggttcgggtcaggcgcgtaggctgtcggaatatattgaaacgctcaggggcgttgttaatccggcggggacattgcagttcggtaagaaagagtatcatccgcatcaaccgatgtatttatgcgcggatatttcggaattgaccgacgataccggatggaggccggaggtctcgtttgaggaaggtgttgggcgcgtcctacaccgatag

SEQ ID NO: 68894 - protein, 318 aa, Unknown
  Obtained from environmental sample
  DOMAIN (26)...(234): Male sterility protein
  misc_feature (1)..(318): Xaa is any amino acid
MLIDGLLKRNDVFLWENCGAMRKIVITGATSMIGSALARCTLERGADVLCIVRKGTGRLDNLPKSERLEVVYADIAEYAGLDVSGGYDVFCHLAWEKTSAASRDDIDVQVANVQYTLDAVRLAKRLGCKKFVGAGSQAEYGVVAVPLRSDTPVNPQSGYGVAKYAAGRLSRLHCSQLGLQFNWVRILSVYGPFDGAHTLIMYAIRELRAGRSPEFSKCEQIWDYLYCDDAARALLAVGDSGVDGKTYPLGSGQARRLSEYIETLRGVVNPAGTLQFGKKEYHPHQPMYLCADISELTDDTGWRPEVSFEEGVGRVLHR

SEQ ID NO: 68895 - DNA, 423 bp, Unknown
  Obtained from environmental sample
  misc_feature (1)..(423): n is a, c, g, or t
ttgccgccgacgcggcgcttatcatcgccgcaaaacgtttgcaacggactggccatatacccaaacgtaatcgccaaacacataaaagaagaactcccgttcatggccacggaaaacatcatcatggaagccgtaaaacacggcggcgacagacagacactgcacgaacacatccgcgtacactctatggaagccggcaaaaaggtaaaagttgacggaggggaaaacgacctgctgaaacgcatcgccggagacgaaatcttcggaatgacggaagccgaccttgccgccctgttggacgtaaaacagttcatcggcagagcgccggaacaagtaagagaattcatcgcggagtacgtcgacccgattattgagaccggcaaaacctacggcacgccggaacaaggggaactatcggtgtag

SEQ ID NO: 68896 - protein, 140 aa, Unknown
  Obtained from environmental sample
  misc_feature (1)..(140): Xaa is any amino acid
MPPTRRLSSPQNVCNGLAIYPNVIAKHIKEELPFMATENIIMEAVKHGGDRQTLHEHIRVHSMEAGKKVKVDGGENDLLKRIAGDEIFGMTEADLAALLDVKQFIGRAPEQVREFIAEYVDPIIETGKTYGTPEQGELSV

SEQ ID NO: 68897 - DNA, 1230 bp, Unknown
  Obtained from environmental sample
  misc_feature (1)..(1230): n is a, c, g, or t
atggacaacaacagctacgtaaaccccctatccgaccgctacgccggccccgaaatgctccggctgttctcgccccagtacaagttctccacctggcgccgcctctggtgcgccctggccgaggcggagagggagctcggactgcccatcaccgaagagcagatcgccgaaatgcgcaaacacgtcgccgatatagacttcgacgccgcccgggagttcgaaaaacagacgcgccacgacgtcatggcccacatcgcggccttcggcgcaatatgccccgcggcgaaacccatcatacacctaggcgccacaagcgctttcgtgggcgacaacaccgacctgatacagatgcgcgaaggctgccgcatcctcctcgggcggctcgcgaccctgctctccgtactcaaaacgttcgctctcgacaacgccgatagggccactctaggcttcacccacttccagccggcgcagctaaccaccgtaggcaaacgggcttgcctatggatctacgacctcctgatggacttcgaggagctccggcgcttcgagtccgcattgaaattccgcggcgtgaaaggcgccaccggaacgcaggcctcgttcctcaacctcttcgacggagaccgcgaaaaggtcaggacgctcgataaaaacgtcgcccgaaaaatgggcttcgacgaggtattccccgtcaccggccaaacgtacacgagaaaggtggactcgcaaatcgcctccatcctgagcggccttgcccaatctctgcacaaactggccaacgacatccgactgctgcagcacctgaaggagatagaagaaccgtttgaaaaaggacaggtgggctcctccgccatggcctacaaacgcaaccccatgcgcagcgagcgcctcaccgccctctgccgcttcctaatctcaaacgccctctcccccgccatgaccgccgcggagcagtggttcgagcgcaccctcgacgactcggcgaacaaacgcctatccataccgcagtcgttccttgccgccgacgcggcgcttatcatcgccgcaaaacgtttgcaacggactggccatatacccaaacgtaatcgccaaacacataaaagaagaactcccgttcatggccacggaaaacatcatcatggaagccgtaaaacacggcggcgacagacagacactgcacgaacacatccgcgtacactctatggaagccggcaaaaaggtaaaagttga

SEQ ID NO: 68898 - protein, 409 aa, Unknown
  Obtained from environmental sample
  DOMAIN (12)...(305): Lyase
  misc_feature (1)..(409): Xaa is any amino acid
MDNNSYVNPLSDRYAGPEMLRLFSPQYKFSTWRRLWCALAEAERELGLPITEEQIAEMRKHVADIDFDAAREFEKQTRHDVMAHIAAFGAICPAAKPIIHLGATSAFVGDNTDLIQMREGCRILLGRLATLLSVLKTFALDNADRATLGFTHFQPAQLTTVGKRACLWIYDLLMDFEELRRFESALKFRGVKGATGTQASFLNLFDGDREKVRTLDKNVARKMGFDEVFPVTGQTYTRKVDSQIASILSGLAQSLHKLANDIRLLQHLKEIEEPFEKGQVGSSAMAYKRNPMRSERLTALCRFLISNALSPAMTAAEQWFERTLDDSANKRLSIPQSFLAADAALIIAAKRLQRTGHIPKRNRQTHKRRTPVHGHGKHHHGSRKTRRRQTDTARTHPRTLYGSRQKGKS

SEQ ID NO: 68899 - DNA, 1308 bp, Unknown
  Obtained from environmental sample
  misc_feature (1)..(1308): n is a, c, g, or t
atggatagcggtaaaaggaatgacggtgaggtggatatcttcgatccggccggtgccaggtcggggtcggtttcgtccgtggagcacatagagacggagaccaatgtgttttccatggacacgttgcggcgtgcggcggcgcagcacggcggcaccgatacaggcagtttcgaggtctcggcgccgaagcgggcggcggacgataccgcgtcaaaaacatcgggcgcgggcggcggcgagtccggcgtatttgaactctcggttcccgctcaatccgcggacgacgcggttgacttcgatcagtcggcgtcaacaacctccggcaccggtattgataccttggaggatccccttgacgatgattttccccaaaataaaggcgggttcttctccaaactgttccggttcggcggacgcggtaaagaggatgaggaattggacgatttgtcgctagacgacgatgttctcatagctccgccgctggcatccgagcgggcgtcgggcaacgggtcggcggccgccgttaccgactccggcgttttcgagcttgggccgtcggcaaaagaatccgttcccgaaacgagtgacgagccggcgtctgtcgccgcggcgccagaagtgaccgattccggcgtgttcgagtttaagccgccggcggacgaggccgtttctgagacggttgacgaaacgagcgatgaaccggcgtccgtcgccacggtgcctgaagtgaccgattccggcgtgttcgagtttaagccgccggcggacgaggccgtttctgagacggttgacgaaacgagcgatgaaccggcgtccgtcgccacagtgccagaagtgaccgattccggcgtgttcgagtttaaaccgccggcggacgaggccgtttctgaaacggttgacgaaacgagtgatgaaccggcgtccgtcgccacggtgccagaagtgaccgattccggcgtattcgagtttaagccgccggcaaatgaatccgagtctgaaacgattgatgaaccggcgcccgccgccgtagtgacagaggtaacggactccggcatatttgaacttagcccctccgccgcgccgtccgcgccgcatggcgcccgtaagagcggcgacgagtgggagattggttgggagccagaggacgacgggtccggggctgccgccgagtttgacgtgtcgggcgacgccggagcccgcgccgccgcgccgtccgccgccgaaacggaaacagagaccccgccccccgtgttcacaaagctagcgcacgttttgctggtatgtaaaagacctccacccgtccggtga

SEQ ID NO: 68900 - protein, 435 aa, Unknown
  Obtained from environmental sample
  misc_feature (1)..(435): Xaa is any amino acid
MDSGKRNDGEVDIFDPAGARSGSVSSVEHIETETNVFSMDTLRRAAAQHGGTDTGSFEVSAPKRAADDTASKTSGAGGGESGVFELSVPAQSADDAVDFDQSASTTSGTGIDTLEDPLDDDFPQNKGGFFSKLFRFGGRGKEDEELDDLSLDDDVLIAPPLASERASGNGSAAAVTDSGVFELGPSAKESVPETSDEPASVAAAPEVTDSGVFEFKPPADEAVSETVDETSDEPASVATVPEVTDSGVFEFKPPADEAVSETVDETSDEPASVATVPEVTDSGVFEFKPPADEAVSETVDETSDEPASVATVPEVTDSGVFEFKPPANESESETIDEPAPAAVVTEVTDSGIFELSPSAAPSAPHGARKSGDEWEIGWEPEDDGSGAAAEFDVSGDAGARAAAPSAAETETETPPPVFTKLAHVLLVCKRPPPVR

SEQ ID NO: 68901 - DNA, 1035 bp, Unknown
  Obtained from environmental sample
  misc_feature (1)..(1035): n is a, c, g, or t
ttggaaggcctagcttgctgtaaatttcaccggacgggtggaggtcttttacataccagcaaaacgtgcgctagctttgtgaacacggggggcggggtctctgtttccgtttcggcggcggacggcgcggcggcgcgggctccggcgtcgcccgacacgtcaaactcggcggcagccccggacccgtcgtcctctggctcccaaccaatctcccactcgtcgccgctcttacgggcgccatgcggcgcggacggcgcggcggaggggctaagttcaaatatgccggagtccgttacctctgtcactacggcggcgggcgccggttcatcaatcgtttcagactcggattcatttgccggcggcttaaactcgaatacgccggaatcggtcacttctggcaccgtggcgacggacgccggttcatcactcgtttcgtcaaccgtttcagaaacggcctcgtccgccggcggtttaaactcgaacacgccggaatcggtcacttctggcactgtggcgacggacgccggttcatcgctcgtttcgtcaaccgtctcagaaacggcctcgtccgccggcggcttaaactcgaacacgccggaatcggtcacttcaggcaccgtggcgacggacgccggttcatcgctcgtttcgtcaaccgtctcagaaacggcctcgtccgccggcggcttaaactcgaacacgccggaatcggtcacttctggcgccgcggcgacagacgccggctcgtcactcgtttcgggaacggattcttttgccgacggcccaagctcgaaaacgccggagtcggtaacggcggccgccgacccgttgcccgacgcccgctcggatgccagcggcggagctatgagaacatcgtcgtctagcgacaaatcgtccaattcctcatcctctttaccgcgtccgccgaaccggaacagtttggagaagaacccgcctttattttggggaaaatcatcgtcaaggggatcctccaaggtatcaataccggtgccggaggttgttgacgccgactga

SEQ ID NO: 68902 - protein, 344 aa, Unknown
  Obtained from environmental sample
  misc_feature (1)..(344): Xaa is any amino acid
MEGLACCKFHRTGGGLLHTSKTCASFVNTGGGVSVSVSAADGAAARAPASPDTSNSAAAPDPSSSGSQPISHSSPLLRAPCGADGAAEGLSSNMPESVTSVTTAAGAGSSIVSDSDSFAGGLNSNTPESVTSGTVATDAGSSLVSSTVSETASSAGGLNSNTPESVTSGTVATDAGSSLVSSTVSETASSAGGLNSNTPESVTSGTVATDAGSSLVSSTVSETASSAGGLNSNTPESVTSGAAATDAGSSLVSGTDSFADGPSSKTPESVTAAADPLPDARSDASGGAMRTSSSSDKSSNSSSSLPRPPNRNSLEKNPPLFWGKSSSRGSSKVSIPVPEVVDAD

SEQ ID NO: 68903 - DNA, 636 bp, Unknown
  Obtained from environmental sample
  misc_feature (1)..(636): n is a, c, g, or t
gtgtattccggttgggttgaactgcgtcctacgctcaacaaagcctacaaatgggttttccaagccctattggatattaaatcctccatccctttccctctcataggcatagacagcgataacggtgccgagtttatcaataccgccatgctcagatggtgccaagatgaacacatccagttcacgcgtacaagggcgtaccgtaaaaacgacaactgtttcgttgaacaaaaaaactacacctgcgtcagaaacttcgtaggttattaccgcttctccgctgcagccgaatgcgacgctctggctgcggtctaccgttcactgtgtcccttgatgaattactttatacctaccatcaagcttataagcaaaaaaagagttggtgcaaaaataaaaaaggtgtatgataaaaaaattatcagcccttaccggcggcttctggcttcggatgatctttcacttgaagctaaagcggaactgaccagacgctttgccctgtacgatcctgttaagctccagagggaagtccacaacgctgttgatgccttggtatcgctgaataaggctgtaaatcttgaaggcgggaaatccctgcgccaacttgttggcgatgtttcctcccttcattccgtctga

SEQ ID NO: 68904 - protein, 211 aa, Unknown
  Obtained from environmental sample
  misc_feature (1)..(211): Xaa is any amino acid
MYSGWVELRPTLNKAYKWVFQALLDIKSSIPFPLIGIDSDNGAEFINTAMLRWCQDEHIQFTRTRAYRKNDNCFVEQKNYTCVRNFVGYYRFSAAAECDALAAVYRSLCPLMNYFIPTIKLISKKRVGAKIKKVYDKKIISPYRRLLASDDLSLEAKAELTRRFALYDPVKLQREVHNAVDALVSLNKAVNLEGGKSLRQLVGDVSSLHSV

SEQ ID NO: 68905 - DNA, 1566 bp, Unknown
  Obtained from environmental sample
  misc_feature (1)..(1566): n is a, c, g, or t
atgacagaatcatctctctttaaaaccacaaacaacatcctcaccgccgccgcaatgaagcgcgtcgatcaacttgcgataaacggcaatcttgacacaggatactcctacatgcgcgccgccggcaggcacatttttcaaacggcgctggcaatgttgggagaaaataaaaatgccgccgtaatttgcggcaagggtaataacggcggagacggctatgtcgcggcgaagatgctccgggaggcgggaatcaatgttgattgtttttccgtctgcgacacaaaagatttaagcggcgaagcgtttttggcgtttaaggattacattgtttttaaaaacggctccgtcttcatactttcaagtaatgaagaattacccgactttagccattacgatttgataatcgacgcgatgcttggaatcggggcgagcggagagccgcgcggattgtacgcggatgtgatcaaggctgtaaactcgtgcaatgtttctgttttagcggttgatattccgtcggggcttgattgcgacagcggaaagtgtacttcaatttgcataaaagccgattgcaccgttgccgccggatttttcaagctggggcaatttttttacccgggcagagccaacgccggcaaattgcaaatagccgatttgggttatccggcggatattgttgaagagcagtccatcgggatttttttgccggacattgattttttccgccgcgttctgcccgcacgcaaggaaaacggatcaaaaattgatcacggacttgcgctccttttgtgcggctctcgcggaatgaccggcgccgccgcgctcgcgtcaatggccgcgcttcgcagcggatgcggaatggttcatctggctgtgcccgaatcacttgttaacacattagctgttaaagttacggaacctgttttacatcctctgactgaaaccgcttccggcgtctgcgcagtgtccgcgctgaatgaagtcctttcgctctgcgaacgcatgaacgctctttgtatcggttccggtttgtcgagagacccgcagaccgcgtctttggttcgggagcttatcggtaaaacggacaagcccgccgtgattgacgcggacggccttaacgcgtttgcgggttgtctgccggaatttgcaaaacacaagggggagattgtcattaccccgcacatgggagagtggaaaagactttttggcgaactgcccgatgagccgcttgaacgcataaacaagctcagagaatacgcggctcaatacaatgtaaatattttattgaaaggaagcccctctttggcggtcagcccgaaagggaccgcagtcattcttccttttggaaattcctctctggcgaaagccggaacaggagacgttctgggcggcattattgtctcccttatcgcgcagggctgctcctgtttcgaagcggcgattttgggcgcgtacctgcacggggaggcgggacgacttgcgggtttagacctcaccgagtactcggtgctggctggcgatttgatgcggtatattccggaagtgattaagggcgttataagcaaataa

SEQ ID NO: 68906 - protein, 521 aa, Unknown
  Obtained from environmental sample
  DOMAIN (30)...(200): YjeF-related protein N-terminus
  misc_feature (1)..(521): Xaa is any amino acid
MTESSLFKTTNNILTAAAMKRVDQLAINGNLDTGYSYMRAAGRHIFQTALAMLGENKNAAVICGKGNNGGDGYVAAKMLREAGINVDCFSVCDTKDLSGEAFLAFKDYIVFKNGSVFILSSNEELPDFSHYDLIIDAMLGIGASGEPRGLYADVIKAVNSCNVSVLAVDIPSGLDCDSGKCTSICIKADCTVAAGFFKLGQFFYPGRANAGKLQIADLGYPADIVEEQSIGIFLPDIDFFRRVLPARKENGSKIDHGLALLLCGSRGMTGAAALASMAALRSGCGMVHLAVPESLVNTLAVKVTEPVLHPLTETASGVCAVSALNEVLSLCERMNALCIGSGLSRDPQTASLVRELIGKTDKPAVIDADGLNAFAGCLPEFAKHKGEIVITPHMGEWKRLFGELPDEPLERINKLREYAAQYNVNILLKGSPSLAVSPKGTAVILPFGNSSLAKAGTGDVLGGIIVSLIAQGCSCFEAAILGAYLHGEAGRLAGLDLTEYSVLAGDLMRYIPEVIKGVISK

SEQ ID NO: 68907 - DNA, 408 bp, Unknown
  Obtained from environmental sample
  misc_feature (1)..(408): n is a, c, g, or t
atgtacactttaggaagcggctatattccgtcgtcaaatcacgcaggcggtttgcgttatcacggaatgaattctaccttgtcgcagttgtatgctgatggacttatggaagcgcgttcaatagagcagacgaaagtatttgacgcggcggtacttttcgccaaaaccgaaggaattttacccgcgcccgaatcgtcgcacgcgatctgcgctgcaatagacgaagccataaaggcgaaagaaacgggacaaaagaaaaagattttatttgggctcacgggaacaggatattttgatatgactgcttatgcgcaatataacgcaaaaacaatgagcgattgtattccaagcgatgaagatttggcaaaaggcttcaattctattccgaatatcgctgttaatgtttaa

SEQ ID NO: 68908 - protein, 135 aa, Unknown
  Obtained from environmental sample
  misc_feature (1)..(135): Xaa is any amino acid
MYTLGSGYIPSSNHAGGLRYHGMNSTLSQLYADGLMEARSIEQTKVFDAAVLFAKTEGILPAPESSHAICAAIDEAIKAKETGQKKKILFGLTGTGYFDMTAYAQYNAKTMSDCIPSDEDLAKGFNSIPNIAVNV

SEQ ID NO: 68909 - DNA, 363 bp, Unknown
  Obtained from environmental sample
  misc_feature (1)..(363): n is a, c, g, or t
atggcgcaaattccatataaaattcatttaacagaagatgaaacgccgaaacaatggttgaatttacgggcgtttatgaaaaacaaaccggcgccgcttttacatccccagacgcttaaacctgctaaggcagaggatttacagccggtattctgtgatgaatgtataaaacaggaattggatataacttcaaaatttatagatattcctaaaggtatactcgaattttacaagggatatcgtccgtctgcgttggttcgcgcgtattttttagaaaaaacactcgatacgccggcagaaatttattacaaatacgaaggaacaaacacaagcggttcgcataagaggaaaattcgcgtatga

SEQ ID NO: 68910 - protein, 120 aa, Unknown
  Obtained from environmental sample
  misc_feature (1)..(120): Xaa is any amino acid
MAQIPYKIHLTEDETPKQWLNLRAFMKNKPAPLLHPQTLKPAKAEDLQPVFCDECIKQELDITSKFIDIPKGILEFYKGYRPSALVRAYFLEKTLDTPAEIYYKYEGTNTSGSHKRKIRV

SEQ ID NO: 68911 - DNA, 936 bp, Unknown
  Obtained from environmental sample
  misc_feature (1)..(936): n is a, c, g, or t
gtgtcggaccgntaccatgacgcaactcatgagtccatactccccatacccatagacccaaatgcgcacaattggggcaacaactggacaataacaactccgcccactgttgtacaagcaggtatagaaacagatacttgcacgcataacacatcgcacaccagaactcgatcaataaccgccgcaacctttaccgatattgccgatttagaaacatatctatccggtttggacgacaataccgcccccgccgcgtataccgttaaattgaacgtgaatagtttgggcagcgccaacatcaccggaagcgttggggcgattttgaaagacaacagcgacaaatacgtcagccttgatctatccggcagcgccataaccggcattgaagattccgcttttctgtcttgcgcaaaccttaccagtgtaaacataccgaacaatgttaccagtattggagagcgcgcttttgacggttgtaccggtcttgccagcgtaaacattcccaatggcgttaccagcatagggagtaatgcttttaaccgttgcatcagtcttgcaagtataaacattccgaatagtgtaacaagtatcggtattgccgcttttcagtcttgcgccggtcttacaagtattataataccaagcagcgttactgaaataaaaggttccgtttttaaccgttgtaccagtcttaccagcgtaaccatacccgccaatgttaccaagatcggggattggagttttggcaacaatacaaaccttacaagcgtaacatttaaaggaacgattactgcggctaattttggcagtcccggcgcattccttggcgatttacgggacgtattttacgcgacaaattcaactaacggcacacccggaacatataccacaaccgcgcctgtgagcgccagttctgtgtggacgaaacagaattaa

SEQ ID NO: 68912 - protein, 311 aa, Unknown
  Obtained from environmental sample
  misc_feature (1)..(311): Xaa is any amino acid
MSDRYHDATHESILPIPIDPNAHNWGNNWTITTPPTVVQAGIETDTCTHNTSHTRTRSITAATFTDIADLETYLSGLDDNTAPAAYTVKLNVNSLGSANITGSVGAILKDNSDKYVSLDLSGSAITGIEDSAFLSCANLTSVNIPNNVTSIGERAFDGCTGLASVNIPNGVTSIGSNAFNRCISLASINIPNSVTSIGIAAFQSCAGLTSIIIPSSVTEIKGSVFNRCTSLTSVTIPANVTKIGDWSFGNNTNLTSVTFKGTITAANFGSPGAFLGDLRDVFYATNSTNGTPGTYTTTAPVSASSVWTKQN

SEQ ID NO: 68913 - DNA, 1365 bp, Unknown
  Obtained from environmental sample
  misc_feature (1)..(1365): n is a, c, g, or t
atgtcccttaacgcgcggacaaccaactcaaccgagattatctccctgaaattgcctatatgcaccgtgcccgaaggtgtaatccccgaggcgcaggtatataattccttctcgcccttttcgcggacaatcttcgccgcgcactcatccgcccaatgcacagtctttttatcgtctttcattctatgctttcctttgttatctgttccctcttccattgctcattgctcattgctcattgtgatcatccttattctgttatgcggttgttcaggcggccccgccgcgcgacgggccaacctcatgaaaaacttccccttcccccgcgccgaggttgaaccatcccccaacaaaaaacgcctgttgaactatcttaacgacgtatacggcaaatatatcatttcgggtcaaatggacaccgcgtggactaccaacgaaagaatggacatgatagcccgtgtttatttcgatacgggcaagtatccggcgcttaaaggttttgactttatcgaccttcccaataattggggcggctatggcaaagatcaggttgacgaggcaattgaatggtgggaaggcaaaaataaaatgtacggtacagcgcccgcagcacagcttttgccggacaagccgaatattcacggcatcgtatccttctgctggcactggcgggccggttcggaaaatgatttttacacaaacaagactacttttcgcattccatggaaagacggcaaactggataccgatagcgccgctttcaaaaacacaataaaaagcgatttggacaaagctgccgccctattacaattgttaaaagacaaggatattcccgtactctggcggccattgcacgaagcttccggcggctggttctggtggggggcaagcggagagaagccgtacatcgccttgtgggaatatatgtacagttacctgacaaacgacaagaaactggacaatctgatatgggtatggaacggacagaacaaagattggtttcccaaccctaagactgtacacattgtgggctatgacgtgtatccacaaaaaccaaaggactattcctcgcaatacgccaaatttaaggagacacttgagatggttcccgcgagagaccgcatagtcgccatgacggaaaacggagaaatccccgacccggacaagtgccggcaggataacgcgatgtggtcatggtttatgacatggaacgatgccggtaatgccaacggcgagaccaagagcggcaatttttggaccggagaatatcacaataccaacgaccataaaaaccatgtctacaatcataatctggttataacgctggacgaactgccggatttaaccacataccgcatggaatga

SEQ ID NO: 68914 - protein, 454 aa, Unknown
  Obtained from environmental sample
  DOMAIN (112)...(444): Glycosyl hydrolase family 26
  misc_feature (1)..(454): Xaa is any amino acid
MSLNARTTNSTEIISLKLPICTVPEGVIPEAQVYNSFSPFSRTIFAAHSSAQCTVFLSSFILCFPLLSVPSSIAHCSLLIVIILILLCGCSGGPAARRANLMKNFPFPRAEVEPSPNKKRLLNYLNDVYGKYIISGQMDTAWTTNERMDMIARVYFDTGKYPALKGFDFIDLPNNWGGYGKDQVDEAIEWWEGKNKMYGTAPAAQLLPDKPNIHGIVSFCWHWRAGSENDFYTNKTTFRIPWKDGKLDTDSAAFKNTIKSDLDKAAALLQLLKDKDIPVLWRPLHEASGGWFWWGASGEKPYIALWEYMYSYLTNDKKLDNLIWVWNGQNKDWFPNPKTVHIVGYDVYPQKPKDYSSQYAKFKETLEMVPARDRIVAMTENGEIPDPDKCRQDNAMWSWFMTWNDAGNANGETKSGNFWTGEYHNTNDHKNHVYNHNLVITLDELPDLTTYRME

SEQ ID NO: 68915 - DNA, 354 bp, Unknown
  Obtained from environmental sample
  misc_feature (1)..(354): n is a, c, g, or t
atgtacgatcggcttcagtggacggcccctgtattgcccgctaattatcaaagcattacccccgaatgtccctggtgcggaaaacagataaaagacgttaactgcgccatagcggataaagaaacaggccgccccgttcattttgactgcgtactcgcgcggattacggacatggtaactctggaaacaaacgacgccgtctgttatataggcggcgggcgcttcggtgtaatccattataataatccgccggatataaaggactttatcataaagagaatcatagagtgggaagtgaaagataacagcaccgattggcgtatgccgataagcgaacatttttcgattacctga

SEQ ID NO: 68916 - protein, 117 aa, Unknown
  Obtained from environmental sample
  misc_feature (1)..(117): Xaa is any amino acid
MYDRLQWTAPVLPANYQSITPECPWCGKQIKDVNCAIADKETGRPVHFDCVLARITDMVTLETNDAVCYIGGGRFGVIHYNNPPDIKDFIIKRIIEWEVKDNSTDWRMPISEHFSIT

SEQ ID NO: 68917 - DNA, 1194 bp, Unknown
  Obtained from environmental sample
  misc_feature (1)..(1194): n is a, c, g, or t
ttggcgtatgccgataagcgaacatttttcgattacctgaggaaaataatgcgggatatttttttagacgatgatagtaaacagcacgattttctttccaacccggagattgtaaaaaacgaggctttgcttaaggaaatcggcgtccttgattacattgaatctatgaaccgccttgtaaacaattacagaagccttcttgtaagagggctggatatattcaaccatatcagcattgatgaaataatgaactccactgtttatcagatatcggatcaatttttaccttcgtttctggcgtttttatggaaacctgttcagacaagggaagacattacaattaaggcgtataaaaattacaaacctgtgaacctgaatttaaatatagacagcatatcgccgtttgaggcttttttcaggcagaatcccaaaccggtaaagtttgatgttttatccagcctgttaaataacgaagaaaatttaaaaccgtatcaggaaataaacaccgagcttgttgttcccattctgggccccttcggattatacggattaattttaatcggcaaaaaaaatcttaacgaggaatacagcagcgaagagctgttttttttgcggcagctcatggcttttgtttcccagggaatcaagaatcatcttcattatgaaaattccctccgcgacgtaaaaacagggttgtacaaccacggttttttccttgcccgccttaccgaagaagtttcacgcacaaggcgcaacaaatactgttctacggtaatagtgattgatgtggacaaatttaaaaattttaacgattcctacggacatcttgccggagacaaagttcttgaatatctcgcacaggtgataaaaaaaggagtgcgcaacgacgatattccctcccgtttcggcggcgaggaatttacggttctcctgccccacacggatcagccgacggcgtggaatgtcgccgaacgccttaggtccaataccgcggacatgaaagtcccgtgggatactccgcttccgcaggtaacaatcagtttgggaatttattcatttgatcaaaattccggcgttgacgtaaacactattatccgccgcgccgacgacgcgttatacacgtcaaaacagcagggacgtaaccgctgtactacatggcatccggggattacacacccgaatcaaggaggctga

SEQ ID NO: 68918 - protein, 397 aa, Unknown
  Obtained from environmental sample
  DOMAIN (221)...(382): GGDEF domain
  misc_feature (1)..(397): Xaa is any amino acid
MAYADKRTFFDYLRKIMRDIFLDDDSKQHDFLSNPEIVKNEALLKEIGVLDYIESMNRLVNNYRSLLVRGLDIFNHISIDEIMNSTVYQISDQFLPSFLAFLWKPVQTREDITIKAYKNYKPVNLNLNIDSISPFEAFFRQNPKPVKFDVLSSLLNNEENLKPYQEINTELVVPILGPFGLYGLILIGKKNLNEEYSSEELFFLRQLMAFVSQGIKNHLHYENSLRDVKTGLYNHGFFLARLTEEVSRTRRNKYCSTVIVIDVDKFKNFNDSYGHLAGDKVLEYLAQVIKKGVRNDDIPSRFGGEEFTVLLPHTDQPTAWNVAERLRSNTADMKVPWDTPLPQVTISLGIYSFDQNSGVDVNTIIRRADDALYTSKQQGRNRCTTWHPGITHPNQGG

SEQ ID NO: 68919 - DNA, 711 bp, Unknown
  Obtained from environmental sample
  misc_feature (1)..(711): n is a, c, g, or t
atgattggcgtaatagccgcaatggaaaaagaattaagcattttatgcgacgcaatgggaaaattcgaaaccgtaaaaataggggtctttgaattttataccggaaaaatcgagggcaaggatgttacgcttttatgctgcggaatcggcaaggtaaacgccgccgtgggctgcgccatgcttattcagcagttcaagccctcctgcgttatcaatacaggttccgccggcggcattgatccgtcgcttaaagttggagacgccgttatttccaccggccttatctatcacgatgttgacgttacggcgtttaactatctccccggccagcttccccgccagccgcaaatttttccggtggacgaaaaattaataaaactcgcggaaaaatccgtagacgaattaaagaaggaaaaagcgcttcccgaaacttttaattattgcggaggcataataggatcgggcgacgcttttatgcacaaacctgaacacatagcggaagtacgtcgtgttttcccgaatatcgccgcggttgaaatggaaggcgccgctatagcccatagctgccatttgttttcagttccggttcttgttatccgcgcgctgtcagatgtcgcgggtacggaatcgcctgtgactcatgacgaatttctgcctatagcgtccaaacattccgccgagatagttataaggatagtccgcgggctgtaa

SEQ ID NO: 68920 - protein, 236 aa, Unknown
  Obtained from environmental sample
  DOMAIN (1)...(233): Phosphorylase family
  misc_feature (1)..(236): Xaa is any amino acid
MIGVIAAMEKELSILCDAMGKFETVKIGVFEFYTGKIEGKDVTLLCCGIGKVNAAVGCAMLIQQFKPSCVINTGSAGGIDPSLKVGDAVISTGLIYHDVDVTAFNYLPGQLPRQPQIFPVDEKLIKLAEKSVDELKKEKALPETFNYCGGIIGSGDAFMHKPEHIAEVRRVFPNIAAVEMEGAAIAHSCHLFSVPVLVIRALSDVAGTESPVTHDEFLPIASKHSAEIVIRIVRGL

SEQ ID NO: 68921 - DNA, 1284 bp, Unknown
  Obtained from environmental sample
  misc_feature (1)..(1284): n is a, c, g, or t
atgaagcgaagcgttctttgcttaacggcgctgtttgtcttcttttctgtttcagctttttctcaaaattctctttacaagccgttcacttcttttagggttattcggacagaacattttgacattatcttcccgaaagaatccgaaccgtccgcccgtcttttggcttctttcgcggacagcgtctatgataaagtaagctccctgctgggcattgaagtaagcggccgtattcccgtaacattttctcctcacatagatttatttaatggttattacagtcagatctttaaccatattgtgctttacgatacgccgcttgatgttgaaaagatggggtataataacaatcttgaaaaacttttcctgcatgaattaacccacgcggtttctttaaacacaagatcaccggcttacaaattaaggcatcgtattttcggcaacctggcttctccttctttttttaacgcgccttattttatggtggaagaggttacggtcagctttgaaagccttgacggcacaggccgggcaaatgatccgcgcgtaaagcaatatctaaggcaggctgttcatgaaaataaattcctgactccgcttcaggcttcaggcgtttttgaccgtccaatccgccccaacggatactggtatgaatacggcggccttttttcggcatggcttcagcaaacttacggcatggaaaaatattcacagctttggaaagaaatgggaaaagattcttctttttctttttttgtatacaggtcagatttttaccggattttcaaaaaagtttacggcgttgaatttacggacgagtggaaaaaattcagcgcaagttttgctttggacggaatggaaaacaatgaggacgaattatcttcaagaaagtaccgttattttgctgaaagagaatattttatcgccggtttaacggcaagaggaaacaacctttattatattgagagctcggaatctaaaataggcgtatataatactttgacaggaaaaacgaaaactattaacgcggcttccggcatttatgatattgatgtttctccggacggaaagactatgctgttgtcaggttataaatatattgaggatcgcgcctttgccattgttaccgaacacaagacggataagggacgaaaaacaggcagggatttcaaagggctttacaaggcgcgttattttcgcggcggtgttatagggctccgttctgaactgcacaacaactgtatgtatacgaaacctttaacggagaaagcgaaattcttttaa

SEQ ID NO: 68922 - protein, 427 aa, Unknown
  Obtained from environmental sample
  SIGNAL (1)...(21)
  misc_feature (1)..(427): Xaa is any amino acid
MKRSVLCLTALFVFFSVSAFSQNSLYKPFTSFRVIRTEHFDIIFPKESEPSARLLASFADSVYDKVSSLLGIEVSGRIPVTFSPHIDLFNGYYSQIFNHIVLYDTPLDVEKMGYNNNLEKLFLHELTHAVSLNTRSPAYKLRHRIFGNLASPSFFNAPYFMVEEVTVSFESLDGTGRANDPRVKQYLRQAVHENKFLTPLQASGVFDRPIRPNGYWYEYGGLFSAWLQQTYGMEKYSQLWKEMGKDSSFSFFVYRSDFYRIFKKVYGVEFTDEWKKFSASFALDGMENNEDELSSRKYRYFAEREYFIAGLTARGNNLYYIESSESKIGVYNTLTGKTKTINAASGIYDIDVSPDGKTMLLSGYKYIEDRAFAIVTEHKTDKGRKTGRDFKGLYKARYFRGGVIGLRSELHNNCMYTKPLTEKAKFF

SEQ ID NO: 68923 - DNA, 2547 bp, Unknown
  Obtained from environmental sample
  misc_feature (1)..(2547): n is a, c, g, or t
atgcgagatatacaagattttgattcgataatgatacggctggcttcacctgatatgatcaggtcgtggtcttacggcgaagtaaaaaaacccgagacgattaattatcgtactctgcgcccggaaaaggaaggtcttttctgcgagcgtatctttggaactaccaaagaatgggaatgttactgcggaaaattcaaatcgatccgttacaagggcgttatctgcgaccgttgcggcgtcgaagttacgcactttaaggtgcgccgtgaaagaatggggcacattgaattagccgctcccgtttcgcatatctggtactatcgttcagtccccagcagaatggggcttctcctcgaccttcccacaggtcagcttcgttccgttctttactatgaaaaatacatcgttatagattcaggcgacaccaacctgaaaaaaggtcagcttctttccgaagaggaatactacgaagcgcaggaacgattcggcggcggctttacagccggaatgggagccgaggcgatcagcgtcttgctggaaaaccttgaccttgatcaaatggcggcagaccttcgggcgaaaatgatcgagaagggcgcaaagaccgataaacgtcttcttaaaagaatcgacattgtagaaaatttccgtaactcaaacaacaaaccgcagtggatgatcctcacggtaattcccgtaattccccccgaacttcgcccgatggttcagcttgacggcggacgtttcgccacaagcgatcttaacgatttgtaccgcagggtaatcaaccgcaacaaccgcttaaaaagactgcaatcgcttaacgctcccgacatcattatccgcaacgaaaagcgaatgttgcaggaagcggttgacgcgttattcgacaattcaaagaagaagaaagttgttaaaggttcttctaaccgtccgcttaaatcaatcagcgatatgctcaaaggaaagcagggacgtttccgccaaaacttgcttggaaagcgcgtggactattcgggtcgttccgtaattacggtcggtcccgatcttaaaatgtggcagtgcggtattcccacgaaaatggcgcttgaattgtttaagccgtttataatgaagaaacttgtcgataaggacgttgtttttaatattaaaaaagcgaaaatgttagtcgagcaggaaacgccagaagtctttgccattttggacgaggttgtaaaagaacaccccgttcttcttaaccgcgccccgacattgcacagacttggtattcaggcgtttgagcctgtgctggttgaaggtaaatcgatcaaacttcatccgcttgtttgtcacgcttttaacgccgactttgacggcgaccagatggcagtccacgttccgctgacgcaggcggctcagatggaatgttggacattgatgctttccgctcgtaacttgctgaaccccgccaacggaaagacaattgtattcccgtctcaggatatggttttgggtattaacttccttacaagaattaaacccaacgctaaacgcccgggttccgataaaccggaaaccaaagacaagataccctattattcgtctcccgaagaagttcttatggcggttgaaagaaaggcgctggacagagaagcggcaattcgtttaagaccgccgaaactcccgatttgggacaaggcgggcaatgtatcagagcctgccgccgacggcacgattgtaacttccgccggaagacttatgtttaacgaagaaatgcccaaagtcttgccgttcatgaactatgaacttaaagacaaagaattgcgcacgcttgttgaatatattttcaaggaaaaaggatcatggattaccgttcagatgctggacgccattaaatcgacgggctaccgttatgcgacagtattcggggcgaccatcggcgttgacgacattgttatccccaaagaaaaaaccgaaatgattgacaaggcgaataaagaagttgagtcaattcagaaacagtggaagcagggtcatattaccaacgaagaacgctacaatcaggttgttcaggtttggacgaaaacaaacgaagaccttacagccatgacgatgaaaaccctcgaatcggacagggacggctttaactcgatctacatgatggcgaactcaggagcgcgcggaagccgcaaccagatacgccagcttgcgggtatgcgcggtcttatggcgaagccgtcgggcgacatcatcgaacttcctatccgttcaaactttaaggaaggactttcggtcatcgaattctttatttcaactaacggcgcgcgcaaaggtcttgccgataccgctcttaaaaccgctgaagccggttatcttacacgccgtcttgtagacatagcgcaggacatggttgtaaatgaggacgactgcggaacaattaacggaactacatactcggctgtcaaacaaggcgaagaaattatcgaaccgttgaaagatcgtattgtaggacgctttactcttgaacgtgttaagcacccgattacaggcgagcttatgtcgatgtaa

SEQ ID NO: 68924 - protein, 848 aa, Unknown
  Obtained from environmental sample
  DOMAIN (478)...(644): RNA polymerase Rpb1, domain 3
  misc_feature (1)..(848): Xaa is any amino acid
MRDIQDFDSIMIRLASPDMIRSWSYGEVKKPETINYRTLRPEKEGLFCERIFGTTKEWECYCGKFKSIRYKGVICDRCGVEVTHFKVRRERMGHIELAAPVSHIWYYRSVPSRMGLLLDLPTGQLRSVLYYEKYIVIDSGDTNLKKGQLLSEEEYYEAQERFGGGFTAGMGAEAISVLLENLDLDQMAADLRAKMIEKGAKTDKRLLKRIDIVENFRNSNNKPQWMILTVIPVIPPELRPMVQLDGGRFATSDLNDLYRRVINRNNRLKRLQSLNAPDIIIRNEKRMLQEAVDALFDNSKKKKVVKGSSNRPLKSISDMLKGKQGRFRQNLLGKRVDYSGRSVITVGPDLKMWQCGIPTKMALELFKPFIMKKLVDKDVVFNIKKAKMLVEQETPEVFAILDEVVKEHPVLLNRAPTLHRLGIQAFEPVLVEGKSIKLHPLVCHAFNADFDGDQMAVHVPLTQAAQMECWTLMLSARNLLNPANGKTIVFPSQDMVLGINFLTRIKPNAKRPGSDKPETKDKIPYYSSPEEVLMAVERKALDREAAIRLRPPKLPIWDKAGNVSEPAADGTIVTSAGRLMFNEEMPKVLPFMNYELKDKELRTLVEYIFKEKGSWITVQMLDAIKSTGYRYATVFGATIGVDDIVIPKEKTEMIDKANKEVESIQKQWKQGHITNEERYNQVVQVWTKTNEDLTAMTMKTLESDRDGFNSIYMMANSGARGSRNQIRQLAGMRGLMAKPSGDIIELPIRSNFKEGLSVIEFFISTNGARKGLADTALKTAEAGYLTRRLVDIAQDMVVNEDDCGTINGTTYSAVKQGEEIIEPLKDRIVGRFTLERVKHPITGELMSM

SEQ ID NO: 68925 - DNA, 393 bp, Unknown
  Obtained from environmental sample
  misc_feature (1)..(393): n is a, c, g, or t
ttgcaccaccttgttgacgacaagatgcacgcccgttcaacaggtccgtactcgcttgttacacagcagccgttgggcggaaaagcgcagttcggcggtcagaggttaggtgaaatggaagtatgggcgcttgaagcgtacggcgctgcgaatacactgcaggaacttttaacgattaagtcggacgatatgacgggacgctccaagatttacgaggcgattgtaaagggagaaccttcaacgaccgccggtattccagaatcgtttaacgtactggttcaggaattgcggggtcttgcgctggacttgtcaatctttgatgtaaaaggaaaacaaataccgctcaccgaaaaagatgaggaattaataactaagtcgggaagtaatttctaa

SEQ ID NO: 68926 - protein, 130 aa, Unknown
  Obtained from environmental sample
  DOMAIN (32)...(108): RNA polymerase Rpb2, domain 7
  misc_feature (1)..(130): Xaa is any amino acid
MHHLVDDKMHARSTGPYSLVTQQPLGGKAQFGGQRLGEMEVWALEAYGAANTLQELLTIKSDDMTGRSKIYEAIVKGEPSTTAGIPESFNVLVQELRGLALDLSIFDVKGKQIPLTEKDEELITKSGSNF

SEQ ID NO: 68927 - DNA, 2328 bp, Unknown
  Obtained from environmental sample
  misc_feature (1)..(2328): n is a, c, g, or t
atgtatgtacgaggaagaaatctttggaaggggggctggagagctgtaccgcataggaaacataggcggtcaatgaggcgcaaaaagcttacaggccttatacttcttgccgttcttttttgtgtaggttttttgctcctccgctttcccgagcttgatgcctttaggaaacgttcctggggaacggttatcagtgaccggaacggcatcgtcctgcgcgttctgcctgccgatgacggcgtcaagcgcgagtgggtgccgttaagcgaaattcctccgggggctgtaaggatatttattcgggctgaggacaggcgcttttattttcattttgggattgatgttttttcgcttgtcgccagcatctataggaatctgaaagccggacgcaccgtatccggggcatccacgattacgatgcagctcgcccggctggtacaccctcactcaggcggcctgcggggaaagatcgttgaagcctgggacgcgattcggctggaagccaacctctcaaaaaaagaaatccttgagctgtacctgaacagcattccctttggcagcaacatcgaggggctggcagcgataaccagggccaggtttggcagttccgtcagagagctggacgacaacagggccgcgctccttgcatcggttcctaggcggcctctcctttatgatccggccttaaaccctgatgcggctgtttccgccgccatggctttgtccgcccgatgccgtctggatttaagggaagaagagctctggcaagcggcaaaggaagccgccatgcccacttccaatcaggatgatccaagggctccgtttttcgcccctcactttaccgagcgccttgccagaatggagccaaaactggtgactgtcaccagaagtaccctcgaccttgccctccagctttttgccgaagaagagcttgccctggaaatctcgcttctttctaacaagcggataagcaacggggcgatcctggcaatagaaaacgaaacaggcgcggtacgggtatacgtcggttcaggctcctggtttaacgaagcggcttcgggaaaaatagacggcgtccgtttccgggcccagcccggctcttgcttaaagcccttcctttacgcaatggctttggacgcgggattcagcccgaacgagatcatgccggatcttcccacggttttcggaagcagggaagcctacgttccctcgaatttcaacaaccgctttaacggccctgtgcggctcaggatcgccctggcctcttcgttaaacatccccgccgtttacgtcctggaacggcttggcgttcgtacttttgaggagtaccttgtcagcctgggttttgattccataaacgaaaccataggaacgcacggtaccggcctcgcccttggcaacgccgaggtaagccttgaagaaatggtgcgggctttctcggtttttccgcgtatgggttcgcctgtggaattccgctggacggaagacggaaaacctttgccgaatcaggccataaagccggtcatgtccccatacgcagcctggatgattgccgacatactctcggacaggtcaagccgcttcgtgggttttggccccgccccgtcactggcaacgccgtttgagtcgatgttcaaaaccggaacagccaaccagtttcagcacatctgggctctgggcgcgacaaggcgttttaccgtgggcgtctggatgggcaatttttcaggagaaaccgtaattggcagtaccggaagctccatccctgccaggatagcggtaaaactccttggcgctctggaagaatccgccgagcaggaaaaggcgcaaagaacgtcaggtaaggtaattgaaaatctggccgggcttttgccgcagggaacaacggaagtgcaaatctgcgccctttcgggtatggcggctggcccctactgtaccgggcttaccagggaatttatacggagcgagaaaattcccaccgtttgcaactggcacacccaggctggactcttttaccccagcgaataccgctcgtggcttagcgaaaggttccgttccggcggcgtgaggcaggaaagaacaggccgcataaggatgccggtttctggcgcgntgttttaccttgacccgtcgcttccgccgaagctcangcgctgcgcgttgaaacctcaggctttagcgaaagcgcggtttttttttgttgagggagaggttgtaggcagcttaaaccacgccggagtttacgcgcttccgctttcgcggggcgcccacagcatcaccgttgcagacgctgagggaagcgccgcctcggcggattttgaggtaaggtga

SEQ ID NO: 68928 - protein, 775 aa, Unknown
  Obtained from environmental sample
  DOMAIN (326)...(597): Penicillin binding protein transpeptidase domain
  misc_feature (1)..(775): Xaa is any amino acid
MYVRGRNLWKGGWRAVPHRKHRRSMRRKKLTGLILLAVLFCVGFLLLRFPELDAFRKRSWGTVISDRNGIVLRVLPADDGVKREWVPLSEIPPGAVRIFIRAEDRRFYFHFGIDVFSLVASIYRNLKAGRTVSGASTITMQLARLVHPHSGGLRGKIVEAWDAIRLEANLSKKEILELYLNSIPFGSNIEGLAAITRARFGSSVRELDDNRAALLASVPRRPLLYDPALNPDAAVSAAMALSARCRLDLREEELWQAAKEAAMPTSNQDDPRAPFFAPHFTERLARMEPKLVTVTRSTLDLALQLFAEEELALEISLLSNKRISNGAILAIENETGAVRVYVGSGSWFNEAASGKIDGVRFRAQPGSCLKPFLYAMALDAGFSPNEIMPDLPTVFGSREAYVPSNFNNRFNGPVRLRIALASSLNIPAVYVLERLGVRTFEEYLVSLGFDSINETIGTHGTGLALGNAEVSLEEMVRAFSVFPRMGSPVEFRWTEDGKPLPNQAIKPVMSPYAAWMIADILSDRSSRFVGFGPAPSLATPFESMFKTGTANQFQHIWALGATRRFTVGVWMGNFSGETVIGSTGSSIPARIAVKLLGALEESAEQEKAQRTSGKVIENLAGLLPQGTTEVQICALSGMAAGPYCTGLTREFIRSEKIPTVCNWHTQAGLFYPSEYRSWLSERFRSGGVRQERTGRIRMPVSGAXFYLDPSLPPKLXRCALKPQALAKARFFFVEGEVVGSLNHAGVYALPLSRGAHSITVADAEGSAASADFEVR

SEQ ID NO: 68929 - DNA, 2889 bp, Unknown
  Obtained from environmental sample
  misc_feature (1)..(2889): n is a, c, g, or t
gtgcgcttttcaggcaaagattcccagggccgctccgccctaacccgctacagtttttacgttaccggtgccggctgggcgctttggggcagagctgattctgacagcatcaccctaaggccggacaagagctcttacgcgccgggagagacggcaaaacttttggtgcagtcccccctgcccaaagggaattacctgctcacgctggaaagggaagggatactcgaagagaggatcatcgagcttgacggctctgccctgaccatcgacattcccatcaaggaatcgtacatacccatcgtgtacgtagccatcgcctcgtttacggtccgatctgggccgccgactcacacttactacgagcctgatttggacaagccaaaaggccttttcggcctgaccagcctttatgttgataacgaaaatcggcattatgcaatcgagattgaagcttccaaaagcgtgtataagccggcggaacaggcggaggtaacgctaaaggtaagccagaacggaaggccggcggcgggcgtagaggtgaccttcatggcagttgatcggggagtggtagatttaatcgactaccacgtgcctgaccctctggcatttttctacagcccctggaattttccgcttggcgtgcggggcgcggacagccgttcgcttctcatcgatcccgtcacctacagcctctcggatctccagggcggcgacgaggaagacaattccaaaatggaggaacgcaaggatttccggcccaccgcggtctttgagccttaccttgttactggcactgacggaaccgtgaaagtgaaattcagcctgccggattcgcttaccacctaccgctgtacggcggtggcttccggcaccagcgatttcggcatcgcggagaaagacctgcgggtgagcgctcctttaacagccgtagcggccctgccccggaagctccgctggcgggacaccggcactgtttccctcatacttaccaatctggaaaataccgccgtcgaagcgaaggtttcggcggcaacagagacgattgaaggcggggtttgggacactgtgcttgagatcgacggggccaaagaaaagacggtgaaaatcaatccgggggccacggcggaagtctctttcagggcggcggcccttggcgcgggagagagcaggatcatctttacccttcagtcgccattggtaaacgagaggataattaaaacccttacggtggacaggcccgtgctttacgaaaccgtcacctccattggcagtcttgcaagcgataatccatttattgaggaaggggtgattcttccttcccttgttcctgaggggacggggagcctttcggtttcgctctcttcttcgaggcttgccctgctgaaagaggcggtgcgttaccttttggattacccctacggctgtctggaacaaaggagcgcgcagttacttccgcttgtagcctttgccgatcgccttgagacttttgaacttgatagcccggttaaaaatcccaaaaaggttattgaagacgagctgtcctttttggcaaaaagccaactgcctgacggttcttttccttactggcccggcgggcaatacggggatcaatatgtgacgctcagggtcgcccacatcgcggcgctcgcaaagcaaaaaggttacgagttcccggcggcaatgaacaaccagaccctgaccaaatacattacagaaaacgatttttcctcaacagtatttaaagaggatcctttccttaaaggttactccctttgggtacgcgccatgtacggggcgcggattggctcagagattaccgccttcttgcggcgtggggacgagctgggcatttcaggctggggcttcgcgggtcttgccgcaatggagctgggcttgagggaccttgctatttccacaagggacagggtaaggcgctttatacgccctggaacacgtactctggatttgactgacacttacgaacgtatgggcaatttctggggctacgattccgaccgttacgcgatagccttgatgctttactatgccctaagcccggcggacgacatgaccacgaggctggtgaattcccttatcgaacgccagcgtcgtggaatatgggcaaacacttcttcgtccttctgggcggttcttgcctttagcaaaattgccgatggcgaagaaaaggagcaaaccggcacgctcaattccaggctttccctgggtggaacaatgcttatggaggccgctttcagtaaagcaggcggtgtgcccgtctcccgcacatgggcttttggggaatccccccttgatacaacggcgaaggacacgcttttgccgcttaggatcgagcaggagggtagtgggcggctttactacacagcgagcctcaagtacgggattcccacagagcttgccacggccagggacgaaggcttgagcgtttttacggaaaccttcgattctgcggcgaaccctgtttcaggcggcgtgcttgtccctggcaaaacctacaccagaaaggtaacggtttccagtcccagggatcgtacctatgtggcgctcagggcgcctatcccgtccggggcggaaattgtagacgcgacttttgttaccagttccacggttccgccaaaagaagacgacaacgagcgggtggattggcgttattaccaggcaccgccggttcggttcatcatggacgatgaagccgttttccactgggactttttccccgcgggaaaaaaggaagttgagttccgcttccgggcggtgatgaacggtatatacccaaccccgcctgctcatgcggaatgtatgtacgaggaagaaatctttggaaggggggctggagagctgtaccgcataggaaacataggcggtcaatga

SEQ ID NO: 68930 - protein, 962 aa, Unknown
  Obtained from environmental sample
  DOMAIN (33)...(195): Alpha-2-macroglobulin family N-terminal region
  misc_feature (1)..(962): Xaa is any amino acid
MRFSGKDSQGRSALTRYSFYVTGAGWALWGRADSDSITLRPDKSSYAPGETAKLLVQSPLPKGNYLLTLEREGILEERIIELDGSALTIDIPIKESYIPIVYVAIASFTVRSGPPTHTYYEPDLDKPKGLFGLTSLYVDNENRHYAIEIEASKSVYKPAEQAEVTLKVSQNGRPAAGVEVTFMAVDRGVVDLIDYHVPDPLAFFYSPWNFPLGVRGADSRSLLIDPVTYSLSDLQGGDEEDNSKMEERKDFRPTAVFEPYLVTGTDGTVKVKFSLPDSLTTYRCTAVASGTSDFGIAEKDLRVSAPLTAVAALPRKLRWRDTGTVSLILTNLENTAVEAKVSAATETIEGGVWDTVLEIDGAKEKTVKINPGATAEVSFRAAALGAGESRIIFTLQSPLVNERIIKTLTVDRPVLYETVTSIGSLASDNPFIEEGVILPSLVPEGTGSLSVSLSSSRLALLKEAVRYLLDYPYGCLEQRSAQLLPLVAFADRLETFELDSPVKNPKKVIEDELSFLAKSQLPDGSFPYWPGGQYGDQYVTLRVAHIAALAKQKGYEFPAAMNNQTLTKYITENDFSSTVFKEDPFLKGYSLWVRAMYGARIGSEITAFLRRGDELGISGWGFAGLAAMELGLRDLAISTRDRVRRFIRPGTRTLDLTDTYERMGNFWGYDSDRYAIALMLYYALSPADDMTTRLVNSLIERQRRGIWANTSSSFWAVLAFSKIADGEEKEQTGTLNSRLSLGGTMLMEAAFSKAGGVPVSRTWAFGESPLDTTAKDTLLPLRIEQEGSGRLYYTASLKYGIPTELATARDEGLSVFTETFDSAANPVSGGVLVPGKTYTRKVTVSSPRDRTYVALRAPIPSGAEIVDATFVTSSTVPPKEDDNERVDWRYYQAPPVRFIMDDEAVFHWDFFPAGKKEVEFRFRAVMNGIYPTPPAHAECMYEEEIFGRGAGELYRIGNIGGQ

SEQ ID NO: 68931 - DNA, 492 bp, Unknown
  Obtained from environmental sample
  misc_feature (1)..(492): n is a, c, g, or t
atgtcaaatgatgatgatgatgaatatgaagatgaatatgacgatgacgaatatgatgatcatgatgttatcaaaaaaaggatagaaaccgttattaaaaaagccgaaggtggcgatgtttattcaatgaagttaatggtaacgctttacacaaacaacgaatattttccgagagattatattgcagcgcaagcatggttgagaaaagctgcaaaaattggcgaagatgatgaagcatataaaagattagcgaaattgttaaaagaaggtaatggaatagcgcaggacttagaagagtcttttgatattaacgagcaactaatgtttaattgcgatttagacgctatggcggaagttggtcatgcttataaattaggtttaggcgttccaaaagatgaaaaaaaagcggctttctatattaaacaatttttcgatattgaaactgattttatgagagaagataaagaaaatgaaaagaaaaaaggtgtctga

SEQ ID NO: 68932 - protein, 163 aa, Unknown
  Obtained from environmental sample
  misc_feature (1)..(163): Xaa is any amino acid
MSNDDDDEYEDEYDDDEYDDHDVIKKRIETVIKKAEGGDVYSMKLMVTLYTNNEYFPRDYIAAQAWLRKAAKIGEDDEAYKRLAKLLKEGNGIAQDLEESFDINEQLMFNCDLDAMAEVGHAYKLGLGVPKDEKKAAFYIKQFFDIETDFMREDKENEKKKGV

SEQ ID NO: 68933 - DNA, 1086 bp, Unknown
  Obtained from environmental sample
  misc_feature (1)..(1086): n is a, c, g, or t
ttgccctggctctgcttgtgggtcttgtctcaggcgtttacacgacaactttcatcgccaccggttttgtgtatttctgggataaagagaagacaaaacgggcgaagaagaaaattattgcgccgcaagccaagggtgcgcttgcctagaaaagttctccgcgctaaagtcttaggcttctgcatgggtgttaggcgggcggtaaagattgcctgcaatcagctcgcctacaatcagcttgcctgcggcaaggcggatggtcccggaaaagtttatacactcggccccttgatccacaaccctcaggctcttgaagatttaaatcaacggggcattgagatactggatgaaaacaaacttcctgaaaccctttcaggcgctgttgtcattatccgggcgcacggcataagcccccaaacagaagcggaactacacaggctgggtgccgtggttgttgacgcgacctgcccaaaagtcaaagccagccagttaaaagctgcgtctctcgcaaaacagggatacaggcttttccttgcaggcgaagaatcacatgcggaaatagccggtatttgcggctacgcgcaagacggctggcttaacagaaacgaccccgccggaggcaaacaattcctgcgcgttgtaaactgcgccgaggaagctgagattgcggctaggctcttatctgaagacccggaaactcaaaacgatccgacaaaaacggcgcttatcgcgcaaactaccatttcagcggatgaataccacgctattggcatggtaatttcgcggtattttcccgcgttggagatcattccgacaatatgcgccgccaccagggaaaggcaagacagccttcgggagcttttaggcaaagtagacgctgtggccattgggggtggaaaagattccgccaatacccgccgtctgctgggtatagcgcaagcatcgggtaaaccctgtgccattgtggaaacagctaaggatattccgcctgatttttttaggtttgaaaccgtgggccttgcagccggggcatctacgtcagatacggtaattgatgagattgaaaagagactagcaaaattataa

SEQ ID NO: 68934 - protein, 361 aa, Unknown
  Obtained from environmental sample
  DOMAIN (52)...(361): LytB protein
  misc_feature (1)..(361): Xaa is any amino acid
MPWLCLWVLSQAFTRQLSSPPVLCISGIKRRQNGRRRKLLRRKPRVRLPRKVLRAKVLGFCMGVRRAVKIACNQLAYNQLACGKADGPGKVYTLGPLIHNPQALEDLNQRGIEILDENKLPETLSGAVVIIRAHGISPQTEAELHRLGAVVVDATCPKVKASQLKAASLAKQGYRLFLAGEESHAEIAGICGYAQDGWLNRNDPAGGKQFLRVVNCAEEAEIAARLLSEDPETQNDPTKTALIAQTTISADEYHAIGMVISRYFPALEIIPTICAATRERQDSLRELLGKVDAVAIGGGKDSANTRRLLGIAQASGKPCAIVETAKDIPPDFFRFETVGLAAGASTSDTVIDEIEKRLAKL

SEQ ID NO: 68935 - DNA, 897 bp, Unknown
  Obtained from environmental sample
  misc_feature (1)..(897): n is a, c, g, or t
atgaattacgaaagattaaccattaaagcgcaagaagcgataaacgacgcttccgcgatagcgcagcaagaagaccactcccagcttgagatcgaacacctgcttttggccctgctgaggcagcaggacgggatcgtagcgccgcttgtagaaaggatcgggacggatacaggccgtcttgccgcagatgttgaagccctgttgaagcagactcccaaagcctacggcgaggcggttcagctgcatttttcctctgcagcatcaaagatacttgcaaaggcggaagccgaagccgccgctctgaaagacgaatttgtatccaccgagcatatacttatcgcgatcagcgcgggagaaggaaagaccgcggagttgttaaagaaagccggtgtcacaaaaaaagcgattttggacgcgctcaggcaagtccgcggcaaccagcgcgtgaccgatcaaaatcccgaaggaaaataccagatactggaacgttattgccgtgaccttaccgctcttgcgagacaagaaaaaatcgaccctgtcatcggacgcgatgaggaaatacgccgctgtatgcaggtgctgtccagacgcacaaagaacaacccgatactgataggcgagccgggcgttggtaagaccgccattgttgaggggcttgcacggcgcatagtcgccggtgacgtgcctgaaggtttgaaagacaaaaagctccttgctctggatttgggccagcttgtcgcagggacaaaattccggggcgaatttgaggaacgcctgaaagccttgatacacgaggtgcagtcagccgaagggaagataatcctctttattgacgaactgcataccttggtcggagcaggcgctgcagaaagcgcgaccgacgcttccacctgttaa

SEQ ID NO: 68936 - protein, 298 aa, Unknown
  Obtained from environmental sample
  DOMAIN (17)...(69): Clp amino terminal domain
  misc_feature (1)..(298): Xaa is any amino acid
MNYERLTIKAQEAINDASAIAQQEDHSQLEIEHLLLALLRQQDGIVAPLVERIGTDTGRLAADVEALLKQTPKAYGEAVQLHFSSAASKILAKAEAEAAALKDEFVSTEHILIAISAGEGKTAELLKKAGVTKKAILDALRQVRGNQRVTDQNPEGKYQILERYCRDLTALARQEKIDPVIGRDEEIRRCMQVLSRRTKNNPILIGEPGVGKTAIVEGLARRIVAGDVPEGLKDKKLLALDLGQLVAGTKFRGEFEERLKALIHEVQSAEGKIILFIDELHTLVGAGAAESATDASTC

SEQ ID NO: 68937 - DNA, 417 bp, Unknown
  Obtained from environmental sample
  misc_feature (1)..(417): n is a, c, g, or t
gtgtatcaaggctttcaggcgttcctcaaattcgccccggaattttgtccctgcgacaagctggcccaaatccagagcaaggagctttttgtctttcaaaccttcaggcacgtcaccggcgactatgcgccgtgcaagcccctcaacaatggcggtcttaccaacgcccggctcgcctatcagtatcgggttgttctttgtgcgtctggacagcacctgcatacagcggcgtatttcctcatcgcgtccgatgacagggtcgattttttcttgtctcgcaagagcggtaaggtcacggcaataacgttccagtatctggtattttccttcgggattttgatcggtcacgcgctggttgccgcggacttgcctgagcgcgtccaaaatcgctttttttgtgacaccggctttctttaa

SEQ ID NO: 68938 - protein, 138 aa, Unknown
  Obtained from environmental sample
  misc_feature (1)..(138): Xaa is any amino acid
MYQGFQAFLKFAPEFCPCDKLAQIQSKELFVFQTFRHVTGDYAPCKPLNNGGLTNARLAYQYRVVLCASGQHLHTAAYFLIASDDRVDFFLSRKSGKVTAITFQYLVFSFGILIGHALVAADLPERVQNRFFCDTGFL

SEQ ID NO: 68939 - DNA, 402 bp, Unknown
  Obtained from environmental sample
  misc_feature (1)..(402): n is a, c, g, or t
gtggaagcgtcggtcgcgctttctgcagcgcctgctccgaccaaggtatgcagttcgtcaataaagaggattatcttcccttcggctgactgcacctcgtgtatcaaggctttcaggcgttcctcaaattcgccccggaattttgtccctgcgacaagctggcccaaatccagagcaaggagctttttgtctttcaaaccttcaggcacgtcaccggcgactatgcgccgtgcaagcccctcaacaatggcggtcttaccaacgcccggctcgcctatcagtatcgggttgttctttgtgcgtctggacagcacctgcatacagcggcgtatttcctcatcgcgtccgatgacagggtcgattttttcttgtctcgcaagagcggtaaggtcacggcaataa

SEQ ID NO: 68940 - protein, 133 aa, Unknown
  Obtained from environmental sample
  misc_feature (1)..(133): Xaa is any amino acid
MEASVALSAAPAPTKVCSSSIKRIIFPSADCTSCIKAFRRSSNSPRNFVPATSWPKSRARSFLSFKPSGTSPATMRRASPSTMAVLPTPGSPISIGLFFVRLDSTCIQRRISSSRPMTGSIFSCLARAVRSRQ

SEQ ID NO: 68941 - DNA, 1758 bp, Unknown
  Obtained from environmental sample
  misc_feature (1)..(1758): n is a, c, g, or t
ttgacgaactgcataccttggtcggagcaggcgctgcagaaagcgcgaccgacgcttccacctgttaagccggctctggcgcgcggagaactgcgctgcataggagccacaaccctggacgagtaccgcaagcatattgaaaaagacgccgcgctggaacgccgattccagcaggtgtacaccgccgagccgtctgtagaggataccatcgccatactgcgcggtcttaaagaacgctacgaggtacaccacggcgttaggattaaagacgaggcgctggtcgccgcggcaacgctttccagccgctatataaccagccgctttatgccggacaaggccatagacctggtggacgaagcggcgagccgtttaaaaatggaactggacagtcgccccacggaattagacaaacttgaacgcaagctgctgcagttctccattgaaaaacaggccctttcccgcgaggaagatcccgcgtcaaaagaacgcctcgctaagctggaaaaggaaatagccgacattacggctgaacgcgacgccatgaaggcccgctgggaagccgagaaagttgacatacagggaatccgcgaattaaagcagaggatcgaagaattaaaaatagaagagacccgttacgagcgggaagggaaccttttaaaagccgccgaggtaaagcacggaaaaattccggaagctcaaaaacaacttgccgcgcttgccaaccttatggaaaagaagcgggatcaagccggagggtcaggcacggcggcgctgttgcgggaagaggtaagcgaggaggacattgccgccgtggtatcagcatggacggggattcccgtttccaagatgctttccggtgaaatgcagaagtaccttgatctggaaaaagcgctggaacggcgggtagtgggacaggacaaagcgcttgccgccgtcgcggacgcaatcaggaggaacaaggccggcctctccgatgccgcgaagccttttggcagtttcctctttttggggcccaccggcgtgggcaaaaccgaactggcaaagacccttgcggacttcctgttcaacgacgagaaagcccttgccagaatcgacatgagcgagtacggcgagaaacattccgtcagccgcttgatcggagcgccgcctggctatgtgggctaccagcaggggggccagcttaccgaaatcgtacgccgccggccctacagcgtgtttctttttgacgaaattgaaaaagcccatccggaagtgtttaatgttttcctgcaaattctcgacgacggacgccttacagacggccagggctggattgtggatttcaagaatgttataatcattatgacaagcaatatcggctcggatttgattcttgaggaaaaaaacaccggggcgataacggattcccttctggagttgctcacacggaatttcaggccggaatttttaaaccgcattgacgagacagtgatcttcagccggctgggccagaacgaactccgcagaatcgttgacattcagcttgatcgtctggcgcatcggcttgccaaacaccagattacactcaatacctcacatacggagaacaaattccgtgccgaacggcgttatgatcccatgtatggagcgcggcccctcaaacggaccattcatgcggaactggaaaaccctttggcaaactcgtcatctccggaaaaatacgcgaaggcgatgtcgtcaccgctgacaggacgggcgaagggctggaattcaaaataa

SEQ ID NO: 68942 - protein, 585 aa, Unknown
  Obtained from environmental sample
  DOMAIN (285)...(541): Torsin
  misc_feature (1)..(585): Xaa is any amino acid
MTNCIPWSEQALQKARPTLPPVKPALARGELRCIGATTLDEYRKHIEKDAALERRFQQVYTAEPSVEDTIAILRGLKERYEVHHGVRIKDEALVAAATLSSRYITSRFMPDKAIDLVDEAASRLKMELDSRPTELDKLERKLLQFSIEKQALSREEDPASKERLAKLEKEIADITAERDAMKARWEAEKVDIQGIRELKQRIEELKIEETRYEREGNLLKAAEVKHGKIPEAQKQLAALANLMEKKRDQAGGSGTAALLREEVSEEDIAAVVSAWTGIPVSKMLSGEMQKYLDLEKALERRVVGQDKALAAVADAIRRNKAGLSDAAKPFGSFLFLGPTGVGKTELAKTLADFLFNDEKALARIDMSEYGEKHSVSRLIGAPPGYVGYQQGGQLTEIVRRRPYSVFLFDEIEKAHPEVFNVFLQILDDGRLTDGQGWIVDFKNVIIIMTSNIGSDLILEEKNTGAITDSLLELLTRNFRPEFLNRIDETVIFSRLGQNELRRIVDIQLDRLAHRLAKHQITLNTSHTENKFRAERRYDPMYGARPLKRTIHAELENPLANSSSPEKYAKAMSSPLTGRAKGWNSK

SEQ ID NO: 68943 - DNA, 456 bp, Unknown
  Obtained from environmental sample
  misc_feature (1)..(456): n is a, c, g, or t
ttgcaggaaaacattaaacacttccggatgggctttttcaatttcgtcaaaaagaaacacgctgtagggccggcggcgtacgatttcggtaagctggcccccctgctggtagcccacatagccaggcggcgctccgatcaagcggctgacggaatgtttctcgccgtactcgctcatgtcgattctggcaagggctttctcgtcgttgaacaggaagtccgcaagggtctttgccagttcggttttgcccacgccggtgggccccaaaaagaggaaactgccaaaaggcttcgcggcatcggagaggccggccttgttcctcctgattgcgtccgcgacggcggcaagcgctttgtcctgtcccactacccgccgttccagcgctttttccagatcaaggtacttctgcatttcaccggaaagcatcttggaaacgggaatccccgtccatgctga

SEQ ID NO: 68944 - protein, 151 aa, Unknown
  Obtained from environmental sample
  misc_feature (1)..(151): Xaa is any amino acid
MQENIKHFRMGFFNFVKKKHAVGPAAYDFGKLAPLLVAHIARRRSDQAADGMFLAVLAHVDSGKGFLVVEQEVRKGLCQFGFAHAGGPQKEETAKRLRGIGEAGLVPPDCVRDGGKRFVLSHYPPFQRFFQIKVLLHFTGKHLGNGNPRPC

SEQ ID NO: 68945 - DNA, 690 bp, Unknown
  Obtained from environmental sample
  misc_feature (1)..(690): n is a, c, g, or t
ttgcttgaaaccggtaaaagcattcttgatatcgcaattgaatacggttttgaatatgaacaatcgtatatcaggacttttaagcgtgaatttggaataacacccggccatttgcgcaaaacaaggcaggttatgcaaattaaaccgccgctgcatcttttcgacaaaagaaggctggataacggcgttttatttgggcctgattttgtaatggttccgcgttttcatgtcataggcaaacgccaccgcttgtcatttaaagatttgcgtgctgaaccgttactgacaaagcaattctgggaaaatgaacgcaagcaaataaaagatactgtaaatccccatgcatgtatcaatttatcctgtaaccttaatatggaaggagggcattttgattatattccctcggtacaggtcgcagatataaaaaacatacctcccggtctttgctgtgaaactttcgaaacctcaatgtgtgtcagattccgttatatagggcagcatcactattatgaaattaccggagatgtcgtttccatgatgtataacgctgtcggtaattttgcccaggatgaaaacgcaaaatatgagctgttacataataaaagcaactttgtaaagatagatggaaggctttatgacgggacatattgtcaaatggaatggtatactccggtttatgaaaaacagtaa

SEQ ID NO: 68946 - protein, 229 aa, Unknown
  Obtained from environmental sample
  DOMAIN (65)...(226): Bacterial transcription activator, effector binding domain
  misc_feature (1)..(229): Xaa is any amino acid
MLETGKSILDIAIEYGFEYEQSYIRTFKREFGITPGHLRKTRQVMQIKPPLHLFDKRRLDNGVLFGPDFVMVPRFHVIGKRHRLSFKDLRAEPLLTKQFWENERKQIKDTVNPHACINLSCNLNMEGGHFDYIPSVQVADIKNIPPGLCCETFETSMCVRFRYIGQHHYYEITGDVVSMMYNAVGNFAQDENAKYELLHNKSNFVKIDGRLYDGTYCQMEWYTPVYEKQ

SEQ ID NO: 68947 - DNA, 774 bp, Unknown
  Obtained from environmental sample
  misc_feature (1)..(774): n is a, c, g, or t
atgataaataaaaaactaataataatcccgcttctttgtattctattcattggctgcgtaaaagacgacacttatcctacgcttgagaagggagttctcgctgttggggtggagattgggtatccgcctatggagtactacggggcggatggggctcttttgggatttgatattgatttggtaaaagcggtggcggaaaaattggagcttcaggctattttttttgatacggcttgggacgggattcttgcgggattggacgcaggcaggtacgacattgcggttaatgttaccattttaccggagcggcggaataattataactttacaaagccatacattaacagctttatgactattgttacgcgcaaagattcgcgggtaaagattaacaagatagaagatattgcgggggttaacgcggcgtttcagggcaatacgaccgcgcagtatttttcggaaaggctgaatggtcagggaataaggtttacatcgttttcttacgacaaaataataaattgtttcagcgatttaaaattgggcagggtggatttagtcatagttgacaacattgtcgcgttttattatgcgggaatggaaaacagcggccttcaggtcgcatgggcggaaccggataacactaccgatgagttaatcggtatctgtttgaaaaaggggaatgacaaactcacggggatgattaacaaagcgctggatgaattaatcgcggaaggcgctgcagcggtgatttcgcgaaggtattttgggagataa

SEQ ID NO: 68948 - protein, 257 aa, Unknown
  Obtained from environmental sample
  SIGNAL (1)...(21)
  DOMAIN (33)...(257): Bacterial extracellular solute-binding proteins, family 3
  misc_feature (1)..(257): Xaa is any amino acid
MINKKLIIIPLLCILFIGCVKDDTYPTLEKGVLAVGVEIGYPPMEYYGADGALLGFDIDLVKAVAEKLELQAIFFDTAWDGILAGLDAGRYDIAVNVTILPERRNNYNFTKPYINSFMTIVTRKDSRVKINKIEDIAGVNAAFQGNTTAQYFSERLNGQGIRFTSFSYDKIINCFSDLKLGRVDLVIVDNIVAFYYAGMENSGLQVAWAEPDNTTDELIGICLKKGNDKLTGMINKALDELIAEGAAAVISRRYFGR

SEQ ID NO: 68949 - DNA, 1926 bp, Unknown
  Obtained from environmental sample
  misc_feature (1)..(1926): n is a, c, g, or t
ttgtactatgccggcagggggaatgacagacgcctgtatctgccttataatgttttaaaggagtatagaaaaatgtattgtataaaaaaagttactgatgatttagtatgggtcggcgcgaatgaccgccgccttgcgttattcgaaggagtttattccgtaccgacaggcgtgtcgtacaattcatatcttttaaccgatgaaaaaaccgtgctgtttgatactgtagataaagcggtgcggcagagatttttggaaaatgttgaagcggcgctgaaaggcaggaagctggattacctcgtggtacagcatgtcgaacctgaccattccgccgtgattcccgaattgattcggcagtacccaaatataaaaattgtatgcagtgaaagagttttggaatttatcaaacaattctatgaatttgatatagattcacacatccatctggttgacgaaaataagacattgaataccggaaagcacactcttcattttgttatggctcctatggtacattggcccgaagtcatgatgacatacgattcaacatcaaaaatacttttttccgccgacgcgtttggatgcttcggcgcgttgaacggcgctcttttcgctgacgaagtgaatttcgcaaaggattatatggacgaagcccgccgctattatacaaatatagtagggaagtacgggactcaggttgaatcggtattggaaaaagcgtctactcttgatatcgaaatgatatgtccgcttcacggttttgtatggcgttcaaatttaaatgaaatcctttcaaagtatatgctttggagcagatacgagccggaagagcgcggcgttatgatagcttacgcgtccgtttacgggaatacggaaaacgccgcggaaattcttgcctgccgtctgcgcgataaaggaattaaaacagttgtatttgatgtttcggttacgccggcatcggagatagtaagcgccgcgttcaaatggagccatcttgttttcgcgtccacaacatacaacgcgggaatttttgtaacaatggaagccttgcttaacgatctcgccgcgcacaacattcaaaaccgccgtgttgccattatcgaaaacggttcatgggctcccgcaagcggcggcttgattcgtgagatactgagtaaatgcgaaaaaataaatattcttgaaaataatgtcagcatactgtcaggtttaaagactgcgcaggtttcggatattgaatcaatggcgcaagcaatcggcgcggatttccccgcacccgtggcagctgctcagaataatcagtctgtaccgaacaccgttgatcccaacaccatgtttaagctgtcttacggtttatttgtattaacagccagagacggcaataaggacaacggctgtattatcaataccgttatgcaagtaacggtaactcccgtgaagataacaattgcggtgaacaaagccaattatacccacgacatgataataaagactggaaaattcaatatttccgttttaagcgagaaagcgccttttagtattttccagcaatttggttttcatagcggaaaagacacggataaattctcaggcggcggcgaagccttgcgcacaacaaacggcgtccgttatttatctgaatgggcaaacgctgtgatttccgcagaagtgaaagaaactgttgattgcggcacacatacgctgtttatcgccgaggtgaatcaggcgttttcgctgtcacgcgacgcaagcgttacatatcaatattattttgacaatataaagccgaaaccccagccgccgaagggaaacaaaaagggatttgtctgcaagatatgcggatatgtacatgaaggcgatactttgccggatgattttgtttgtccgctgtgcaagcatggggcaggggattttgaaaagctccagtag

SEQ ID NO: 68950 - protein, 641 aa, Unknown
  Obtained from environmental sample
  DOMAIN (604)...(637): Rubredoxin
  misc_feature (1)..(641): Xaa is any amino acid
MYYAGRGNDRRLYLPYNVLKEYRKMYCIKKVTDDLVWVGANDRRLALFEGVYSVPTGVSYNSYLLTDEKTVLFDTVDKAVRQRFLENVEAALKGRKLDYLVVQHVEPDHSAVIPELIRQYPNIKIVCSERVLEFIKQFYEFDIDSHIHLVDENKTLNTGKHTLHFVMAPMVHWPEVMMTYDSTSKILFSADAFGCFGALNGALFADEVNFAKDYMDEARRYYTNIVGKYGTQVESVLEKASTLDIEMICPLHGFVWRSNLNEILSKYMLWSRYEPEERGVMIAYASVYGNTENAAEILACRLRDKGIKTVVFDVSVTPASEIVSAAFKWSHLVFASTTYNAGIFVTMEALLNDLAAHNIQNRRVAIIENGSWAPASGGLIREILSKCEKINILENNVSILSGLKTAQVSDIESMAQAIGADFPAPVAAAQNNQSVPNTVDPNTMFKLSYGLFVLTARDGNKDNGCIINTVMQVTVTPVKITIAVNKANYTHDMIIKTGKFNISVLSEKAPFSIFQQFGFHSGKDTDKFSGGGEALRTTNGVRYLSEWANAVISAEVKETVDCGTHTLFIAEVNQAFSLSRDASVTYQYYFDNIKPKPQPPKGNKKGFVCKICGYVHEGDTLPDDFVCPLCKHGAGDFEKLQ

SEQ ID NO: 68951 - DNA, 627 bp, Unknown
  Obtained from environmental sample
  misc_feature (1)..(627): n is a, c, g, or t
ttgatgaaggtggaattaagaatagaatcggaagaaaacaagggatcgtcttttatatttactatccgtgcgaaaattgtaaatccacaaacgcaagagttaaaaacttcagactctcctgaggaagaaacttcagccgcttccggcgcggatgagggaacggacgaacttatttataaaggcaaacgtattttacttgccgaggatgttgaaataaaccgtgaaatagtcgttaccgtactggaaccgcttgggctggaaattgtagaagccgaagacggacagaaagcctatgatttattccgcgaaaatcccgaagcctacgatttgattttcatggatattcacatgcccggcatggacggttatgaagccacaagactaatccgcgcctatgaagccgaacacaataaaaatctttcagaaaattcaagcgcgagtttcaccgaaggtgaaactcgaagcgatgataggaatttgcgcaagcaaattcctattatcgcaatgaccgctaatgtttttcgcgaagacgtggaacaatgtcttgccgccggtatgaacgatcatgtcgggaaaccgcttgattttgaagtggtgtcgtctaaattaaaaatgtatttaaactga

SEQ ID NO: 68952 - protein, 208 aa, Unknown
  Obtained from environmental sample
  DOMAIN (62)...(204): Response regulator receiver domain
  misc_feature (1)..(208): Xaa is any amino acid
MMKVELRIESEENKGSSFIFTIRAKIVNPQTQELKTSDSPEEETSAASGADEGTDELIYKGKRILLAEDVEINREIVVTVLEPLGLEIVEAEDGQKAYDLFRENPEAYDLIFMDIHMPGMDGYEATRLIRAYEAEHNKNLSENSSASFTEGETRSDDRNLRKQIPIIAMTANVFREDVEQCLAAGMNDHVGKPLDFEVVSSKLKMYLN

SEQ ID NO: 68953 - DNA, 2649 bp, Unknown
  Obtained from environmental sample
  misc_feature (1)..(2649): n is a, c, g, or t
atggctaaactgaaacgaatacagcttttttcaaaattgaacgcaaaggcttaccatgctttggagagcgctacagtcctttgcaaaacacgaggcaacccttatgtggaactggtccactgggtaaaccagatcatcatgggagaacaaaccgactggcacgaggctatccgttattttgccctggatgaggcaaaactggcaaaggatatgatcgccgcgctggacgccctgccccggggagccgcttccatatcggacttttccaacaatattcaaattgccattaaggaatcatggatggcggcttcccttgtttttaacgaaggggctatccgtacaggccacctcctttgcgccctcaaacagacccccgaatgcgcccgtcttttgcacgatatgagcggggaattcgtaaaggtaaacggcgaccttttagcggaaaaattcgcggagatcaccgccaactccgccgaaagctccgttcccgcgggggacgggaaaagctcggctacaggccaggccggcgccatgatgggcagcgcccccatgggcaagggcgaggccctgaaacagtataccctggacatgaccgccgaagccgaggcgggaaagattgaccagatagtgggcagggatgcggaaatccgccaggtcattgatatccttctgcgccggcggcagaacaacccgatccttaccggggacgcgggagtgggaaagaccgccgtggtggaaggtttcgcccggcgcctggcgtccggcgacgtgccgccgtcctttaaaggtacaaaattgctttccctggatatgggtctgctgcaggccggagccagcatgaagggcgaattcgaaaaccgtttgaagcaggttattgaggaggtgcagagttctgataccccaatcatcctcttcatcgacgaggcccatacgatgatcggcgccggcggccaggccggacagaacgacgccgccaacctccttaaacccgcccttgcgcggggcaagctgcgctgtattgccgctaccacgtatcaggagtacatcaagtattttgaaaaagaccctgccctggcgcggcgcttccagaacatccttatcgaagagccggatgacgataaggggacgcagatgatgcggggcatagtaaaatccctggaaaagcaccacggcgttgttgtgctggatgaggctcttggcgcggctgtaaaactttcacggcgctaccttccctcacgccagcttcccgacaaatcggtgagcatccttgacacggcctgcgccaaggtgaacctgagccaaaacgcgcagcccgccgaactggaatattccctcaggcgcattgaggccctggaactggaaatagaaattctcaaacgtgaagaaacaggcggaatgaaccatgcggaaaaaatagccgccttaaacgatgaacttataaaagaagaaaaaaacagtgacgaaatacaaaaacgttttgacagggaaaaagccctggccgccgaaatagcggccctgcggacacaactcaatgacgttgaaaaggacaaggcggccgctcttaccgcggaactggaagccaggcgaaaagagcttgcggatttccagggggaacatcccctggtactgccccaggtggacactcaggcggtttctacggtcatctccgaatggaccggcatacctttgggcagaatggttaaagacgaaatcaagtccatcctttcccttgacgaagaactctgccggagggttatcgggcaggatcacggcctgaaaattatcgcgaaacgggtagttaccgcaagggcgtccctggccgacccgaacaagcccatcgcggtaatcatgctggcaggcccctccggggtcggcaagaccgaaaccgccctggcccttgccgaacagatctatggcagcgacgagcaaatcgttactattaatatgagcgaattccaggaatcccataccgtatccaccctgaagggcgcgcctcccggttatgtcggctacggcgaaggcggagtcctcaccgaggcggtgcgccgcaagccctacagcgtggtgctgctggacgaggtggaaaaggcgcacccggatgtgcatgaaattttctttcaggtttttgacaaaggccagatggaagacggcgcgggcaggctggtgaatttccgcaacaccctgatccttttgacgactaacgtgggcgaccatgttatagagcggctctgcgttgacgaggacaatctccccaccgtggaaacgctggaagaggctgtcaggggcgacatggcgaaggtgttcccggccgcgcttcttggcagaatccagatcgtgccttattatcccctcgggaaaaaagccctgtaccgcatcatcgacttaaagctttccaaaataaaaaaacgggtggcggaaaattacgccgcgcagctcgttatcgctgacgcggtaaaggacgagattatccgccgttgtgacaatgccgcctccggcgcaaggctcgttgacgcggttatcagcaacaacctgctgcctgaaatcagcgccgaattccttcgcagcaccatggagggaaagaaatttaaaaaagtctttgccgacgcaaaggatgaaaaatttatttattcctatgaggaggaaacataa

SEQ ID NO: 68954 - protein, 882 aa, Unknown
  Obtained from environmental sample
  DOMAIN (615)...(784): ATPase family associated with various cellular activities (AAA)
  misc_feature (1)..(882): Xaa is any amino acid
MAKLKRIQLFSKLNAKAYHALESATVLCKTRGNPYVELVHWVNQIIMGEQTDWHEAIRYFALDEAKLAKDMIAALDALPRGAASISDFSNNIQIAIKESWMAASLVFNEGAIRTGHLLCALKQTPECARLLHDMSGEFVKVNGDLLAEKFAEITANSAESSVPAGDGKSSATGQAGAMMGSAPMGKGEALKQYTLDMTAEAEAGKIDQIVGRDAEIRQVIDILLRRRQNNPILTGDAGVGKTAVVEGFARRLASGDVPPSFKGTKLLSLDMGLLQAGASMKGEFENRLKQVIEEVQSSDTPIILFIDEAHTMIGAGGQAGQNDAANLLKPALARGKLRCIAATTYQEYIKYFEKDPALARRFQNILIEEPDDDKGTQMMRGIVKSLEKHHGVVVLDEALGAAVKLSRRYLPSRQLPDKSVSILDTACAKVNLSQNAQPAELEYSLRRIEALELEIEILKREETGGMNHAEKIAALNDELIKEEKNSDEIQKRFDREKALAAEIAALRTQLNDVEKDKAAALTAELEARRKELADFQGEHPLVLPQVDTQAVSTVISEWTGIPLGRMVKDEIKSILSLDEELCRRVIGQDHGLKIIAKRVVTARASLADPNKPIAVIMLAGPSGVGKTETALALAEQIYGSDEQIVTINMSEFQESHTVSTLKGAPPGYVGYGEGGVLTEAVRRKPYSVVLLDEVEKAHPDVHEIFFQVFDKGQMEDGAGRLVNFRNTLILLTTNVGDHVIERLCVDEDNLPTVETLEEAVRGDMAKVFPAALLGRIQIVPYYPLGKKALYRIIDLKLSKIKKRVAENYAAQLVIADAVKDEIIRRCDNAASGARLVDAVISNNLLPEISAEFLRSTMEGKKFKKVFADAKDEKFIYSYEEET

SEQ ID NO: 68955 - DNA, 792 bp, Unknown
  Obtained from environmental sample
  misc_feature (1)..(792): n is a, c, g, or t
atggtcgcccacgttagtcgtcaaaaggatcagggtgttgcggaaattcaccagcctgcccgcgccgtcttccatctggcctttgtcaaaaacctgaaagaaaatttcatgcacatccgggtgcgccttttccacctcgtccagcagcaccacgctgtagggcttgcggcgcaccgcctcggtgaggactccgccttcgccgtagccgacataaccgggaggcgcgcccttcagggtggatacggtatgggattcctggaattcgctcatattaatagtaacgatttgctcgtcgctgccatagatctgttcggcaagggccagggcggtttcggtcttgccgaccccggaggggcctgccagcatgattaccgcgatgggcttgttcgggtcggccagggacgcccttgcggtaactacccgtttcgcgataattttcaggccgtgatcctgcccgataaccctccggcagagttcttcgtcaagggaaaggatggacttgatttcgtctttaaccattctgcccaaaggtatgccggtccattcggagatgaccgtagaaaccgcctgagtgtccacctggggcagtaccaggggatgttccccctggaaatccgcaagctcttttcgcctggcttccagttccgcggtaagagcggccgccttgtccttttcaacgtcattgagttgtgtccgcagggccgctatttcggcggccagggctttttccctgtcaaaacgtttttgtatttcgtcactgtttttttcttcttttataagttcatcgtttaa

SEQ ID NO: 68956 - protein, 263 aa, Unknown
  Obtained from environmental sample
  misc_feature (1)..(263): Xaa is any amino acid
MVAHVSRQKDQGVAEIHQPARAVFHLAFVKNLKENFMHIRVRLFHLVQQHHAVGLAAHRLGEDSAFAVADITGRRALQGGYGMGFLEFAHINSNDLLVAAIDLFGKGQGGFGLADPGGACQHDYRDGLVRVGQGRPCGNYPFRDNFQAVILPDNPPAEFFVKGKDGLDFVFNHSAQRYAGPFGDDRRNRLSVHLGQYQGMFPLEIRKLFSPGFQFRGKSGRLVLFNVIELCPQGRYFGGQGFFPVKTFLYFVTVFFFFYKFIV

SEQ ID NO: 68957 - DNA, 735 bp, Unknown
  Obtained from environmental sample
  misc_feature (1)..(735): n is a, c, g, or t
gtggtgcttttccagggattttactatgccccgcatcatctgcgtccccttatcgtcatccggctcttcgataaggatgttctggaagcgccgcgccagggcagggtctttttcaaaatacttgatgtactcctgatacgtggtagcggcaatacagcgcagcttgccccgcgcaagggcgggtttaaggaggttggcggcgtcgttctgtccggcctggccgccggcgccgatcatcgtatgggcctcgtcgatgaagaggatgattggggtatcagaactctgcacctcctcaataacctgcttcaaacggttttcgaattcgcccttcatgctggctccggcctgcagcagacccatatccagggaaagcaattttgtacctttaaaggacggcggcacgtcgccggacgccaggcgccgggcgaaaccttccaccacggcggtctttcccactcccgcgtccccggtaaggatcgggttgttctgccgccggcgcagaaggatatcaatgacctggcggatttccgcatccctgcccactatctggtcaatctttcccgcctcggcttcggcggtcatgtccagggtatactgtttcagggcctcgcccttgcccatgggggcgctgcccatcatggcgccggcctggcctgtagccgagcttttcccgtcccccgcgggaacggagctttcggcggagttggcggtgatctccgcgaatttttccgctaa

SEQ ID NO: 68958 - protein, 244 aa, Unknown
  Obtained from environmental sample
  misc_feature (1)..(244): Xaa is any amino acid
MVLFQGFYYAPHHLRPLIVIRLFDKDVLEAPRQGRVFFKILDVLLIRGSGNTAQLAPRKGGFKEVGGVVLSGLAAGADHRMGLVDEEDDWGIRTLHLLNNLLQTVFEFALHAGSGLQQTHIQGKQFCTFKGRRHVAGRQAPGETFHHGGLSHSRVPGKDRVVLPPAQKDINDLADFRIPAHYLVNLSRLGFGGHVQGILFQGLALAHGGAAHHGAGLACSRAFPVPRGNGAFGGVGGDLREFFR

SEQ ID NO: 68959 - DNA, 756 bp, Unknown
  Obtained from environmental sample
  misc_feature (1)..(756): n is a, c, g, or t
gtggtagcggcaatacagcgcagcttgccccgcgcaagggcgggtttaaggaggttggcggcgtcgttctgtccggcctggccgccggcgccgatcatcgtatgggcctcgtcgatgaagaggatgattggggtatcagaactctgcacctcctcaataacctgcttcaaacggttttcgaattcgcccttcatgctggctccggcctgcagcagacccatatccagggaaagcaattttgtacctttaaaggacggcggcacgtcgccggacgccaggcgccgggcgaaaccttccaccacggcggtctttcccactcccgcgtccccggtaaggatcgggttgttctgccgccggcgcagaaggatatcaatgacctggcggatttccgcatccctgcccactatctggtcaatctttcccgcctcggcttcggcggtcatgtccagggtatactgtttcagggcctcgcccttgcccatgggggcgctgcccatcatggcgccggcctggcctgtagccgagcttttcccgtcccccgcgggaacggagctttcggcggagttggcggtgatctccgcgaatttttccgctaaaaggtcgccgtttacctttacgaattccccgctcatatcgtgcaaaagacgggcgcattcgggggtctgtttgagggcgcaaaggaggtggcctgtacggatagccccttcgttaaaaacaagggaagccgccatccatgattccttaatggcaatttga

SEQ ID NO: 68960 - protein, 251 aa, Unknown
  Obtained from environmental sample
  misc_feature (1)..(251): Xaa is any amino acid
MVAAIQRSLPRARAGLRRLAASFCPAWPPAPIIVWASSMKRMIGVSELCTSSITCFKRFSNSPFMLAPACSRPISRESNFVPLKDGGTSPDARRRAKPSTTAVFPTPASPVRIGLFCRRRRRISMTWRISASLPTIWSIFPASASAVMSRVYCFRASPLPMGALPIMAPAWPVAELFPSPAGTELSAELAVISANFSAKRSPFTFTNSPLISCKRRAHSGVCLRAQRRWPVRIAPSLKTREAAIHDSLMAI

SEQ ID NO: 68961 - DNA, 1059 bp, Unknown
  Obtained from environmental sample
  misc_feature (1)..(1059): n is a, c, g, or t
atggaaaacaccggaagatcggtaaagaaagctatccagcggataaaaaacaatacaaaggctcctgatttctgggcctttgtccgcgctcttgaaaatgccaattccggcaaacccagactggggaaagggaaaagcccccaggatgaaaatgtccgctttggccaaacgccctatcttgtttttcctcccaacgacatcgccgaaataatcgaagcgggcaggattgcgggggtggacgctacaataatcctgtatttctttgggcttttaggggtaaacggccctatgccgctggaatttaccagctatgtattccgccgttcccataaccattttgacaatacctggcggcgttttctggatataatcaaccaccgttttaccacgtttttctaccgttcttatgccgcgggccagcaggcgatgagctttgaccggcctgatgatgatccgttttccttcattattaaaaacctggccggattttccgccacgccgaatcatcaggaacggttattcctgaaatcggccctccgattctctttcctcacgaaaacccgccaggggctggaagatatgctgcgccgcctttttaattttcccattgagatccgtgattatatcccttcatcacgggatattccccatgaaagccgcgttattttggggaggaaaaacaacaccctgggtctggatatgcagatagggagaacctatacaagcatcacgggaaaatttgagatacgcataggccccatttcctatgaggattaccatgtttttatatccggccgcaacggctgccagttccttgtcgaggctgtttccctgtatatggaccggcccctgaactattcgatgctgtttattatccgctgggataccattcctccggcgcgcctgggctttgatctggctgagggccgctgggacgccgcccggctgggttatacctgctggattggcactgctaaagaaaaatttacaacgctgagtattggcgccgttagatttaaccgtggtagaaaagtaagtaaggaggcattcaatggctaa

SEQ ID NO: 68962 - protein, 352 aa, Unknown
  Obtained from environmental sample
  DOMAIN (16)...(324): Protein of unknown function (DUF1305)
  misc_feature (1)..(352): Xaa is any amino acid
MENTGRSVKKAIQRIKNNTKAPDFWAFVRALENANSGKPRLGKGKSPQDENVRFGQTPYLVFPPNDIAEIIEAGRIAGVDATIILYFFGLLGVNGPMPLEFTSYVFRRSHNHFDNTWRRFLDIINHRFTTFFYRSYAAGQQAMSFDRPDDDPFSFIIKNLAGFSATPNHQERLFLKSALRFSFLTKTRQGLEDMLRRLFNFPIEIRDYIPSSRDIPHESRVILGRKNNTLGLDMQIGRTYTSITGKFEIRIGPISYEDYHVFISGRNGCQFLVEAVSLYMDRPLNYSMLFIIRWDTIPPARLGFDLAEGRWDAARLGYTCWIGTAKEKFTTLSIGAVRFNRGRKVSKEAFNG

SEQ ID NO: 68963 - DNA, 1197 bp, Unknown
  Obtained from environmental sample
  misc_feature (1)..(1197): n is a, c, g, or t
atggcagttgccggtcaaataaaaaacgcgcttgcgggatcttcgatgatacgcaaaatgtttgaagaaggaatacaattaaaaaaacagcacggagcggacaaggttttcgatttttcgcttgggaacccggatatagagccgccagaggcatttcacgaagtttttgtaaagctcgcgcaggaagacgaaaaaggctctcacgggtatatgcctaacgcgggctacgtccatgtaagggaaacgctggcgaagaaagtctgcaaagagcagaatgtaaacattgacggctctcatattgtcatggcggtaggcgccgccggcgggcttaacgccgtatttaagacaatttgcaatcccggcgatgaggttatcgtttctaagccttactttatggaataccgcgcctatacgggcaaccatcaggcgaaacttacagaagttgattctcttaacgatttcaatttggacattaacgcgataaaagccgccttaaatgaaaaaacagccgcgattttaataaattcacctaacaatcctaccggaaaagtatattccgcttccgtacttgagtctcttgcctctatgcttattgaacacggcaaaaaaacaggacgttttccgtaccttgtttctgacgaaccttatcgggaaatcgcgtacgagtgtgaagttccgccggttttatgctgttacagcgaatcaatcgtagtaagttcctattcaaaaagcctgtctcttccgggggagcgcataggttttatcgcagtaagcccgaacgcggaagggaaggacgatcttttaagcggacttatctacgcgacaaggatacttggctttgttaacgctccggcgcttatgcaaagaatagtggcggcccttacccaagcgcgcgtggacgtatcaatttacgcgcgaagacgggacgcttttatgaaagttttaaataatgccggtattgagtactcaacgcctcagggagcgttctatcttttctgtaaagtaccaaagagcaaaacaaacaggcaggaagctgacgacaaggcgtttactgaacatcttaaaaaacatttaatcttaggcgttcaagggtcgagtttcggaaaatccggctggctgcgtttcgcgtactgcgtagacgaaaaaataatcagcgcgtcacaagacgcgtttattaaggcgatggaaacatggtaa

SEQ ID NO: 68964 - protein, 398 aa, Unknown
  Obtained from environmental sample
  DOMAIN (34)...(391): Aminotransferase class I and II
  misc_feature (1)..(398): Xaa is any amino acid
MAVAGQIKNALAGSSMIRKMFEEGIQLKKQHGADKVFDFSLGNPDIEPPEAFHEVFVKLAQEDEKGSHGYMPNAGYVHVRETLAKKVCKEQNVNIDGSHIVMAVGAAGGLNAVFKTICNPGDEVIVSKPYFMEYRAYTGNHQAKLTEVDSLNDFNLDINAIKAALNEKTAAILINSPNNPTGKVYSASVLESLASMLIEHGKKTGRFPYLVSDEPYREIAYECEVPPVLCCYSESIVVSSYSKSLSLPGERIGFIAVSPNAEGKDDLLSGLIYATRILGFVNAPALMQRIVAALTQARVDVSIYARRRDAFMKVLNNAGIEYSTPQGAFYLFCKVPKSKTNRQEADDKAFTEHLKKHLILGVQGSSFGKSGWLRFAYCVDEKIISASQDAFIKAMETW

SEQ ID NO: 68965 - DNA, 1023 bp, Unknown
  Obtained from environmental sample
  misc_feature (1)..(1023): n is a, c, g, or t
atgaaacagaaaggattttttgatgaagccgacaggctaaagaagttaagcgagctgggtgattcattggaaaaactcaatgaacacatagaatggaatgattttcaaaggccgttaagcagagcgtttgaaaaagaagcgaaggggctaggcggacggccgccatttgattatgtaatgatgttcaagatattaatattacaaaaaatatataacataagcgatgaccagacagaataccagataaacgacaggctgagttttcaacggtttatagggatacaattatacgacactgtacccgacgcaaaaacgatatggcattttaaggaagtattgaaagaaacggacgtactggaaaaaatatttaagatgtttacagaaaagcttgagaaaaaaggggtaataacccaaagcggaagcatagtggacgcgacatttgtagaagcgccgaaacaaaggaatacgaaagaagaaaacaaagaaataaaggaagggaaaataccaaaggaatggcagaccgaagaaaacaagcataaaattgcgcaaaaagatactgacgcgcggtggatgacaaaaaacaaagaacgtcattacgggtataaagatcatataaaaatagacaagaaatcgaaaataataatgaaatacagcgtaaccagcgcggaagtgcatgacagccaagaactgaaaaatctcatagaaaaaatgaaagatcgcagactttacggggacagcgcatatactggaaaagaagtacaaagatgtataccgaaaaaaacaatgaaccggatacacgagaaaggatacaggaaccgaccgttgacaaaaacacaagagaggaataacacggcaaaatcacggataagggcaagggttgaacacgtatttgcggcaatgaatcattttggagggatagcgatacggacgataggaatagccagggcggaaatacaaataggattattaaatttagcgtataacttgaccagatatacttatcttatggaggcaaaagcataa

SEQ ID NO: 68966 - protein, 340 aa, Unknown
  Obtained from environmental sample
  DOMAIN (140)...(329): Transposase DDE domain
  misc_feature (1)..(340): Xaa is any amino acid
MKQKGFFDEADRLKKLSELGDSLEKLNEHIEWNDFQRPLSRAFEKEAKGLGGRPPFDYVMMFKILILQKIYNISDDQTEYQINDRLSFQRFIGIQLYDTVPDAKTIWHFKEVLKETDVLEKIFKMFTEKLEKKGVITQSGSIVDATFVEAPKQRNTKEENKEIKEGKIPKEWQTEENKHKIAQKDTDARWMTKNKERHYGYKDHIKIDKKSKIIMKYSVTSAEVHDSQELKNLIEKMKDRRLYGDSAYTGKEVQRCIPKKTMNRIHEKGYRNRPLTKTQERNNTAKSRIRARVEHVFAAMNHFGGIAIRTIGIARAEIQIGLLNLAYNLTRYTYLMEAKA

SEQ ID NO: 68967 - DNA, 552 bp, Unknown
  Obtained from environmental sample
  misc_feature (1)..(552): n is a, c, g, or t
ttgtgtttttgtcaacggtcggttcctgtatcctttctcgtgtatccggttcattgtttttttcggtatacatctttgtacttcttttccagtatatgcgctgtccccgtaaagtctgcgatctttcattttttctatgagatttttcagttcttggctgtcatgcacttccgcgctggttacgctgtatttcattattattttcgatttcttgtctatttttatatgatctttatacccgtaatgacgttctttgttttttgtcatccaccgcgcgtcagtatctttttgcgcaattttatgcttgttttcttcggtctgccattcctttggtattttcccttcctttatttctttgttttcttctttcgtattcctttgtttcggcgcttctacaaatgtcgcgtccactatgcttccgctttgggttattaccccttttttctcaagcttttctgtaaacatcttaaatattttttccagtacgtccgtttctttcaatacttccttaaaatgccatatcgtttttgcgtcgggtacagtgtcgtataa

SEQ ID NO: 68968 - protein, 183 aa, Unknown
  Obtained from environmental sample
  misc_feature (1)..(183): Xaa is any amino acid
MCFCQRSVPVSFLVYPVHCFFRYTSLYFFSSICAVPVKSAIFHFFYEIFQFLAVMHFRAGYAVFHYYFRFLVYFYMIFIPVMTFFVFCHPPRVSIFLRNFMLVFFGLPFLWYFPFLYFFVFFFRIPLFRRFYKCRVHYASALGYYPFFLKLFCKHLKYFFQYVRFFQYFLKMPYRFCVGYSVV

SEQ ID NO: 68969 - DNA, 1272 bp, Unknown
  Obtained from environmental sample
  misc_feature (1)..(1272): n is a, c, g, or t
ttgagtgaaggcaacttgataaaagacggttttaacgccgagttggatcaattccgttctttgcgggacaagggcaggcagttcatcgaggattatcttaacgaagagcgcgaggctaccgggattcaaagcttaaaaatcaggtacaacaggttaatagggtatttttttgaagttactaaagcccatctttcaaaagttccgaaacactttatacgccggcagggtataacgggcggcgaaagatattctacggataggcttgccgaactggaatcggaaataaacggcgcgtcggacaaggttgtggaacttgaaaggaagctttttttggaaatccgcgaacaggtaaaaaagcatcttgcccgtctttccgccgccgcccgcaggctggctgaacttgacgccgcccagtctctggcaaaagcggcaggcataaggggttggacgcgccccgaattgaatgatacgggtaaccttgaaattattgaaggccgccacccggttgtggaagcccatcttggaaggggcgaatacattcccaacgacataatcctgaacacggaagaaggcggcatttcattcgccatgataacaggccccaacatggcgggaaaatccacctaccttcgttccgccgctcttattacaataatggctcaaacaggcagttttgttccggcaagagaagcgcgcataggcatatgtgaccgtatctattgcagggtaggggcttccgataaccttgcgaggggggagtctacctttcttgttgaaatgaacgaaacggcttttatattgaacactgctacgaaaaaaagccttgtcatcatggacgaagtgggcaggggaaccggaaccaacgacggtctttctatagcatgggcggtcagcgaagaattattaaaccgcatcggctgcaggacgctttttgccacccattttcacgagttgtcgattttatcccatccccgtctagccaaccgctccatggaagtcctggataaaaacggaaaaatcatcttcctgcgaaagttgaaagaaggccccgcagccgaatcatacggcattcatgtcgcacgtttagccggcctctcagaaaccgtcctcggcagggcggaacagatcatgaccctcctaaaagcccgcgacgccgacaccgttaaccaccttgaaaacaaggttaacaatgctaaaaaacccgcccctatccctcaaaaaaagcaatctactcccaaacccgtatcggaagaacctggtttatttgattaa

SEQ ID NO: 68970 - protein, 423 aa, Unknown
  Obtained from environmental sample
  DOMAIN (10)...(101): MutS family domain IV
  misc_feature (1)..(423): Xaa is any amino acid
MSEGNLIKDGFNAELDQFRSLRDKGRQFIEDYLNEEREATGIQSLKIRYNRLIGYFFEVTKAHLSKVPKHFIRRQGITGGERYSTDRLAELESEINGASDKVVELERKLFLEIREQVKKHLARLSAAARRLAELDAAQSLAKAAGIRGWTRPELNDTGNLEIIEGRHPVVEAHLGRGEYIPNDIILNTEEGGISFAMITGPNMAGKSTYLRSAALITIMAQTGSFVPAREARIGICDRIYCRVGASDNLARGESTFLVEMNETAFILNTATKKSLVIMDEVGRGTGTNDGLSIAWAVSEELLNRIGCRTLFATHFHELSILSHPRLANRSMEVLDKNGKIIFLRKLKEGPAAESYGIHVARLAGLSETVLGRAEQIMTLLKARDADTVNHLENKVNNAKKPAPIPQKKQSTPKPVSEEPGLFD

SEQ ID NO: 68971 - DNA, 942 bp, Unknown
  Obtained from environmental sample
  misc_feature (1)..(942): n is a, c, g, or t
ttggcaatgatcagatcggccgagagggagctccattacatttgctgccttgcggacgcgggaaacgccttttcattttcatatatcgatctttccacaggagagttctttacaagcggaatcccggcggattcccctgaaatactgcgtcaggaactggagcgccttcaaattaaagagatactgatacaggaatcgcttttagaagaaaataaacaagtcgcggcggctttttatgacagaagcggcattcttcttaaccgctgggcggactggctttttgatcccgtacaggcgaagtcgcgccttgaaaaacaattcgggctcgcgaaccttaaaagtttcggccttgacgcaggcagcgcacaaataatttccgccggcaccctgcttgaatatcttgacaccacttcaaagagccttttgcctcatataagaacattgaaggtatacagcgacagcgaatatttaggcatagacgagtcaagccagcgcaatcttgaacttttatgcaaccagcgcgacggagagacgcgtttttcccttttggaagttatggacgaaacgcgctgcgccatgggacgcaggctgttaaagcggcgtatccttcaccccttgcgcgatttgaacgcgatacaggcgcgtcttgacatggttgaacgcctgtaccgcgatcagggaaagcttggctccctgcgcgagcttttggggaaaactcccgacctggaaaggctctgttcaaggcttgcgatggacagggcgcacggcagggatatgcttgcggttaaaaacgcgatcttcagttttaaactcattatgaaacttgngtttgaaaaggatatgtgttttgagagcgcgggtacggggagacggacaattttgaaccgctttttcaaatttatgaactgcttgaaaggggaatatgcgaagatcctgccgtaa

SEQ ID NO: 68972 - protein, 313 aa, Unknown
  Obtained from environmental sample
  DOMAIN (154)...(312): MutS domain III
  misc_feature (1)..(313): Xaa is any amino acid
MAMIRSAERELHYICCLADAGNAFSFSYIDLSTGEFFTSGIPADSPEILRQELERLQIKEILIQESLLEENKQVAAAFYDRSGILLNRWADWLFDPVQAKSRLEKQFGLANLKSFGLDAGSAQIISAGTLLEYLDTTSKSLLPHIRTLKVYSDSEYLGIDESSQRNLELLCNQRDGETRFSLLEVMDETRCAMGRRLLKRRILHPLRDLNAIQARLDMVERLYRDQGKLGSLRELLGKTPDLERLCSRLAMDRAHGRDMLAVKNAIFSFKLIMKLXFEKDMCFESAGTGRRTILNRFFKFMNCLKGEYAKILP

SEQ ID NO: 68973 - DNA, 360 bp, Unknown
  Obtained from environmental sample
  misc_feature (1)..(360): n is a, c, g, or t
ttgacagattggccgagcagtttcgatgtacattcacataccttgcccttcatagaaatttacggaaccgaaggcacgcttaaagtccccgatcccaacaccttcggcggccctgtatttgtccggcgtttcaacaacgaggaatggtacaatataccgctgttaaaggcataccccgaaaattctaggggactgggaattaccgacatggcggaagcaattgaagaaaaccgcccccaccgcgcctgtgccgagatggcttaccatgtgctggacataatgcacggcatacacgacgcctcatccgcgggaaagcacatcaaactcaaaagcaaatgcaaacgccccgcggcttgttag

SEQ ID NO: 68974 - protein, 119 aa, Unknown
  Obtained from environmental sample
  misc_feature (1)..(119): Xaa is any amino acid
MTDWPSSFDVHSHTLPFIEIYGTEGTLKVPDPNTFGGPVFVRRFNNEEWYNIPLLKAYPENSRGLGITDMAEAIEENRPHRACAEMAYHVLDIMHGIHDASSAGKHIKLKSKCKRPAAC

SEQ ID NO: 68975 - DNA, 363 bp, Unknown
  Obtained from environmental sample
  misc_feature (1)..(363): n is a, c, g, or t
atgcgtaacttgacatgtattgtctgtccaatcggtggttcgctcaatgtaaatgagaactcaagcggaaatttttccgtaacaggaaaccgctgtctccgcggggaactgtacgcgaaagaggaaatccgcgcgcccaaacgcactgtaaccgccacctgccaaattgacaaagacgcaagtcctgttaagaggattccggtaaagacggcttctccttgtccgcgagagaaaattccggctttgttagatgatatttataaattgaaaattactttgcctgtgaaagccggggatgtcttgattaatgactggaagggagaagggattaatgttgtcgcgaccaggacattagatttataa

SEQ ID NO: 68976 - protein, 120 aa, Unknown
  Obtained from environmental sample
  DOMAIN (2)...(116): Protein of unknown function (DUF1667)
  misc_feature (1)..(120): Xaa is any amino acid
MRNLTCIVCPIGGSLNVNENSSGNFSVTGNRCLRGELYAKEEIRAPKRTVTATCQIDKDASPVKRIPVKTASPCPREKIPALLDDIYKLKITLPVKAGDVLINDWKGEGINVVATRTLDL

SEQ ID NO: 68977 - DNA, 756 bp, Unknown
  Obtained from environmental sample
  misc_feature (1)..(756): n is a, c, g, or t
atggcgcggcgcatgagctgggtcggatgcaaggtaaaagccgtggttgaaatcatgccttatccggcaggtcttacgcgcaacatcgtccagtgcttaaaagattttgatattcctctatatctttcctcgcagacgacaagcattttcggcaacgaccgcgttcaggggattgaggtaagccctatggaaaacggtgttatcgtacccggaaaaagtttccgtatcgactgtgatactgttctcttgtctgtcggccttgtccccgaaaacgaactttccaagacggcgggaattgagttaaacggcgttacaaacgggcctattgtagattctgatttaatgacgaacatggaaggagtttttgcctgcggcaatgtgcttcatgtccacgatcttgtagactgggtctgcgaagaaagcaggcgcgcaggcctctacgccgcacaatggctgaggggagaacgccccaacttgcagatacgcgccaaagcggggccgtccgtgcgttatgtgaaccccgcgcgtattgcgcctgagcgcgaaaaccacatttacctgcgatccatgattgtaaaaagcgacgctgtgcttgaaatcagtcttgacaaccgcgtaatccgcagtaaaaaagagcgtcatgttcagccttcggagatgatcacggtaaatcttgggcctaaagattttgaaaaatatngaataattcggattccgttttggaattcagcattaagtaggaaatgttatgcgtaa

SEQ ID NO: 68978 - protein, 251 aa, Unknown
  Obtained from environmental sample
  misc_feature (1)..(251): Xaa is any amino acid
MARRMSWVGCKVKAVVEIMPYPAGLTRNIVQCLKDFDIPLYLSSQTTSIFGNDRVQGIEVSPMENGVIVPGKSFRIDCDTVLLSVGLVPENELSKTAGIELNGVTNGPIVDSDLMTNMEGVFACGNVLHVHDLVDWVCEESRRAGLYAAQWLRGERPNLQIRAKAGPSVRYVNPARIAPERENHIYLRSMIVKSDAVLEISLDNRVIRSKKERHVQPSEMITVNLGPKDFEKYXIIRIPFWNSALSRKCYA

SEQ ID NO: 68979 - DNA, 555 bp, Unknown
  Obtained from environmental sample
  misc_feature (1)..(555): n is a, c, g, or t
ttgcacctacaagatcatcaaaatcataatgagggaaaccggcctttcatgggacgagataacaaagcacggcggaaagagccgtgtgttggaggccgcgctgtgaaagatctgcaatacgacgcggtcgtaatcggcgcgggagccgcgggaatggcggccgctcttgaacttgaatcgcaaggctttacctgcgcgattatcgagagggaagatcatcttggcggaatactaatgcagtgcattcacaacggtttcggtcttcacgaattttccgaagaactgaccggccccgaattcgccgaacgctttattgagcgcgtaacaaagtcaaagatagcggtctatcttaataccaccgttacgcgctttacttccgcgggcaataactgcgtcaaggaactgtactgcgtctctccctcaggcgcgatgaaactccagagccgcgccgttgtgcttgcgatgggctgccgggaacgcaacaggggcaacgtgcgcatacccggctcgcgccccgccggaatttacaccgcagggctgcccagcggcttgtaa

SEQ ID NO: 68980 - protein, 184 aa, Unknown
  Obtained from environmental sample
  misc_feature (1)..(184): Xaa is any amino acid
MHLQDHQNHNEGNRPFMGRDNKARRKEPCVGGRAVKDLQYDAVVIGAGAAGMAAALELESQGFTCAIIEREDHLGGILMQCIHNGFGLHEFSEELTGPEFAERFIERVTKSKIAVYLNTTVTRFTSAGNNCVKELYCVSPSGAMKLQSRAVVLAMGCRERNRGNVRIPGSRPAGIYTAGLPSGL

SEQ ID NO: 68981 - DNA, 1461 bp, Unknown
  Obtained from environmental sample
  misc_feature (1)..(1461): n is a, c, g, or t
atggtatttaattacattagattatacaataggtcaatggacttcgatgtagcggttatcggctgcggggtttccggcgcgaatatagcccgccgtctttcggtatacaacataaaaaccgccattttggaaaaagccgcggatgtttctttcgggacttcaaaggcaaattccggtattattcacggcggttttcaccacaataaaaagtacctgaaagcgcggctggaaattcaaggcagtttgatgtttgaccagcttcgcagagaattgaactttccgttccggcgttgcggaataattgtcgcagcccttcatgaagaagaaatgaaggcggtcgaacatctttacatgcagggagtagagaacggcgttatagggattgagctttgctcccgttaccggatacttgaacttgagccgaaactttcagcggatgtcgcgggggggctatatgcgcccggcggcggaataattgagccttaccgttttgtttttgcccttgttgagtcggcgctgaaaaacggtgcggagctgtttaccgattttaaggtgaatgaggccgtgcgtgaaggggatttttggacattccgcgccgaagacggcagggaaataaagagccgttatgtgataaactccgccggcctctttgccgatgaagtttcaaaaaaattcggcgcggaagattttacaatcagcgcgagaaagggcgagtattttcttttggacaggctgacaaaagcctgcccgtcaaaagtggtctttcccgttcccacaagcgtatcaaaaggaatgcttgtaatccctacagttgaaggtacagtgcttgtcggccccaccgccgacgcagtcgaagataaggatgatttttccaccacctcgcagcaccttgagcggatactcgtttcgggaaagaccatgataccgtccttgagccagaacgacgtaataacttctttcgctgggcttcgtccgtatctgggtgaagatttttatatagaggcttcggcgaaagtaccggcttttgttcaggtagcgggaatccaaagccccgggcttacagcgtcccccgccataggcgaatatgtaaaaaatattttacttgaaatcggtcttacactgacggaaaaaccgcattgggacccttatgtcgaagaccgtccctgtgcgcgggaacttaacttcaatcaactggacagcctgatcgcgaaagattccaaatggggcaacattgtctgccgctgtgaaaatgtcagcgaggcggaaatagtccaggctgtaaaacttgggcacacgactttagacggagtaaaatactttacgcgcgcgcagatgggacgctgtcagggcggcttttgcacctacaagatcatcaaaatcataatgagggaaaccggcctttcatgggacgagataacaaagcacggcggaaagagccgtgtgttggaggccgcgctgtga

SEQ ID NO: 68982 - protein, 486 aa, Unknown
  Obtained from environmental sample
  DOMAIN (410)...(465): BFD-like [2Fe-2S] binding domain
  misc_feature (1)..(486): Xaa is any amino acid
MVFNYIRLYNRSMDFDVAVIGCGVSGANIARRLSVYNIKTAILEKAADVSFGTSKANSGIIHGGFHHNKKYLKARLEIQGSLMFDQLRRELNFPFRRCGIIVAALHEEEMKAVEHLYMQGVENGVIGIELCSRYRILELEPKLSADVAGGLYAPGGGIIEPYRFVFALVESALKNGAELFTDFKVNEAVREGDFWTFRAEDGREIKSRYVINSAGLFADEVSKKFGAEDFTISARKGEYFLLDRLTKACPSKVVFPVPTSVSKGMLVIPTVEGTVLVGPTADAVEDKDDFSTTSQHLERILVSGKTMIPSLSQNDVITSFAGLRPYLGEDFYIEASAKVPAFVQVAGIQSPGLTASPAIGEYVKNILLEIGLTLTEKPHWDPYVEDRPCARELNFNQLDSLIAKDSKWGNIVCRCENVSEAEIVQAVKLGHTTLDGVKYFTRAQMGRCQGGFCTYKIIKIIMRETGLSWDEITKHGGKSRVLEAAL

SEQ ID NO: 68983 - DNA, 573 bp, Unknown
  Obtained from environmental sample
  misc_feature (1)..(573): n is a, c, g, or t
atgacgacagaacaaatgcttcacatgagcggtatccaccttgcgccttatattcaggttgccacattgcttataggaaaatcacgcgaaggcggcggaaacatgttccgccatcagcttgatacaatgacaatcctgatcgattacggttttatcgacgccgtcctcttaaaggcctcgattgtgcatgacttaatcgaagacatacacgaccttgatcataatatcctgcttacaatagattccgacagcaaggctgtttacgatctggtgctggaagtctcaaggcgcaatggcgaaaccaaggcggattttcttttgcgtatcaggacgaaaggctcttatcacgcaaaaatccttaaagtggcggatcgtatttccaacatgatatctttaggctttgtaaataatcttgattttgtagagcggtacatcaacgagacgacggagtatgtgcttccaatcgcgtgggatgtcagccagtatatgacgcgggaacttacggacttattggattcaagaaaaaaatatctggaaagattacgggatcagcctgtagtcataaacggttaa

SEQ ID NO: 68984 - protein, 190 aa, Unknown
  Obtained from environmental sample
  DOMAIN (35)...(129): HD domain
  misc_feature (1)..(190): Xaa is any amino acid
MTTEQMLHMSGIHLAPYIQVATLLIGKSREGGGNMFRHQLDTMTILIDYGFIDAVLLKASIVHDLIEDIHDLDHNILLTIDSDSKAVYDLVLEVSRRNGETKADFLLRIRTKGSYHAKILKVADRISNMISLGFVNNLDFVERYINETTEYVLPIAWDVSQYMTRELTDLLDSRKKYLERLRDQPVVING

SEQ ID NO: 68985 - DNA, 882 bp, Unknown
  Obtained from environmental sample
  misc_feature (1)..(882): n is a, c, g, or t
atgaaccttgaaggacgcgaacttgttgataatccgaacttgtccggcgcggacaagtggatttactcccgcctgaacaacgcggcaaaaaacatgagggaggcgttcttctcctaccgcttcaatgacgcggctcttacggcatacgagtatttttggaatgatttttgcgactggtatgtggaagcgacaaagctttccgtcaaaggcggagatgacgcggagaaagaccgagtaacttccgtcttgctggacgtgctggcgcaatcgctgaaacttcttcacccgcttctgccttttgtgacagaggaaatttaccaaaaactgccgcgcaagggcgcaggggagaaagagtctttgcttatctgcgcgggataccctgattatgacgcaaaacgcgatgatccgcttcaagagaaaaatttcgctgacatgcagacgcttgtgggcatggtgcgaactatacggagcgaatgcggcataacgccggaaaagaaactgcgcgttcttgtccgtaccgcgggggaacaggctcaagtctttaatcaaaactgtgatttgattaaactgcttgccggaataggggatttaagcgtcaaggacgccaaagaagacaaaccttcaggttccatagggcttgccgggcccggatttgaagtttttgtctttgtcgccgaggccgttgacacatgcgcgttaaagaaaaaactttcaggcgatcttgaaagagacaataaatatatcgaaggattgcgcgccaagctggcaaacgaacagtttgtaaagaacgcgcctgaaacattagtagcggaacaaagaagcaaacttgaggaaacgcttcttcgtacggaaaaacttaagctttatctgaaggatttataa

SEQ ID NO: 68986 - protein, 293 aa, Unknown
  Obtained from environmental sample
  DOMAIN (18)...(172): Anticodon-binding domain
  misc_feature (1)..(293): Xaa is any amino acid
MNLEGRELVDNPNLSGADKWIYSRLNNAAKNMREAFFSYRFNDAALTAYEYFWNDFCDWYVEATKLSVKGGDDAEKDRVTSVLLDVLAQSLKLLHPLLPFVTEEIYQKLPRKGAGEKESLLICAGYPDYDAKRDDPLQEKNFADMQTLVGMVRTIRSECGITPEKKLRVLVRTAGEQAQVFNQNCDLIKLLAGIGDLSVKDAKEDKPSGSIGLAGPGFEVFVFVAEAVDTCALKKKLSGDLERDNKYIEGLRAKLANEQFVKNAPETLVAEQRSKLEETLLRTEKLKLYLKDL

SEQ ID NO: 68987 - DNA, 741 bp, Unknown
  Obtained from environmental sample
  misc_feature (1)..(741): n is a, c, g, or t
gtggaacccactgaaaccggcgcggggggcgcacgcaggtttaagctgaatgattttgaaggccccctggatctgctgctgtaccttatccgcaagaacgaggtcaatatctacgacatccccatagcggaaattaccgagcagtacctggattttttgcgcagcgccgaaactttggaccttgaagacgtcaccgaatttcacgcgatggcggcgatgctcctccttataaaatcacggacgctgctgccggtcgaaatggaggatgacggcgaattgaccgatccgcgacaggacctggtcgagcggctcatcgaatatcagaaatttaaaaaactgtccgacctgatggaggaaaaagaaaaagaggcggagtgggtgattgaacggcgcaaactgcagcacgctttgccttttgccgacgcggatatttgggaacaaatcgacatctggagcctgatgaaaacatttgcctccctgatgcggcacctccccggcgagcagattcttgacatgttcgaggaagttacagttaacgaaaaaattaccctgctttcagaattgctggaaaacaagggcgagtgctctttcaccgaattggttatccgcacttcttcggcaatggatattgtatgcgcgtttctcgccattttggaagcggtaaaggtacgaatgataattatattgcaaaaccgtatgtttggcgacatactaatcagaccgcgggccgccgcggaataa

SEQ ID NO: 68988 - protein, 246 aa, Unknown
  Obtained from environmental sample
  DOMAIN (29)...(242): ScpA/B protein
  misc_feature (1)..(246): Xaa is any amino acid
MEPTETGAGGARRFKLNDFEGPLDLLLYLIRKNEVNIYDIPIAEITEQYLDFLRSAETLDLEDVTEFHAMAAMLLLIKSRTLLPVEMEDDGELTDPRQDLVERLIEYQKFKKLSDLMEEKEKEAEWVIERRKLQHALPFADADIWEQIDIWSLMKTFASLMRHLPGEQILDMFEEVTVNEKITLLSELLENKGECSFTELVIRTSSAMDIVCAFLAILEAVKVRMIIILQNRMFGDILIRPRAAAE

SEQ ID NO: 68989 - DNA, 489 bp, Unknown
  Obtained from environmental sample
  misc_feature (1)..(489): n is a, c, g, or t
atggcaggcgcggaaaaaagcggatttgcaaattcggaactttgcgattttcacggaaaaaactacatacttactccaatttcacgtaacaaaactgaaaaccttgatttcttaaaagacattatttaccgcatgggttttgcgcgtatcacacaggtaactcccgaagaacacgataaaaaaatcgcttttacaagccagctttgccatgtgattgccgccgccttgattgactgcgaaactgatacaaagattacccgttttggcggcggcagttttgaagacttaacccgtatcgccatgcttaacgcccctatgtggactgagatttttatcgaaaacaacgacgctcttttggaacgcataaatcagtttgaaaagagccttgatttattaaagactctgattaaagacgaacaggcggatgaattgatgaaaaaactcactgttgtaagagaacgcaggattgagatgggaaagaaagaatga

SEQ ID NO: 68990 - protein, 162 aa, Unknown
  Obtained from environmental sample
  DOMAIN (2)...(155): Prephenate dehydrogenase
  misc_feature (1)..(162): Xaa is any amino acid
MAGAEKSGFANSELCDFHGKNYILTPISRNKTENLDFLKDIIYRMGFARITQVTPEEHDKKIAFTSQLCHVIAAALIDCETDTKITRFGGGSFEDLTRIAMLNAPMWTEIFIENNDALLERINQFEKSLDLLKTLIKDEQADELMKKLTVVRERRIEMGKKE

SEQ ID NO: 68991 - DNA, 489 bp, Unknown
  Obtained from environmental sample
  misc_feature (1)..(489): n is a, c, g, or t
atgctaaccgatgatattcttgaagcggcaataacttacaacggaaatgatgtaaaacgtatcaatcatttgcttaaagttttttcatttgcccatcatatcggcattatggaaaaatgtgatgcaaaaacacaggaaattattgatatttccgcaatactccatgatattggtattcatgaagcggaacggaaacataattcaaacgcaggaaactggcaggaaatcgaaggtcctcctgttgccgataaaatcttaaaagattttgatttagatgatgttattaaagacagaattttatttcttatcggacaccatcaccaatataacgctattgacggtatagattttcaaatattggttgaggcggattttttggtaaatatttttgaagacggaatgaatgaaaaatcaataaaaagcatccaggaaaaaatattcaaaactaagagcggggcaaatttactggaaaaactatatttatcctga

SEQ ID NO: 68992 - protein, 162 aa, Unknown
  Obtained from environmental sample
  misc_feature (1)..(162): Xaa is any amino acid
MLTDDILEAAITYNGNDVKRINHLLKVFSFAHHIGIMEKCDAKTQEIIDISAILHDIGIHEAERKHNSNAGNWQEIEGPPVADKILKDFDLDDVIKDRILFLIGHHHQYNAIDGIDFQILVEADFLVNIFEDGMNEKSIKSIQEKIFKTKSGANLLEKLYLS

SEQ ID NO: 68993 - DNA, 534 bp, Unknown
  Obtained from environmental sample
  misc_feature (1)..(534): n is a, c, g, or t
atgtttgaaaaattggtgaaaataaattgtttctcaaaaaacaaactgttaaaaaatatagcccgtaatttattggaaaaattatattgctgtgaaattaattgcatggaaatagatagaagcgtattattcgcccatcatgcgcgcggctgcacaattatcgcttcaaaaatttgcgagaatgttgtaattcttcagaatgtaaccgtcggatcaaatttaaaattcaataaaattaaaaacgaatgggaaaatgtcggcaatccgattatttgtaaaaatgtagttatcgctgacggcgcaaaaatattcggtcccataataatcggagaaaataccgtagtatcggcaggcgcaataattacaaaagatatacccgctaacagtatagcttacggcgttaatcaatttagacctaaagatggtaattatgatttattatataacggaaatatgatagaattcgaaaaaattatagaagtaaataataagttaatagaaaattttaacaggaaaaattatgctaaccgatga

SEQ ID NO: 68994 - protein, 177 aa, Unknown
  Obtained from environmental sample
  misc_feature (1)..(177): Xaa is any amino acid
MFEKLVKINCFSKNKLLKNIARNLLEKLYCCEINCMEIDRSVLFAHHARGCTIIASKICENVVILQNVTVGSNLKFNKIKNEWENVGNPIICKNVVIADGAKIFGPIIIGENTVVSAGAIITKDIPANSIAYGVNQFRPKDGNYDLLYNGNMIEFEKIIEVNNKLIENFNRKNYANR

SEQ ID NO: 68995 - DNA, 711 bp, Unknown
  Obtained from environmental sample
  misc_feature (1)..(711): n is a, c, g, or t
atgtaccgtgagttaattcctcatgtaaaaccaggcgttcaaacaatcgagattgatcgatgggtgcagaactggataaaaaaagccggaggcaaacctatttttctaggttatacgataaagaaaaccccctaccccgccgccatttgcatttcgattaacgacgaggtaatccacggcattccctcaaaaagacgcatactagacggcgatctggtttctcttgactgcggtatagaccttggcggatttataagcgatcaagccgtcagcatagaagcgggaaaagtaagcgacgccgtgaaaaaaataaacaagataacaaacgaggctttgtacagcggaataacggcggcaaaagccggcgacaggcttttacaaatctcgcgcgccgtagaaagttatgtgaaacctcatggatacggaatagtcagagaatactgcggtcatggagtgggtctttcccttcacgaagacccgcaagtgccgaattctccgcacggaccgaacccaaagataagcaacggcatggttatcgcgattgaaccgatgatcaacatgggaacaagcgacattgaagtccttgaagacgaatggacagtcgttacagccgactcaaaagtttccgcccactgggaacacacgatagcgattttcaacggcaagacggaaattctaaccgagcctttggagtcttttgtttttaaataa

SEQ ID NO: 68996 - protein, 236 aa, Unknown
  Obtained from environmental sample
  DOMAIN (2)...(228): metallopeptidase family M24
  misc_feature (1)..(236): Xaa is any amino acid
MYRELIPHVKPGVQTIEIDRWVQNWIKKAGGKPIFLGYTIKKTPYPAAICISINDEVIHGIPSKRRILDGDLVSLDCGIDLGGFISDQAVSIEAGKVSDAVKKINKITNEALYSGITAAKAGDRLLQISRAVESYVKPHGYGIVREYCGHGVGLSLHEDPQVPNSPHGPNPKISNGMVIAIEPMINMGTSDIEVLEDEWTVVTADSKVSAHWEHTIAIFNGKTEILTEPLESFVFK

SEQ ID NO: 68997 - DNA, 690 bp, Unknown
  Obtained from environmental sample
  misc_feature (1)..(690): n is a, c, g, or t
ttggaaaattattataaactgctcggcgttaagccgggagcgagcgcggcggaaataaaaaaagctttccgcaagaaggcgaaacagcttcaccccgatattgcgggcgaagataattcgggggcgatgcggaaattaatagccgcttatgaggcgctttccgacttaaacaggcgttttgattacgagagggtttattcttcttatgccaagaaaacgggattcgattaccgcacttggcttaatgaacaggaaaaacccgagtataaggcaagattgattttttacgagcttttgaatcttcaagaggatagggctatcgaagtttggagaaaaaacggcggacttgattttcaactggaaaaacacatggaaagagaggattggatggattgccagtatattcttgcggaagaattggacagaagaaatttcagttttgaagcttttaagctgctcgccgccattcttgcggaagaacaccgccgcccttactttaatcattttactacggatataaaaaaatatgttaaaacgataataggcaagagattgaaacagcaggtggacaatgaaacgtttgttacctgcatggaatcattaattggcgttggattttccgattatgaagaaaacacttttaatgaatacaaagaacgagcgttaaacgaaataagggctgaacaatga

SEQ ID NO: 68998 - protein, 229 aa, Unknown
  Obtained from environmental sample
  DOMAIN (3)...(63): DnaJ domain
  misc_feature (1)..(229): Xaa is any amino acid
MENYYKLLGVKPGASAAEIKKAFRKKAKQLHPDIAGEDNSGAMRKLIAAYEALSDLNRRFDYERVYSSYAKKTGFDYRTWLNEQEKPEYKARLIFYELLNLQEDRAIEVWRKNGGLDFQLEKHMEREDWMDCQYILAEELDRRNFSFEAFKLLAAILAEEHRRPYFNHFTTDIKKYVKTIIGKRLKQQVDNETFVTCMESLIGVGFSDYEENTFNEYKERALNEIRAEQ

SEQ ID NO: 68999 - DNA, 321 bp, Unknown
  Obtained from environmental sample
  misc_feature (1)..(321): n is a, c, g, or t
atgactcgctttagggtaaaaacatcaaaaaacgccaaaaaaaccccaaatttgaggttttttacctcaaaatccgacttaaaaacctcaatgttcgacttaaaaacctcaatgttcgacttaaaaacctcaacgttcgacttaaaaacctcgacatccgccttaaaaacctcaacgttcgacttaaaaacctcaacgttcgacttaaaaacctcaacgttcgacttaaaaacctcaacgttcgacttaaaaacctcaacgttcgacttaaaaacctcaacgttcgacttaaaaacctcaacgttctataacggcacatga

SEQ ID NO: 69000 - protein, 106 aa, Unknown
  Obtained from environmental sample
  misc_feature (1)..(106): Xaa is any amino acid
MTRFRVKTSKNAKKTPNLRFFTSKSDLKTSMFDLKTSMFDLKTSTFDLKTSTSALKTSTFDLKTSTFDLKTSTFDLKTSTFDLKTSTFDLKTSTFDLKTSTFYNGT

SEQ ID NO: 69001 - DNA, 660 bp, Unknown
  Obtained from environmental sample
  misc_feature (1)..(660): n is a, c, g, or t
ttgctgtatatagcaatggaagattacgaattggactggatagtagggcaggggcctatggcaaggacgcttagaatccccatacagccttttactttggtcggggccactaccaaggcggggatagtatcaggcccgcttatcagccgcttcggcattacctgccgtttctcgttttatcaacaggaggatatggaagccatagtcaggcgatcagcgggactgctcaatataaaaatcgacaatgaagccgtcgttctgctggcaaagtcctcaaggggaacgccgagggttgtaaaccggctgctaaggcgcatgagggattatgcccagtatgcgggaagctccagtattacgttaaccgttgtaaaagacgggttaacaaagctggaaattgacgcgctagggcttgaaaagcaggatagagacatactaaaaattataatcgaacgataccagggcgggcctgtgggcgctgaaacccttgccatctccataggcgagtccgtggagacccttgaagattactatgagccctacctcattcaaagcggcctgttacagcgcaccccccgcggaaggatggtaacaacccttgcttacggccatttggggcttacacctgttaacactggcaatggggatgtttcgttgttttaa

SEQ ID NO: 69002 - protein, 219 aa, Unknown
  Obtained from environmental sample
  DOMAIN (129)...(207): Holliday junction DNA helicase ruvB C-terminus
  misc_feature (1)..(219): Xaa is any amino acid
MLYIAMEDYELDWIVGQGPMARTLRIPIQPFTLVGATTKAGIVSGPLISRFGITCRFSFYQQEDMEAIVRRSAGLLNIKIDNEAVVLLAKSSRGTPRVVNRLLRRMRDYAQYAGSSSITLTVVKDGLTKLEIDALGLEKQDRDILKIIIERYQGGPVGAETLAISIGESVETLEDYYEPYLIQSGLLQRTPRGRMVTTLAYGHLGLTPVNTGNGDVSLF

SEQ ID NO: 69003 - DNA, 366 bp, Unknown
  Obtained from environmental sample
  misc_feature (1)..(366): n is a, c, g, or t
atggcaaaaaaagaaagccttgtaaggcctgaaaaaactaatgatgacgagcgcgacatgactctccgcccaaagtacctgtccgaatttatcgggcagcagggaatgaaagaaaatctttcggtatttattacaacagccaaacagcggggcgagagtcttgaccatttgtttttgatagggccgcccggcttgggcaagaccactcttgcgcaggtagtcgcgaatgaacttgaaacaggctttgtgcagacctccgcccccgctctggacaagccgaaagacttggtggggctgttaacaaacctgaaaaaaggcgatgttttttttattgatgaaatacacaggttaaaaacccgctattga

SEQ ID NO: 69004 - protein, 121 aa, Unknown
  Obtained from environmental sample
  DOMAIN (5)...(55): Holliday junction DNA helicase ruvB N-terminus
  misc_feature (1)..(121): Xaa is any amino acid
MAKKESLVRPEKTNDDERDMTLRPKYLSEFIGQQGMKENLSVFITTAKQRGESLDHLFLIGPPGLGKTTLAQVVANELETGFVQTSAPALDKPKDLVGLLTNLKKGDVFFIDEIHRLKTRY

SEQ ID NO: 69005 - DNA, 423 bp, Unknown
  Obtained from environmental sample
  misc_feature (1)..(423): n is a, c, g, or t
atgaggctttatggctttgccagcgtaaggcggcgcgccgcttttcttgaactgttaaaagtcgaaggaataggccccaagggagcaattaaaatattaagcggtataagacaggaagaccttgaaaaagcccttgaaaacggcgatattgcgcgcctggaggctgtccccgggcttggcaagaaaacggctcaaaaaatggttctggcgctcaaggggaagcttgtccaagagcaggatatttccgtctcttcttccccgtataacgaccttgtagaggctctcgccgcgatggggtatgacaggcgcgcggcggcggacgcgctggcaaaagcggataaggctatagcgcaagacctgccggataaagaaagggaaaaactcctttttcaggatgcgataataaatttgagcggcgcgtag

SEQ ID NO: 69006 - protein, 140 aa, Unknown
  Obtained from environmental sample
  misc_feature (1)..(140): Xaa is any amino acid
MRLYGFASVRRRAAFLELLKVEGIGPKGAIKILSGIRQEDLEKALENGDIARLEAVPGLGKKTAQKMVLALKGKLVQEQDISVSSSPYNDLVEALAAMGYDRRAAADALAKADKAIAQDLPDKEREKLLFQDAIINLSGA

SEQ ID NO: 69007 - DNA, 513 bp, Unknown
  Obtained from environmental sample
  misc_feature (1)..(513): n is a, c, g, or t
ttgaaaatgcgaaaaaattcttaccagtttgaagtaattatttctgatacttcaagcctgtcaaatttaaaaaatataggacaacttcacttattaaaagagttatatacaaatattactataacgtctgatgtttttgaagaatatcaaaagaaatttaatgatcaattacctgaatggattactataaaacaagtcaaaaatagaaaaaggatttttgaactaatgaataaataccattatggaattggggagtcaagttccatagttttcgcaacggaaaacccaaatacgcttattattattgacgatcaaaaaccgaaaatatacgcgtcaagtataggtttggctgtaataggaacaatcggtataataaaacaagcggttgataaaaatttaataaaaagcgttaaagaagcaaatttattatttgataaattagttgaaaccggagccagaataagcccagaattattgaatgatataaagtatccaattgagtcggagaattaa

SEQ ID NO: 69008 - protein, 170 aa, Unknown
  Obtained from environmental sample
  misc_feature (1)..(170): Xaa is any amino acid
MKMRKNSYQFEVIISDTSSLSNLKNIGQLHLLKELYTNITITSDVFEEYQKKFNDQLPEWITIKQVKNRKRIFELMNKYHYGIGESSSIVFATENPNTLIIIDDQKPKIYASSIGLAVIGTIGIIKQAVDKNLIKSVKEANLLFDKLVETGARISPELLNDIKYPIESEN

SEQ ID NO: 69009 - DNA, 1350 bp, Unknown
  Obtained from environmental sample
  misc_feature (1)..(1350): n is a, c, g, or t
atggcggattattttgtcggcggaaaagagtattttcccggaatccaaaaaatcaaatttgaggggccgaagagcaagaaccctctggcgttcaaattctacgacgcggaaaaagtgataggcggcaagaagatgaaggatcatctgcgctttgcgattgcctactggcacagcttttgcggcgacggcggcgacccgttcggaccgggcacgcacatcttcccgtggaatacggaagcgaaagacgcgatggacgctgcggacagaaaaatggacgcagcttttgaattctttacaaagataggcgcggaattttacgccttccacgacagggacatagcccccgaaggcgcgaatccagcggaaagcgaaaaaaaccttaagaccttagtcgcgaaagcgaaaaaattgcagggcgagacaggcgtaaaactgctttggggaaccgcgaatgttttcggcaacccgcgctttatgaacggagcggcaacaaatcccgagttcggagttgtagctcttgccgcgactcaggtaaaagccgcgatagacgcgacgatagagcttggcggcgcaggctacactttctggggcggacgcgaaggttacatgagccttcttaacacggaccttaagagggaaaaagaaaacttagcgcgcttccttacgatggcgagggactacgcgcgcaaacagggctttaagggcgtgttttacattgagccgaaaccgatggagccgacaaagcaccagtacgattttgacacggagaccgtcataggcttcctgcgccagtggggtcttgataaagatttccgcatgaacattgaagccaaccacgccgaacttgccggacacgaattcgcgcacgagctggaaacagccgcggcggcgggcttcttcggctcggtagacgccaacagaggcgacgtacaaaacggctgggacacagaccagttcccgatgagctattacgaaacagcgatggccatgtacacgattcttaaaatcggcggctttacaacaggcggacttaacttcgactcaaagattcgcagaaactcaatagatccggcggatctgtttatagcccacataggcggcatggacgccttcgcggttgggttacaggttgcgcagaggattattgacgacggaattatcccgaactttgtgaaagagcgttatgcgtcattcggctcgggcgacggggcgaaattcagcaagggagagcttacgctggaacagcttgcgaagatagggacggacgcgggctacgggaagacgggcattacgagcgggaagcaggaatatttggagaatgttttgaacgggtatttactggggctttag

SEQ ID NO: 69010 - protein, 449 aa, Unknown
  Obtained from environmental sample
  DOMAIN (95)...(310): Xylose isomerase-like TIM barrel
  misc_feature (1)..(449): Xaa is any amino acid
MADYFVGGKEYFPGIQKIKFEGPKSKNPLAFKFYDAEKVIGGKKMKDHLRFAIAYWHSFCGDGGDPFGPGTHIFPWNTEAKDAMDAADRKMDAAFEFFTKIGAEFYAFHDRDIAPEGANPAESEKNLKTLVAKAKKLQGETGVKLLWGTANVFGNPRFMNGAATNPEFGVVALAATQVKAAIDATIELGGAGYTFWGGREGYMSLLNTDLKREKENLARFLTMARDYARKQGFKGVFYIEPKPMEPTKHQYDFDTETVIGFLRQWGLDKDFRMNIEANHAELAGHEFAHELETAAAAGFFGSVDANRGDVQNGWDTDQFPMSYYETAMAMYTILKIGGFTTGGLNFDSKIRRNSIDPADLFIAHIGGMDAFAVGLQVAQRIIDDGIIPNFVKERYASFGSGDGAKFSKGELTLEQLAKIGTDAGYGKTGITSGKQEYLENVLNGYLLGL

SEQ ID NO: 69011 - DNA, 1491 bp, Unknown
  Obtained from environmental sample
  misc_feature (1)..(1491): n is a, c, g, or t
atgcagactatatgcggaattgaccttggaacccagagctgcaagctggttgtctatgattatgaaaagaaagccattattgcccaatcgcaggctccggtggacattatagccaacaatgacggcacaagggaacaaaaaaccgagtggtacgacgcggtcgtaaaaacctgttttgataaaatcgaaaatgacgtaaagaaaaccatagccgccataggcgtttccggacagcagcacggttttgtgccgcttgacggcaagggaaagcctgtctacaacgtaaaactttggtgcgacacttccacggcggaggaatgcgaagaactgacaaaagccgcgggcggagaaaagaaacttatcgccaaggccggtcttcctatgaggcccggttacaccgcgcctaaagttctgtggcttaaaaaacacaaacccgccgccttcgcaaaactgcggcatatacttctgccccacaattacatcaactttttattgacaggcgaatactgggcggaatacggcgacgcgtccggcacagctctttttaacgtaagcgagcgcaaatggtcttccgccgtttgcaaacttatttcccccgatttggaaaaatatcttccgccgcttacagcctccgacaaaacagccggaaaggttagcaaggaagcggctgaattgtacggcatcaacgaaggtgtacttgtctcctcaggcggcggcgacaatatgatgagcgcgataggcacgggtattgtacgcgacggttatcttacgatgagccttggcacttccgggacgcttttcggtttttcaaaaaagccggtaattgatcctacaggaaaccttgccgccttctgctcgtcttccggcggatggcttccgcttctttgcaccatgaactgtacagtcgcgagcgaagagttccgcaaacttatggaattggacgtaaaagcgtttgacgcggaagcggagaaatccccaataggcgcggacggcgttgtaatactgcccttctttaacggagagagaactcccaatctgcccgaaggcagggcgagcgttaacggcattaccgccgccaactttaagcgcgaaaatttagcccgcgccgctcttgagtccgccatcttcgggatgaggatagggcttgacggttttaagtcgctcggtttcaagccgaaagaaatacggcttacgggcggcggagcaaaaagcccgatttggcaaaacattgcagctaacgtgatgaacttgcctatacgcactcccgcaagttcggaagccgcggcgatagggagcgcgattcaggcgctttggtgtctgcagcgcaattcgcaatgggcgggaaagaaagccactattgaggaattgacagacgagcatgtcgcgttaggcgcaacgattaacccggacaagaagagcgtaaagctgtacaacgacgcttacgcggtatattccaggtatcttggggctttaagccctttatataaataa

SEQ ID NO: 69012 - protein, 496 aa, Unknown
  Obtained from environmental sample
  DOMAIN (250)...(478): FGGY family of carbohydrate kinases, C-terminal domain
  misc_feature (1)..(496): Xaa is any amino acid
MQTICGIDLGTQSCKLVVYDYEKKAIIAQSQAPVDIIANNDGTREQKTEWYDAVVKTCFDKIENDVKKTIAAIGVSGQQHGFVPLDGKGKPVYNVKLWCDTSTAEECEELTKAAGGEKKLIAKAGLPMRPGYTAPKVLWLKKHKPAAFAKLRHILLPHNYINFLLTGEYWAEYGDASGTALFNVSERKWSSAVCKLISPDLEKYLPPLTASDKTAGKVSKEAAELYGINEGVLVSSGGGDNMMSAIGTGIVRDGYLTMSLGTSGTLFGFSKKPVIDPTGNLAAFCSSSGGWLPLLCTMNCTVASEEFRKLMELDVKAFDAEAEKSPIGADGVVILPFFNGERTPNLPEGRASVNGITAANFKRENLARAALESAIFGMRIGLDGFKSLGFKPKEIRLTGGGAKSPIWQNIAANVMNLPIRTPASSEAAAIGSAIQALWCLQRNSQWAGKKATIEELTDEHVALGATINPDKKSVKLYNDAYAVYSRYLGALSPLYK

SEQ ID NO: 69013 - DNA, 660 bp, Unknown
  Obtained from environmental sample
  misc_feature (1)..(660): n is a, c, g, or t
ttgatgctttggtttcgggcactctggtatgtaacgtcactaaagactgggaccagcgcactcggattgcaacggattttaggcataggtagttacaagacagcatggacttggctacacaagatacggagggcaatggtacgtcctggtcgggacaggctttcagggcgtgttgaagttgatgaaacatatttcggagccccagaaaaaggtggaaaacgtggtcgaggcactgaaaacaaggtattagctgctattgcggtagaaacgaacgaaaagattgtaggccggattcgtgtcagtatgctgacagatgcatctcaagacagcctccataaattcatacaagaaagtgtggaatctgggagtacagtagtaactgatggatggcttggatataatcatgaaataatagttcatcaggatttagatgctttacttccatatgtccacactgttatttctttgatgaaacggtggattatgggaacgcttcaaggttcttgttctagcgaacatcttcaatattattttgatgagtatacctttcgtttcaaccgtcgaaaatcaaaaagtagaggacagttgttttatcgcttgcttcaaaacgctgttcaaatagaaccggtaatttacaaaaatattattgctaaacattaa

SEQ ID NO: 69014 - protein, 219 aa, Unknown
  Obtained from environmental sample
  misc_feature (1)..(219): Xaa is any amino acid
MMLWFRALWYVTSLKTGTSALGLQRILGIGSYKTAWTWLHKIRRAMVRPGRDRLSGRVEVDETYFGAPEKGGKRGRGTENKVLAAIAVETNEKIVGRIRVSMLTDASQDSLHKFIQESVESGSTVVTDGWLGYNHEIIVHQDLDALLPYVHTVISLMKRWIMGTLQGSCSSEHLQYYFDEYTFRFNRRKSKSRGQLFYRLLQNAVQIEPVIYKNIIAKH

SEQ ID NO: 69015 - DNA, 912 bp, Unknown
  Obtained from environmental sample
  misc_feature (1)..(912): n is a, c, g, or t
atgatagaatatccaaggaatatcatggaatttgaacaagaatttagtagtgaaaagaaatgtttggaatatctgataaagatgagatatgcggacggggtatatacctgtccgttatgcggaagcaagaagtcctggctggttagaaaacacacctacgaatgtgctgaatgccatcaccaggaatcaatgttatcggggacattgtttcaagacactcataaaccgttgatgctctggtttagggcaatctggtatattacctctcaaaagaacgggaccagcgcgcttgggttgcaacggatattaggtatagggagttacaagactgcttggacgtggttgcacaaattgcggcgggcgatggtacgccccggcagggaccggctttcaggacgggttgaagtcgatgaagcgtatataggagcgcctgaaaaggggggaaaacgcggtcgaggagcagaaaacaaggtacttgccgcgattgcggtggaaactgccgacaatacggttggccggattcgggtcggcatactgacggatgcttcccaagccagtctccgtaacttcattcatgaaagtgtagaaccggggagcgccatagttactgacggctggcggggatacagcgggattgaatcctatggatacacccatgaagttattgaacatctgaccgaggatacgcttctcccccatgttcataccgttatttccctgataaaacggtggatcatgggaactatgcaagggtcatgttctcaggaatatttggcatattatcttgatgaatatacctttcgatttaacagacgtaaatcaaagagcagaggtttgttgttttaccgcctactccaaaatgctgtcctgttggaaccagttacttatcagaatatcatcccaaaacaatga

SEQ ID NO: 69016 - protein, 303 aa, Unknown
  Obtained from environmental sample
  misc_feature (1)..(303): Xaa is any amino acid
MIEYPRNIMEFEQEFSSEKKCLEYLIKMRYADGVYTCPLCGSKKSWLVRKHTYECAECHHQESMLSGTLFQDTHKPLMLWFRAIWYITSQKNGTSALGLQRILGIGSYKTAWTWLHKLRRAMVRPGRDRLSGRVEVDEAYIGAPEKGGKRGRGAENKVLAAIAVETADNTVGRIRVGILTDASQASLRNFIHESVEPGSAIVTDGWRGYSGIESYGYTHEVIEHLTEDTLLPHVHTVISLIKRWIMGTMQGSCSQEYLAYYLDEYTFRFNRRKSKSRGLLFYRLLQNAVLLEPVTYQNIIPKQ

SEQ ID NO: 69017 - DNA, 792 bp, Unknown
  Obtained from environmental sample
  misc_feature (1)..(792): n is a, c, g, or t
gtgaagtatatacccagtaaaaagaaatatcctgaccagctcgggttacattacgcgttatggacgcgggaaggcatacggcaattgatacaaaaaatatttagtataaccatgccgatacgtactgtaggcgaatatttgaggcgctggaacttcaccccgcagaaaccgaaaaaatacgcatatgaacgggatgaagaaaaagttaaagaatgggttgaaaaagagtatccgcgtataaaaaagcaggcaaaaagacaaaaagcggaaatttattggggagatgaaaccggcataacaacaacagatgtaagaggccggggatatgcaccggagggaaaaacgcctgtggtacagcagcgcgggaagaaaaaatccatgagtatgatttcggcgataacaaaccaaggcaaaatatattggaaattgtttgagggaagtataaacagcgggaagtttctggaatttgtgaaacggcttacaatgaataagagccggaaaatatttctgatagtagataatgccaaaccgcatcacagtcttatattgaaagaatggttgaaaaaaaataaaaagaagatagaactgtattatctgccttcgtacagccctgatttaaacccggatgaacatgtcaatgcggatttaaagtacggtattggctcaaaagcgcctaanagtacaaaggaaaatatgataaatgcggcagaggaacatatgcggatgctaaaacaaacaccagaacgaataatgaaatattttgaagacacaacaatcagttatgctgcttag

SEQ ID NO: 69018 - protein, 263 aa, Unknown
  Obtained from environmental sample
  misc_feature (1)..(263): Xaa is any amino acid
MKYIPSKKKYPDQLGLHYALWTREGIRQLIQKIFSITMPIRTVGEYLRRWNFTPQKPKKYAYERDEEKVKEWVEKEYPRIKKQAKRQKAEIYWGDETGITTTDVRGRGYAPEGKTPVVQQRGKKKSMSMISAITNQGKIYWKLFEGSINSGKFLEFVKRLTMNKSRKIFLIVDNAKPHHSLILKEWLKKNKKKIELYYLPSYSPDLNPDEHVNADLKYGIGSKAPXSTKENMINAAEEHMRMLKQTPERIMKYFEDTTISYAA

SEQ ID NO: 69019 - DNA, 3570 bp, Unknown
  Obtained from environmental sample
  misc_feature (1)..(3570): n is a, c, g, or t
ttgaccaaccggggaaccacggccaatattaccttcccgtcaaacgcggcntggttcagggaaataagcgaaagaacggccatcccggggacaaagatggtgtggaaccccgtcaattcggcggtgtatgacgtgcgctggtcattcaccctggacagtaccctgctgccggacggcgatataacgcttcactacattgtcgtggacgaggccggcaacgcaagctactactgccagccgactatcaccgtgaagaacaagtacccggtgattgacagggtgaccctgtttacggacaacaacggccagggcgcggcgtatacgcaggacgatacggtcgagtatgtgattaacgattaccggagcaagatagaaaacaatcttgcaaccgatccgaacacaaccggctaccttaattcgggctttatctccaagaacaagtttattgggttcaaggtggaaaccaggctcggcaacggacctctgaacttcaggctgcagcatgtcacgcgggaaaggaaggtacttaccctcgcaaccctgactgaaatggagacgaccaggaacgccaataaccggacagagatcaacctgtacactatcagggcgctgggcgactactcaagcgcaaggtggaaagcgctcggcgtgccaatagaaggctcgacactgccgacggtcggcacccactttgtctttaatcccccggctgactttaacaaggctgattacgtgtccaataccgccgaagtctggaaatataaactggttgtgggcaaaggcaacgatgttaccataaaccgcgcgcagggcgacctcagcacggtcacgatagggggacagggtgataccaaccaatttgaattcaaagagcccacttccggcgggaacaccatctttgactacctcactcccgcgacgaaaatcggtgattataacggcagccacccggacgccgacgatggagcatcggatgatcccaccaagaccgctttcttcctgatcagggtgtgggactcggtgggcgtgcctgttccgactccgcagaccgaaacatggataaacgaccagttgtacgacgcggtagttgtcggcatgaacgtatacctgagagacactataaagcccaccgcgcggctttacgatttgaacccgtacacggagatagccgtaacgggtaacaatttcggcacggataaccagaacgccaccatcaaaaacgccgccactccggaggcggtcgggagcaacatagtccgcggcggcctgttcaacaccaataccgaacgcgacctggtaaaatcaggttacattgatccgcgcaacgggtcatttgccctgaatcccaaaaacagcgacgggcttccccttgtcggcgataacccgctcaagatagacacagatcagacaacgaccggaggcgacactcgggataaggtcagcggcagagtcatcctgcgcggtcttgcccaggacgatcagctggttggcgagatacagattcaaataggcactgatgccaagaagaccatcctgaaattgacgaatggcaagatggtggcgcagggtactaaccaggcctatgccgttgaaacactccattggaagaccggccacacggttgagtgggcttatgtatgggataccgagaaagagccaagcggcaggtcaggcggcggtccccttagcaatgtgccaatacaagtgtctgttgcggatgagaaaggtcctcccaacacttctgatcccaggggtactgataccaacgccgccccatacaagaacgggttcagcgttgacatagtgccctacgtcaccggttttgaacgggaaacgcccaaattcagcaccaaacgctcattgcagggctggtacagcttcttcaagggtgaacaaaatgtcgcggtgcggggttataacctgggtcaaagcgccggtaatgtcaccgttagtataagcagcagcgccaatggcagtactcctatgaccggattggcctataatggaacaacctttgagaacactaaaaaccgtttctactttacgataccaacatcggcggacagcggcaggttaaatgtcagggtgggtactacggatgcgtataaccacacaagcagccatgcggataaatcatggaaccgggaagccaacagttataccccgggctccactttgtggatcaacaagccctacgcccatatctggcggtctaccgatgacaatggcactcccagaacctatattggcacgaccagcagcagcatcgggcttaaccatccgggcatggcgctggaatatcagggcggaggctcaggtacgctccatggaacctggcaggtatatggaaacgccaattcgtattatgggacaaataccaacaattcctacccgcttcacaccccgacgccgggcgaaccgttcagcacgcctgacatcagcatttaccagggcaacggggcggcaaatatcgggtatacgtaccaaggtgacggcagggcgcggattcttatcaggtcaaatgttaccaccgctcaaggcagtaatgccaataccggcactattctcctgctggattctcccgccgacgggtctacccagcgttggcaaaatatacggttaagcaaagccgcggcaaacaacgccgattcggaaaccaatgtaggcaggatttatatgaccgcctttaacgccgataccaaaggcctgtggtttggcacacgcggtactcctcctaatgatacttcagcaaacgcgaatatgtttattgacggaggaaggtttagtaataatagtgtgccggcgatcaccgctgccggagagggtgttgcaggaaacgcgggccagtacagcgcggtagactatgacaacctcggccccattgtcgcctactatgacgggagcaatgacactgtgcgtgtcgccctgggaaccgggagcacgacctcaggctggacacggcgctacctgctgccggaaaccggaatgggcagtgaactgcgccgaggttccggcaagtatatcagcatcaaggtggacaaggacaaccatatacatctttctttctacaacagcgtctataataccgtcgtgtattactatgcagcgtcaagaaccaatattggcacagcccccaacggtaccacggttaaatgccacactattgacaatgttataaccggcggcacatggacggacatttcggtggacaacaacggcaacccctggattgtgtacggagacagttcccgcaccggcagctatgacggcgcgcgcatggcctaccagagcagcgctcaaaccggcatacggttcaccggagagctgttctgtccggtcacgggcgcggacattacaggctgggaagccctgaccatgccggcgaactacacggtaggcaacgaccgcctcaacatagaggcatggccgccgaccggccgcggcggaacgcccggtaccgcgcccggctggaacgccgccatcggctataccagcgacctgttccgcgtagggtatttcttctatccggcgtggaaggggtatggcagcaatacggtgaatgcgccgtag

SEQ ID NO: 69020 - protein, 1189 aa, Unknown
  Obtained from environmental sample
  misc_feature (1)..(1189): Xaa is any amino acid
MTNRGTTANITFPSNAAWFREISERTAIPGTKMVWNPVNSAVYDVRWSFTLDSTLLPDGDITLHYIVVDEAGNASYYCQPTITVKNKYPVIDRVTLFTDNNGQGAAYTQDDTVEYVINDYRSKIENNLATDPNTTGYLNSGFISKNKFIGFKVETRLGNGPLNFRLQHVTRERKVLTLATLTEMETTRNANNRTEINLYTIRALGDYSSARWKALGVPIEGSTLPTVGTHFVFNPPADFNKADYVSNTAEVWKYKLVVGKGNDVTINRAQGDLSTVTIGGQGDTNQFEFKEPTSGGNTIFDYLTPATKIGDYNGSHPDADDGASDDPTKTAFFLIRVWDSVGVPVPTPQTETWINDQLYDAVVVGMNVYLRDTIKPTARLYDLNPYTEIAVTGNNFGTDNQNATIKNAATPEAVGSNIVRGGLFNTNTERDLVKSGYIDPRNGSFALNPKNSDGLPLVGDNPLKIDTDQTTTGGDTRDKVSGRVILRGLAQDDQLVGEIQIQIGTDAKKTILKLTNGKMVAQGTNQAYAVETLHWKTGHTVEWAYVWDTEKEPSGRSGGGPLSNVPIQVSVADEKGPPNTSDPRGTDTNAAPYKNGFSVDIVPYVTGFERETPKFSTKRSLQGWYSFFKGEQNVAVRGYNLGQSAGNVTVSISSSANGSTPMTGLAYNGTTFENTKNRFYFTIPTSADSGRLNVRVGTTDAYNHTSSHADKSWNREANSYTPGSTLWINKPYAHIWRSTDDNGTPRTYIGTTSSSIGLNHPGMALEYQGGGSGTLHGTWQVYGNANSYYGTNTNNSYPLHTPTPGEPFSTPDISIYQGNGAANIGYTYQGDGRARILIRSNVTTAQGSNANTGTILLLDSPADGSTQRWQNIRLSKAAANNADSETNVGRIYMTAFNADTKGLWFGTRGTPPNDTSANANMFIDGGRFSNNSVPAITAAGEGVAGNAGQYSAVDYDNLGPIVAYYDGSNDTVRVALGTGSTTSGWTRRYLLPETGMGSELRRGSGKYISIKVDKDNHIHLSFYNSVYNTVVYYYAASRTNIGTAPNGTTVKCHTIDNVITGGTWTDISVDNNGNPWIVYGDSSRTGSYDGARMAYQSSAQTGIRFTGELFCPVTGADITGWEALTMPANYTVGNDRLNIEAWPPTGRGGTPGTAPGWNAAIGYTSDLFRVGYFFYPAWKGYGSNTVNAP

SEQ ID NO: 69021 - DNA, 339 bp, Unknown
  Obtained from environmental sample
  misc_feature (1)..(339): n is a, c, g, or t
atgaaatacgttattataggcaattcagccgcgggtataggcgcggtagagggtattcgtcacatggacaaggatggcgagatcaccattatcaccaacgaacggcatcacacctattcgcgccctctgatttcctatcttctgcttggcaaggttacaagggaagggattaaataccgcaacgacagtttctacaaggattataaatgtaaactactcgcggacacaactgtaacgggaattgacgccgcggcgaaggatgttattttacagaacggaaaaaaaatcccctacgacaagctgctggtcgctacgggtctctccctttcctcgccataa

SEQ ID NO: 69022 - protein, 112 aa, Unknown
  Obtained from environmental sample
  misc_feature (1)..(112): Xaa is any amino acid
MKYVIIGNSAAGIGAVEGIRHMDKDGEITIITNERHHTYSRPLISYLLLGKVTREGIKYRNDSFYKDYKCKLLADTTVTGIDAAAKDVILQNGKKIPYDKLLVATGLSLSSP

SEQ ID NO: 69023 - DNA, 432 bp, Unknown
  Obtained from environmental sample
  misc_feature (1)..(432): n is a, c, g, or t
atgaaaagggtgtatgtaaacgaaaaatggtgcctgggatgccatttgtgcgaatactattgcgctttcgcgggaaccggggaaaacgacatggccagggccctaaagggcataaaaataaacccgaagatccgcatagaggaaaaagacggaatcagcttcgccgtttcatgcaggcactgcaaaacgccgttatgcgtaaaaggatgtatcaccggcagcctgacaataactgacggcgtaattaccattgacagaacaagatgcgttagctgttatacttgtattcttagctgccccttcggcgctgtggccccttctgatgacggcgcggtgcaaaaatgcgaactgtgcgttaatacgacatcgggaaccccggcctgcgtaaaaggctgccccaacaacgcgatagtttttgaggaaagaggctag

SEQ ID NO: 69024 - protein, 143 aa, Unknown
  Obtained from environmental sample
  DOMAIN (82)...(105): 4Fe-4S binding domain
  misc_feature (1)..(143): Xaa is any amino acid
MKRVYVNEKWCLGCHLCEYYCAFAGTGENDMARALKGIKINPKIRIEEKDGISFAVSCRHCKTPLCVKGCITGSLTITDGVITIDRTRCVSCYTCILSCPFGAVAPSDDGAVQKCELCVNTTSGTPACVKGCPNNAIVFEERG

SEQ ID NO: 69025 - DNA, 861 bp, Unknown
  Obtained from environmental sample
  misc_feature (1)..(861): n is a, c, g, or t
atgacggtggaagaaaacgtgaaaaaaataatcagcggaaaagtgcgcgaaatatacgaagtctctgacgataagctggtgattgttacgaccgacagaatctccgcttttgatgtgattctgccaaagcctgtaactgacaaagggaaagtcttgaacgccgtttccctattttggtttgacttcacaaaagacattatccccaatcacattatttcaagcgatcttaaagatatgcctgagtttttccaaaaaagcgaattcgaaggccgcgccgttttggtgaaaaaactaaaaatactgccgtttgaatttatcatcaggggatatatgttcggccatatgtgggaggcttattccaaaggcgaaaaattctgcggccaaaaaatagaaggcgattataagctggccgaaaaactggccaccccgctctttaccccctctacaaaagcccatgtcgggcatgacgagtatatttcggttaaatatgtagccgacacgattggcgcggagctggcggccagaatcgaaaaagtttgtatggagctttataacacctgttacaattacgcctataacaaaaacattattattgccgataccaagtttgaatttggccttgacgcgaataacaaccttcttgtcgcggacgagatacttacgccggactcaagcaggttctggagcctttctgattataaagttggtacttcgcccaagagctacgacaaacaattggtaagggactggctcctcaacaataaaatcaacggcgaaatgcaatttgacaaagtgccggatgacgttttgcaaaagacatctgagatttatgcggaatgtcttaagaagataaccggatga

SEQ ID NO: 69026 - protein, 286 aa, Unknown
  Obtained from environmental sample
  DOMAIN (6)...(269): SAICAR synthetase
  misc_feature (1)..(286): Xaa is any amino acid
MTVEENVKKIISGKVREIYEVSDDKLVIVTTDRISAFDVILPKPVTDKGKVLNAVSLFWFDFTKDIIPNHIISSDLKDMPEFFQKSEFEGRAVLVKKLKILPFEFIIRGYMFGHMWEAYSKGEKFCGQKIEGDYKLAEKLATPLFTPSTKAHVGHDEYISVKYVADTIGAELAARIEKVCMELYNTCYNYAYNKNIIIADTKFEFGLDANNNLLVADEILTPDSSRFWSLSDYKVGTSPKSYDKQLVRDWLLNNKINGEMQFDKVPDDVLQKTSEIYAECLKKITG

SEQ ID NO: 69027 - DNA, 1506 bp, Unknown
  Obtained from environmental sample
  misc_feature (1)..(1506): n is a, c, g, or t
atggcgttgaatttgatatttcccgactatgaaatgataagaaattacgacagatgtatctgctgccgcgcctgcgaacgccagtgcgctaatgaggcgcatgaatatatagccgatctggataaaatgatatgcgacgacgcaaaatgcgtaaactgccaccgctgtatctctctttgtcccacacgcgctcttaaaattgttaaaagcggaaatacatacaaacagaatatgaactggaacggcaaaaccatcaatgaaatttacaagcaggctgataccggcggcgtgctgttgtccagcatgggcaatcccgaagattatcccgtgtactttgacaaaatactcctgaacgcctcacaggttacaaatccgtccatagaccccttgcgcgagccgatggagacaagaatatctttaggcgcgaaacccgaaagcatacaacgcgataaaaacggacggatcataaacaacctgccgccccaactgcatctttctttgccggtaatgttctccgccatgagctacggttccataagttacaacgcgcacgaaagccttgcgcgcgccgcgcaggagcttggtattctttacaataccggcgaaggcggcctgcacgaggatttttataaatacggaaagaacactattgtgcaggtcgcctcgggccgtttcggcgtccatcccggatatttaaattcaggcgcggctgttgagattaaaatggggcagggcgcgaaaccgggcatcggcgggcatctgccgggaaagaaaatagtagacgacatttcccgcaccagaatgattcccgaaggcagcgacgcgatttcccccgcgcctcaccacgacatctattcgatagaagatttgcgccagcttgtcttctccttaaaggaagccacaaattatcaaaaaccggtaattgtaaaaatcgccgccgtgcataacgttaccgccatcgcaagcggcattgccagaagcggcgcggacattatcgccatcgacggtttccgcggcgggacgggagccgcgcctacccgtatccgcgatcatgtcggcattcccatagagcttgcccttgccggcgttgacaaacgcctgcgcgacgaaggcatccgcgacagggtgtcaatcgtcgccggcggcagtatccgctcaagcgccgacattgtaaaagcgctcgctctcggcgcggactgcgtttacattgccacctccgcccttgtcgcgctaggctgccacttgtgcagaagctgccacggcggcaaatgcaactggggaatagcgacgcaggttcccgaactggtcaaacgcctgaacccggacatagggtacaagcgcctgattaatttacttacggcgtggcagcacgagatcaaggagatgatgggcggcatgggtatcaattcaatcgagggccttaagggaaaccggctcatgctccgtggtgtgggacttaacgagaaagagcttgagatactggggattaaacacgcaggagaatga

SEQ ID NO: 69028 - protein, 501 aa, Unknown
  Obtained from environmental sample
  DOMAIN (74)...(398): Glutamate synthase central domain
  misc_feature (1)..(501): Xaa is any amino acid
MALNLIFPDYEMIRNYDRCICCRACERQCANEAHEYIADLDKMICDDAKCVNCHRCISLCPTRALKIVKSGNTYKQNMNWNGKTINEIYKQADTGGVLLSSMGNPEDYPVYFDKILLNASQVTNPSIDPLREPMETRISLGAKPESIQRDKNGRIINNLPPQLHLSLPVMFSAMSYGSISYNAHESLARAAQELGILYNTGEGGLHEDFYKYGKNTIVQVASGRFGVHPGYLNSGAAVEIKMGQGAKPGIGGHLPGKKIVDDISRTRMIPEGSDAISPAPHHDIYSIEDLRQLVFSLKEATNYQKPVIVKIAAVHNVTAIASGIARSGADIIAIDGFRGGTGAAPTRIRDHVGIPIELALAGVDKRLRDEGIRDRVSIVAGGSIRSSADIVKALALGADCVYIATSALVALGCHLCRSCHGGKCNWGIATQVPELVKRLNPDIGYKRLINLLTAWQHEIKEMMGGMGINSIEGLKGNRLMLRGVGLNEKELEILGIKHAGE

SEQ ID NO: 69029 - DNA, 1092 bp, Unknown
  Obtained from environmental sample
  misc_feature (1)..(1092): n is a, c, g, or t
atgcagtatgaggggcaagtacggataccttccggctgtgctatatcaggcattattgacagaacgggacggcgtatgagcggcgaagcgattattaaatcgatcagcgtcatgcatgaccgctcgaatggtctgggcggcggtttcgccgcgtatggaatctaccctgaatataaggactattacgccttgcatttattctacgagtccgcgtccgcaaaaagagagtgcgaggattttcttgagaagcattttgatattatcaatctttcaaaaatccctaccagaaaaataaaagaaattaccgatgagccgctgatctggcggtactttgtaactcctctgccgacaaaactcgccgacagccagcttgacgaatatgaatttaccgccaaatgcgtgttccgcgtaaacacaaaaattgacggcgcttatgttttctccagcggaaaaaatatgggcgtgtttaaggctgtcgggtttcccgaagatgtcggtcgtttttacaagctggaagaatatgagggctggtgctttactgctcacggacgctacccgacaaatactccgggctggtggggcggcgcccatccgttctcccttcttgattataccgttgtgcataacggcgaaatatcttcctacgataccaacaggcgagccatcgaaatgtacggctacaaatgcaccttgcagaccgacactgaagttattacctatataatagattaccttcacaggaaacaaaaactttcctttgaagaaatcgcttccgtcatcgccgcgtctttttggcagactattgaaaaacagccgcccaaagagcgggaaatacatgaatatttgcgcgtaatgttcagcgcgcagttgattacaggaccgttttcaattcttgttggctttgacggcgggcttatggcgttaaacgacaggcttaaactccgcagcatggttgtcggagaaaaggatgatctggtctacatagcaagcgaagaagcggctatccgtatcattcagcctgaccttgacaatgtgtgggctcccagaggcggccagcctgtaatcgtcaacataaacagaggtaaagcgtaa

SEQ ID NO: 69030 - protein, 363 aa, Unknown
  Obtained from environmental sample
  DOMAIN (133)...(332): Glutamine amidotransferases class-II
  misc_feature (1)..(363): Xaa is any amino acid
MQYEGQVRIPSGCAISGIIDRTGRRMSGEAIIKSISVMHDRSNGLGGGFAAYGIYPEYKDYYALHLFYESASAKRECEDFLEKHFDIINLSKIPTRKIKEITDEPLIWRYFVTPLPTKLADSQLDEYEFTAKCVFRVNTKIDGAYVFSSGKNMGVFKAVGFPEDVGRFYKLEEYEGWCFTAHGRYPTNTPGWWGGAHPFSLLDYTVVHNGEISSYDTNRRAIEMYGYKCTLQTDTEVITYIIDYLHRKQKLSFEEIASVIAASFWQTIEKQPPKEREIHEYLRVMFSAQLITGPFSILVGFDGGLMALNDRLKLRSMVVGEKDDLVYIASEEAAIRIIQPDLDNVWAPRGGQPVIVNINRGKA

SEQ ID NO: 69031 - DNA, 786 bp, Unknown
  Obtained from environmental sample
  misc_feature (1)..(786): n is a, c, g, or t
atgagcggcgcggtctgtcagtccatcttgcgaaatccacttgcctcgccctacattctgggcgtctcttccggcgcatccctgggcgcggggataatcatcattagcggaatcgcgctccccctgctgggctctttttcactgccgctgaccggttttgtcttcggccttttaaccgttttttttgtagccgctttttcttcccgtattgacaagtcaatgtcaaataacacaatcattctctgcggcatggtgttttcgctttttttaaacgccctgcttaccctgttgagcgcaattttttccgatgacttaaagcgcataacgctgtggcagatgggaagctttgccatgcgcggctggacatacattcaactgctgctgccgtttttactggttgggaccgcgggcatactcctctatacaaaagaaatggatattatgacctttgacgatgatcaggcgaaatcggcgggcgtggaaacaacagggctgagaaaaaaattactggcattgtgcgccgtgttgacaggtgcggcggttgcgttaagcggcgttattggttttgtggatttaatcgccccgcacgcggcgcggaaaatcacaggctcgaagcacaggtatttaatccccatgtcgtttgtcataggcggatcgttgatggtaataacagacttaatcgccagaacggtcatttcaccgtcggagctgccggtgggggcgataaccgcccttatcggcgcgccgttttttgcctgggtgtatttcagggggcgcggacgatga

SEQ ID NO: 69032 - protein, 261 aa, Unknown
  Obtained from environmental sample
  DOMAIN (9)...(258): ABC 3 transport family
  misc_feature (1)..(261): Xaa is any amino acid
MSGAVCQSILRNPLASPYILGVSSGASLGAGIIIISGIALPLLGSFSLPLTGFVFGLLTVFFVAAFSSRIDKSMSNNTIILCGMVFSLFLNALLTLLSAIFSDDLKRITLWQMGSFAMRGWTYIQLLLPFLLVGTAGILLYTKEMDIMTFDDDQAKSAGVETTGLRKKLLALCAVLTGAAVALSGVIGFVDLIAPHAARKITGSKHRYLIPMSFVIGGSLMVITDLIARTVISPSELPVGAITALIGAPFFAWVYFRGRGR

SEQ ID NO: 69033 - DNA, 1059 bp, Unknown
  Obtained from environmental sample
  misc_feature (1)..(1059): n is a, c, g, or t
gtgcgccgtgttgacaggtgcggcggttgcgttaagcggcgttattggttttgtggatttaatcgccccgcacgcggcgcggaaaatcacaggctcgaagcacaggtatttaatccccatgtcgtttgtcataggcggatcgttgatggtaataacagacttaatcgccagaacggtcatttcaccgtcggagctgccggtgggggcgataaccgcccttatcggcgcgccgttttttgcctgggtgtatttcagggggcgcggacgatgagcgcggcgcttgaggtaaaggatctggcagccggatacggcgccggcgcaatcaaagattgcgatgatgttatacgcaatatcacttttaacgtgaatattggagaatgcctctgcgtgctggggccgaacggatgcggtaaaagcaccctgcttaaatcaatagcgggaattcttaaataccggggttccgttttggttgaaggcggagacatttccaacattccccgcaaagaactcgctcgaaaaatcgccctgctgagtcagaatatgcaggtgttttttccctacacggtatatgaaactgtttcaatggggcgctacgcctggtcgcagggggttcttaaaaacctttccgcgcaggataaaacaattattaatgatactctcaaaaagttagacctctgggacataaaagagcgcatgattgacgaactgagcggcggaaccttgcagcgtgtttttctggcgaaaacgatggcgcagaccccccgcctgattctgctggacgagccggcgaatcatcttgacctgaaacaccagatcgccctgctggactatttgaaatcatgggttaaagaaaatggcaccagtttgataggcgtgtttcacgatcttaatctcagccggtatttcggcgatacggcgatcttaatgaatgaggggaatctggcagcctgcggaacaatagaagaaatattaaacagcgaaattctggcaacggtttatggcattgacatccgcacgtttatgcgggaatcactggaaaagtggctccctgaaccctga

SEQ ID NO: 69034 - protein, 352 aa, Unknown
  Obtained from environmental sample
  DOMAIN (125)...(312): ABC transporter
  misc_feature (1)..(352): Xaa is any amino acid
MRRVDRCGGCVKRRYWFCGFNRPARGAENHRLEAQVFNPHVVCHRRIVDGNNRLNRQNGHFTVGAAGGGDNRPYRRAVFCLGVFQGARTMSAALEVKDLAAGYGAGAIKDCDDVIRNITFNVNIGECLCVLGPNGCGKSTLLKSIAGILKYRGSVLVEGGDISNIPRKELARKIALLSQNMQVFFPYTVYETVSMGRYAWSQGVLKNLSAQDKTIINDTLKKLDLWDIKERMIDELSGGTLQRVFLAKTMAQTPRLILLDEPANHLDLKHQIALLDYLKSWVKENGTSLIGVFHDLNLSRYFGDTAILMNEGNLAACGTIEEILNSEILATVYGIDIRTFMRESLEKWLPEP

SEQ ID NO: 69035 - DNA, 1188 bp, Unknown
  Obtained from environmental sample
  misc_feature (1)..(1188): n is a, c, g, or t
ttgcagatttttgaaatatgtgtatcaaatatgtatataccaaaaaatgtgagggttgccatgagcgcgtcaaaagttttctttaccgatatgagaacaaaaatgggcgaaagcctgctggttaagatggaacgcctgataaaaaaagcgggcatggcagggattgattttaagcaaaaatacgtcgccataaaaatacattttggcgaaccggggaatctggcgttcctgcggccaaacttcgcgaaagttgttgttgacatggtaaaatcgctgggcgggatgccctttctgacggactgcaacactttgtatgtcgggcggcgcaatcagggcttgaatcatcttgacgccgccgcggagaacggctacaccccgctgtccaccggctgtcagaacattatcgcagacggcatacgcggcaccgatgacgtggacgtgccggttacaggcggaaaatactgcaaaaccgcccatatcggcaaggccataatggacgcggatattgtcgtctcgctgaaccatttcaaggggcacgaaggcaccggcttcggcggcgcaatcaaaaatctaggcatgggttcgggcagccgcgccggaaaaatggcaatgcacaacgacggcaaaccccaggttaacaaaaaatcctgcgttagctgtaaaatctgcgcccgtttctgcgcccactccgccatcgtttttgatgacggcaaagcctttattgatcagaataaatgcgcgggctgcgggcgctgcatcggttcatgcagcaagaacgccattgaaaacaactggaacaccaacaaccaaacgctttgctgtaaaatagtcgaatacgcgaaagcggcgcttgacggccgcccgaatttccacattaatgtggtaaaccaggtttcgccgttctgcgactgccacagtgacagcgacgccgcggtggttcccgacatcggtatctttgcgagtttcgatccggtggccctggacaaagcctgcatcgacgcggtaaacgccgccccaagcatcagaaccagcgttatcggcgaacgcgaacacagccacaaggacgccgccggcaatgacgaccactttaccaacatccaccccacaaccgactggcgcgagcagatttcttacgcggaaaaaatcggactgggcagcgctgaatacgaattggttacggtgaagtag

SEQ ID NO: 69036 - protein, 395 aa, Unknown
  Obtained from environmental sample
  DOMAIN (210)...(233): 4Fe-4S binding domain
  misc_feature (1)..(395): Xaa is any amino acid
MQIFEICVSNMYIPKNVRVAMSASKVFFTDMRTKMGESLLVKMERLIKKAGMAGIDFKQKYVAIKIHFGEPGNLAFLRPNFAKVVVDMVKSLGGMPFLTDCNTLYVGRRNQGLNHLDAAAENGYTPLSTGCQNIIADGIRGTDDVDVPVTGGKYCKTAHIGKAIMDADIVVSLNHFKGHEGTGFGGAIKNLGMGSGSRAGKMAMHNDGKPQVNKKSCVSCKICARFCAHSAIVFDDGKAFIDQNKCAGCGRCIGSCSKNAIENNWNTNNQTLCCKIVEYAKAALDGRPNFHINVVNQVSPFCDCHSDSDAAVVPDIGIFASFDPVALDKACIDAVNAAPSIRTSVIGEREHSHKDAAGNDDHFTNIHPTTDWREQISYAEKIGLGSAEYELVTVK

SEQ ID NO: 69037 - DNA, 744 bp, Unknown
  Obtained from environmental sample
  misc_feature (1)..(744): n is a, c, g, or t
atggaaaagcaataccatatagattttgacgactctcacggcgcgtcttacgcgattcttcccggggaccctggacgggttgagaagatcgcatcctacctggataatccccgtttttatcatcagaacagggaatacacgacatggcttggcgagattgcaaacaaaacagtgatggtcatgtccaccggcatgggagggccctcaactgccatagcggtggaagagcttttcaaaaccggcgtaaagaattttatcagggttggcacctgcggaggcatggcgctgcccgtaacaggcggcgatcttgttattgccaccggagccatacgcatggaaggaaccaccaaagaatatgtccccattgaattccccgcggtggcaaaccttgacgttaccaacgcccttgttaaagccgccggaaaactgaaggcgcaatggcacgccggaattgtgcaatgcaaggattccttttatggccagcacagccccgaccgtatgcccgccggttatgagctaatcaacaaatgggaagcctggattaaagccggctgtctcgcttcggagatggaaagctccacactgtatattgtaagtcagatactgggcgcgagagcgggatgcgtgcttaatgttatttggaatcaggagcgcgagcgcaagggcatgagcaacccgcactgccacgacaccggccttgcaatacaaaccgccgtagaggcggtgcggatacttatgcaatag

SEQ ID NO: 69038 - protein, 247 aa, Unknown
  Obtained from environmental sample
  DOMAIN (16)...(242): Phosphorylase family
  misc_feature (1)..(247): Xaa is any amino acid
MEKQYHIDFDDSHGASYAILPGDPGRVEKIASYLDNPRFYHQNREYTTWLGEIANKTVMVMSTGMGGPSTAIAVEELFKTGVKNFIRVGTCGGMALPVTGGDLVIATGAIRMEGTTKEYVPIEFPAVANLDVTNALVKAAGKLKAQWHAGIVQCKDSFYGQHSPDRMPAGYELINKWEAWIKAGCLASEMESSTLYIVSQILGARAGCVLNVIWNQERERKGMSNPHCHDTGLAIQTAVEAVRILMQ

SEQ ID NO: 69039 - DNA, 351 bp, Unknown
  Obtained from environmental sample
  misc_feature (1)..(351): n is a, c, g, or t
atggcaaagaaacgagaagcatatgtttatcatgacttggaattcaagattaaacttgtaaagctttatcttgaaggaaatggcggttatagggcacttgcaagagaatatggattaaaagaatcaacacagcttagagattgggtaaaaaaatataaaaacggcgatcttactgaagaaaattcagacagacgaggaaagtgtacatttctaaaaaaaatcttcaaggacagagatgaggaaatggaatacctgaaacatgagaatgaatatcttaaaaaaaaattgcttttaatgggcgagccggagagctccattgcaaatttatggtcatcaaagaatctaaagtaa

SEQ ID NO: 69040 - protein, 116 aa, Unknown; identical to SEQ ID NO: 55576
  Obtained from environmental sample
  DOMAIN (14)...(85): Transposase
  misc_feature (1)..(116): Xaa is any amino acid

SEQ ID NO: 69041 - DNA, 840 bp, Unknown
  Obtained from environmental sample
  misc_feature (1)..(840): n is a, c, g, or t
atggtcatcaaagaatctaaagtaaaattaagtatagcgaaaaagtgtcgtgttttagaagtaaatcgaagcagttattataaatggcttaataaaagaccatataaaattgacgaaaatgccgaagcggaaataataaaattatatcataaacataaaggcacatacggaagggcaagaatcacacaggcgctgaaaaacgagggaatcgttataaaccacaaaaaagtataccgcataatgcgtaaattgggcttaaaagccattatacgcaagaaatggagtattagaaaatatataaaagaaaacgtggcttgtaatatattgaaccgtgaatttaaaaccgatgaaccgtttaagaaactggtgtgcgacgtaacagaaatgaaacgcgttaatgacaaccgttattatttattcagcgtaatggatttatataataacgcaataatcaccgcgagcatgtcagagcataacgactgggggcttgtcgctaaagggcttgaaaaaattccttgtcaattagagaaaataatgcttcattcggatcaaggaccgcagtttacttcaaaggcatatcatgaattaaccgaacaaaagaatatagtattgtcgatgtcacgggtaggaaactgttatgataacgccgttaaagaaagttttttcgggcattttaaggaggaattttatgtttattataatcctaaaacgcaggaggagttatatcaaaatgtaagcgatttcattgaatattacaataatgacaggattcaaatgaggtttaaaatgagtccaaatcagtatttaaagagtaataatatacagacggggtttttatga

SEQ ID NO: 69042 - protein, 279 aa, Unknown
  Obtained from environmental sample
  DOMAIN (114)...(270): Integrase core domain
  misc_feature (1)..(279): Xaa is any amino acid
MVIKESKVKLSIAKKCRVLEVNRSSYYKWLNKRPYKIDENAEAEIIKLYHKHKGTYGRARITQALKNEGIVINHKKVYRIMRKLGLKAIIRKKWSIRKYIKENVACNILNREFKTDEPFKKLVCDVTEMKRVNDNRYYLFSVMDLYNNAIITASMSEHNDWGLVAKGLEKIPCQLEKIMLHSDQGPQFTSKAYHELTEQKNIVLSMSRVGNCYDNAVKESFFGHFKEEFYVYYNPKTQEELYQNVSDFIEYYNNDRIQMRFKMSPNQYLKSNNIQTGFL

SEQ ID NO: 69043 - DNA, 627 bp, Unknown
  Obtained from environmental sample
  misc_feature (1)..(627): n is a, c, g, or t
atggaagatgttttggctgtttatgcacgtccatatgacaaaaagcgtcctgttatatgcatggatgaaaaaccgtaccagtttttaagcctgagtcaaaaacctatacctatgaaaccaggctcacctganaaggaagattatcaatatataaggcttggcacatgcagtatctttatattcaccgaaccgctttcaggctggcgttacgcgcaagcgttcccgcaacggacaaaaaaagattgggcgtaccgcattcaatggctgcttaatgaacaataccccaaagcggaaaaaatcgtattagtgatggacaacctaaacacccatgccatttcatcgctttatgaaacttttcctcctgaagaggcgttccgccttgcggggaggcttgagattcattttacgccaaaacatgggagttggcttaatatggcggaaattgagttgtccgccatgaccgcacaatgtctgggcgacaggcgtatttccgacattgaatctttgaataaggaacttgccttgtggtataacaggcgtaatcagtctcaaaaaggagttgattggcaatttaccactgcggatgcgcgtatcaaacttaaaaggctttaccctttaattgtgtaa

SEQ ID NO: 69044 - protein, 208 aa, Unknown
  Obtained from environmental sample
  misc_feature (1)..(208): Xaa is any amino acid
MEDVLAVYARPYDKKRPVICMDEKPYQFLSLSQKPIPMKPGSPXKEDYQYIRLGTCSIFIFTEPLSGWRYAQAFPQRTKKDWAYRIQWLLNEQYPKAEKIVLVMDNLNTHAISSLYETFPPEEAFRLAGRLEIHFTPKHGSWLNMAEIELSAMTAQCLGDRRISDIESLNKELALWYNRRNQSQKGVDWQFTTADARIKLKRLYPLIV

SEQ ID NO: 69045 - DNA, 702 bp, Unknown
  Obtained from environmental sample
  misc_feature (1)..(702): n is a, c, g, or t
gtgccaagcacctcgtggcgttcacgggcgcgggggtcagcacgcttcaggcatacgggattttcgcggcaagaacgggattgcgaacggggaaacggttttaatatcgacgtttttgaagaggatccttcggtgtactatgacaacgcgcgttcattcatctataaccttaacgaaaaagaaccgtccatagtgcatactgtcctgggggagctggaaaaaagaggaatcctaaaagcggtaataacgcagaacattgatctcctgcaccagaggggcggaagctccaatgtgatagaagtccacggctctcctaaggtacattactgccttcgctgtccgggcgtcagaatgggctttgaggaagccgccgccattgtgctctcgggcaacatgccgcaatgcccaaagtgcggcagggttttaaaaccggcgattaccttttacggagaaagcctaccgatagaagcattgaaggaagcgactgtgcaggcccataaagccgaccttatgcttgtgctgggaactaccctggtcgtttacccggcggcatccatgcccgaatacaccctgcgctcgggcggcagaatagttattgtgaacaacatgcccacccatctggacaggcaggcttcaatgcattttgacgagttaggtccggtctttgaggaactgcaaagccttatccacccttgccagtga

SEQ ID NO: 69046 - protein, 233 aa, Unknown
  Obtained from environmental sample
  DOMAIN (16)...(182): Sir2 family
  misc_feature (1)..(233): Xaa is any amino acid
MPSTSWRSRARGSARFRHTGFSRQERDCERGNGFNIDVFEEDPSVYYDNARSFIYNLNEKEPSIVHTVLGELEKRGILKAVITQNIDLLHQRGGSSNVIEVHGSPKVHYCLRCPGVRMGFEEAAAIVLSGNMPQCPKCGRVLKPAITFYGESLPIEALKEATVQAHKADLMLVLGTTLVVYPAASMPEYTLRSGGRIVIVNNMPTHLDRQASMHFDELGPVFEELQSLIHPCQ

SEQ ID NO: 69047 - DNA, 4446 bp, Unknown
  Obtained from environmental sample
  misc_feature (1)..(4446): n is a, c, g, or t
atgggcggggaagacctcatcgtctattcccttgacgcgcagggcaagatcatcaataatttttccggaaataaatgcgccagcggcacgggcgaattcctcaaacagcagctcgcccgcatggacatgaccctggacgatatcgacagggttcccgagaccgcgaaagtgcacgccctttccacccgctgttcggtgttcatgaaaagcgattgtacccaccggctcaacaagcgcgaggcgaccaaggacgacatagtgctttcgctctccgacgtaatggccgtcaaggttatcgattttttgaaacgcgccaaagtgacaaagggcagggtagtgctgaccggcgggattacgctgaacaggcatatcatccgctttatccgcgagaaggcccctcagattgagtttatcattcccgagtccgcgccggtttttgaggcgctgggagccgcggtaatggccccgcaatcgggaagccctttgccccctgtcggcaaactcctcaagaccaacgagatacgtttcggcgcgctgggcgccctgcgcgactggaagggcaaggtgcagttatttgacaaaggcgaggggaaagtccgcgcggatcgccgctatattctgggcgttgacggcggctcgaccaccaccaaggcctgccttgtcgacatggaaaccgacgagattgtggctagccattacggcaggacccacggcgacccggtgaaagccctgaaagagtgcatgcggataattcaggaaaaggtgattgccgataccggggataaaaagcttgacatacggctggtttccaccaccggttccagccgcgagatactcggggtgttccttgaaacccccggcgtttacaacgagatcatcgcccattcggttggcactactttttttgacaaagaagttgaaacaatttttgaaatcggcggacaggacgcgaagtacgtgctattgaaaaacggcgtgcccatagactacgccatgaacgaagcctgctccgccgggacgggctctttccttgaggaatccgcggcgggggatctatccatacacagcgccaaggacataggcccggttgcgcttaacgctgacgcacctttgaaatttggcgagcattgttcggcttttatcaacagcgacatacgcaaggccgtacagcagggggcgagcagggagaatatcaccgcggggatcgtctgctccatcgtggctaactaccttaaccgcgtggtcggcaaccgcaccataggcgggaaaatatttttacagggcggtgtcgccaagaacccggctgtcccgctggccttcgctatgctccttgacaaaaaaatcctcgttcccccttcgcccgagctcatgggctgtttcggcgtggccttattggcaaagcggaaaaacgccgacggtcttttggccgaacaggccgtcgttatagacgatattattaaccgcgagatcggctacgagcgggtttttacctgccaggcctgcgagaacctctgccccattcaggtgttaaacgtcaacaaccacaagtatatgttcggcggccgctgcaacaagtacaccaatatgcgcaagcaggtcaaggacgttccggtgtttgattatgtggagaagcggcagaagatgttgttcgagacgttcgccgctccggttatagggagtggggaatggggagtagggagtaggggggactatgataaaaaccttcaaggatctgatagtttggcaggaagcgatgaatcttgtcgagataatttacttgaaaacgaaaacttttccgaaggaggaaatgtacggtctgaccagtcaaatcagacgggcagccgtgtcaattccggccaacatagcggagggcaacggacggaggagccggaaggaatacctgcggtttctgtcggtagcgaacggctcaataaaggaactggaaacacatattttgatagcggaacgactcaattttctgacgaaagaactatcggagcaaatacaagcgcaattgaggtcggtaggtcgtctgctgaccgccctgagaaaatctctcaaagagggaatgagaggggaataaaaaccccactccccactccccactccccactcccttataaacgtaaatttgtaatcggtattccgagagctttctctgtccacacactctacccactttattcgtggtttttccatgagcttggtattaaaactttcttatctaccgaagtggcgcatgaaggggtcgcgcgagcggaatctacttactgtttcccggcggagattgcacatggcgcggtgcaggattgtctggataagggggctgactatgtgtttctgccgcattttcgggatatgccgtcttatgaaagcgatattcacgcgaacttttgtcccataacgcaggggcttccctattatatcgaaaaggccttccccgatattgacaagaaccgctggctgcccttagttgtcagttttaaattcggcgaggccaaggcgctggagcatttctgcgatatgacgaggcgcctgggaattgacgaggccgagacaaaggccgcctttaccctcgctatgtccaaacagcaacagtattttgacgcaatacacgcgatgggcaaaacagctctggaagaggcgcggaaggccaaccggccggtcattgtcccgcttggacggccctacaacgcctttacacccgaagcgaacatgggcataccgcgcaaattcaccacgcggggttattcgatcatacccttcgatatcctgcccttccacgacgaggttatctttcccaatatgtactggtattacggtcagcaggatttgaaggcggcgaacctcctcaaaaaagaggataatatttatcttgcttttatttccaatttttcctgcgctccggattcgtttatcctgcattacatcaaatggatgatggtgcagaaacccttcctcgtgctggaactggattcccactcggccgacgcgggcgtggacacgagggtggaggccttcctcgacatcatagacggctaccgcgccaagaaaaacgagcttgaggctgaacgttttgacaacggctggcgttttgtttccgagaagaagtccgaggggaaattcgacctgcgtatcgacaacgtaaaaaccggggagagggttccgattgtgggaaacaagcgcgtgaagctgcttctttccaacatgggcgctatttccaccgagtacatgggcgcggcggtccgcagccagggcgtaaacgccgaagccctgccggtggccaccgcgaaaacgatacagatcgcccgcgcccacgcgtcggggaaggagtgcgtccccagccaccttgttctgggcagcgccctggaattctttttcagcgaaagataccgcaaggacgagctgtacctgctcttcgtccccataaccaccggcccctgccgcaccggccagtactatgtgtattacgaaaatttgttccgcgaccttcgccttgagaacgtggtggtattcatcctttccgccgataattcctacaccgagcttggcggggattttgccaaagaaatgtggaagggccttgtgctttccgattacctcaaggacatacagtgcgcgctcaaggcctgcgccgttgatccgaaaaaagcccaacaggaatatgaacattcgtggcgcagggttatgcacgcggttgagcataatcctaaatatttgtggaaggaactgaaaaaagtcgcaaatgacgttaagaagattcctttaaaacggaaagtcgtcgaatgtccccgcgtacttatcgtgggcgaaatctacgtgcgccgcgatgattttgccgtgggcgagcttacagatcttatgagcgagaggggcatagtcgtaaaggtcgcgggcgtttccgaatggatacactacctggattttgtgcgggaatacgccctaaagaaattgttcaaactgagaaaacccggcaaacggcttttttccaaaccatggaaagatctgaaaaaactcgaaatagaggaatggtggaagcactcggttgaaaaaaaggtgctttccattctgctgcccacgggccttatcccggaaacgccccacgacatgcgcgagatcatgaagtacacccaggagcattttgtcaacctggagcttaattcggagatcgccgtctcatccggctccgcggcggcggcgatggacgcgggctattccggcatagtgaacatcagccccttcgcctgccttatcggacgggtcatcgagggcctgtttaccccctgggcgcgtgagcgcaattacccgatcctttcggtggaggtagacggaaacctcctgccgccgaatattgtcaataaacttaacatctttatggtgaatgttttaaggtttaagggcggcagcgatctgtcatcgctggtagatgcgccaaagaacaattaa

SEQ ID NO: 69048 - protein, 1481 aa, Unknown
  Obtained from environmental sample
  DOMAIN (207)...(466): BadF/BadG/BcrA/BcrD ATPase family
  misc_feature (1)..(1481): Xaa is any amino acid
MGGEDLIVYSLDAQGKIINNFSGNKCASGTGEFLKQQLARMDMTLDDIDRVPETAKVHALSTRCSVFMKSDCTHRLNKREATKDDIVLSLSDVMAVKVIDFLKRAKVTKGRVVLTGGITLNRHIIRFIREKAPQIEFIIPESAPVFEALGAAVMAPQSGSPLPPVGKLLKTNEIRFGALGALRDWKGKVQLFDKGEGKVRADRRYILGVDGGSTTTKACLVDMETDEIVASHYGRTHGDPVKALKECMRIIQEKVIADTGDKKLDIRLVSTTGSSREILGVFLETPGVYNEIIAHSVGTTFFDKEVETIFEIGGQDAKYVLLKNGVPIDYAMNEACSAGTGSFLEESAAGDLSIHSAKDIGPVALNADAPLKFGEHCSAFINSDIRKAVQQGASRENITAGIVCSIVANYLNRVVGNRTIGGKIFLQGGVAKNPAVPLAFAMLLDKKILVPPSPELMGCFGVALLAKRKNADGLLAEQAVVIDDIINREIGYERVFTCQACENLCPIQVLNVNNHKYMFGGRCNKYTNMRKQVKDVPVFDYVEKRQKMLFETFAAPVIGSGEWGVGSRGDYDKNLQGSDSLAGSDESCRDNLLENENFSEGGNVRSDQSNQTGSRVNSGQHSGGQRTEEPEGIPAVSVGSERLNKGTGNTYFDSGTTQFSDERTIGANTSAIEVGRSSADRPEKISQRGNERGIKTPLPTPHSPLPYKRKFVIGIPRAFSVHTLYPLYSWFFHELGIKTFLSTEVAHEGVARAESTYCFPAEIAHGAVQDCLDKGADYVFLPHFRDMPSYESDIHANFCPITQGLPYYIEKAFPDIDKNRWLPLVVSFKFGEAKALEHFCDMTRRLGIDEAETKAAFTLAMSKQQQYFDAIHAMGKTALEEARKANRPVIVPLGRPYNAFTPEANMGIPRKFTTRGYSIIPFDILPFHDEVIFPNMYWYYGQQDLKAANLLKKEDNIYLAFISNFSCAPDSFILHYIKWMMVQKPFLVLELDSHSADAGVDTRVEAFLDIIDGYRAKKNELEAERFDNGWRFVSEKKSEGKFDLRIDNVKTGERVPIVGNKRVKLLLSNMGAISTEYMGAAVRSQGVNAEALPVATAKTIQIARAHASGKECVPSHLVLGSALEFFFSERYRKDELYLLFVPITTGPCRTGQYYVYYENLFRDLRLENVVVFILSADNSYTELGGDFAKEMWKGLVLSDYLKDIQCALKACAVDPKKAQQEYEHSWRRVMHAVEHNPKYLWKELKKVANDVKKIPLKRKVVECPRVLIVGEIYVRRDDFAVGELTDLMSERGIVVKVAGVSEWIHYLDFVREYALKKLFKLRKPGKRLFSKPWKDLKKLEIEEWWKHSVEKKVLSILLPTGLIPETPHDMREIMKYTQEHFVNLELNSEIAVSSGSAAAAMDAGYSGIVNISPFACLIGRVIEGLFTPWARERNYPILSVEVDGNLLPPNIVNKLNIFMVNVLRFKGGSDLSSLVDAPKNN

SEQ ID NO: 69049 - DNA, 372 bp, Unknown
  Obtained from environmental sample
  misc_feature (1)..(372): n is a, c, g, or t
atgataaaaaccttcaaggatctgatagtttggcaggaagcgatgaatcttgtcgagataatttacttgaaaacgaaaacttttccgaaggaggaaatgtacggtctgaccagtcaaatcagacgggcagccgtgtcaattccggccaacatagcggagggcaacggacggaggagccggaaggaatacctgcggtttctgtcggtagcgaacggctcaataaaggaactggaaacacatattttgatagcggaacgactcaattttctgacgaaagaactatcggagcaaatacaagcgcaattgaggtcggtaggtcgtctgctgaccgccctgagaaaatctctcaaagagggaatgagaggggaataa

SEQ ID NO: 69050 - protein, 123 aa, Unknown
  Obtained from environmental sample
  DOMAIN (3)...(112): S23 ribosomal protein
  misc_feature (1)..(123): Xaa is any amino acid
MIKTFKDLIVWQEAMNLVEIIYLKTKTFPKEEMYGLTSQIRRAAVSIPANIAEGNGRRSRKEYLRFLSVANGSIKELETHILIAERLNFLTKELSEQIQAQLRSVGRLLTALRKSLKEGMRGE

SEQ ID NO: 69051 - DNA, 705 bp, Unknown
  Obtained from environmental sample
  misc_feature (1)..(705): n is a, c, g, or t
atgagatggcatggcagaatggattgcaaagcatatcctagaacttggaccgccatgcgactcatctcccccaccgccttcaaaggcacgatgtccccagtggaagcggcgctgcgcttggcgcgggatggcgacattctgctgccactcagcgatggcggcgatggctttttggagtgcatccaccacaaacttggtggctccttagaacacctgccggcgcaaggcccctttgggcagacaaggccagtgcccattctgaaattgcccaatggcgacatcgccatagaatctgccaagataataggcatggccgggcttgagaggccagacccaatgagcgtttccagcagggggcttgcggagctattggcgcagctgcaaaacgcgccacgcctgcttatcggccttggcggcagctccaccgttgacggcggcatgggctggccgcccatcactctgccaccgacaaccgtgttctgcgacgtgaggaccgacctgtctgatgcagtgaggctatttgctccccaaaaaggagcgctgccagaacacctgccgatcctgcaaaaacgcctgatgtcgcttggcctcccccttggaccccacacgggctcggccgggggccttggcgcaaaactcaaacaattgggcggcgacttggttgacggcgccccggccatgattgagctgctgggcttccgatga

SEQ ID NO: 69052 - protein, 234 aa, Unknown
  Obtained from environmental sample
  DOMAIN (19)...(234): Glycerate kinase family
  misc_feature (1)..(234): Xaa is any amino acid
MRWHGRMDCKAYPRTWTAMRLISPTAFKGTMSPVEAALRLARDGDILLPLSDGGDGFLECIHHKLGGSLEHLPAQGPFGQTRPVPILKLPNGDIAIESAKIIGMAGLERPDPMSVSSRGLAELLAQLQNAPRLLIGLGGSSTVDGGMGWPPITLPPTTVFCDVRTDLSDAVRLFAPQKGALPEHLPILQKRLMSLGLPLGPHTGSAGGLGAKLKQLGGDLVDGAPAMIELLGFR

SEQ ID NO: 69053 - DNA, 1929 bp, Unknown
  Obtained from environmental sample
  misc_feature (1)..(1929): n is a, c, g, or t
atggacgggatggccagtcggttcattatcaataccggcgggagtaaacttgccgctccaagggtcgtgtctccgaaaaacgtcgtttttagcggcatggcgacgataaggtttgagtgggataatctcgacgtaaacgcgaactcgtacttggtgaatctcttgaaagtggtcaactccaaagatatcgatatggggggcaaggataatatcaaaatgggagtattggcctgggaggccatagtgccgcgcggcgaccgtcgcggcggggacaagttgagcgtgacgcttgacgcggcgagctcgttggacagcggctcgtataagtggcgcgtatacgcgcttgacaaccgcggcgcggcttccacggataccgtctcttcgtccgctttcgagtacaaaaaaagcggcgaagtcgatttaacggttaagacgttggagaggataggcggcgtagacgtgcccgtagcctacgtggggctgacgttggatgtggtgagcgggcttaaagtggcgccgatctttttctacacaaacggcaaaggcgtcgtcaagaggcgcttctcggccggtacataccgggtctctaccgccaaggtgggttatcccgcccatgcgtcgacaataacggtgggaggcgccgccgctaccctcgcgatacctatgtcgcgttccgaggctgtcctgcacggtcgggtgctggcggcggcggacaactcggccgtaagcgccgcgaaggtaacggccgtctccgaatggggcgataccgtttccacgacgaccgacggtagcggcggtttcgttctcgcctgccgtgcggccgactggacgatcaccgcggagaagtcgggttttcgggtctcttcttccggaaaggtaaccttgcggcagggcgaataccgaaatttcggcgacatctttttgtctaggagttcttttgccatgtcgggcgtcgtcaggaacttaaccggcgggccggtcgtcggggcgcgggtgcggttattgcgcgagggcgtccttatagatgaattgacgtctacgcctcagaacggttcgtacgctttctatctcaacgccggtacgtacacggtcacggcggaaaagcctggttttgcgatgttcagcaggagcgtggtcgtcgccggcaatgtggcgcaaaacatcaccctcaaggagggggcggtgctcgtaagcggtgtaattatcggcaggagttgggttgcgggtacaggtaactacgtcttcgccccgataacctcggctcgggccacattcgcggaggtcggcgccgccggatcggacacgttcatggttaccagcgacgctgttttcggcaaattttccgtgagtctgcccaaggataagaattacaatgtgactgcgtcggccgccggatttacctccggcgccgtccgtaagtttgccaccggcgacgtggggaacgatttgtccaaggcgttcgccgatacgctcgtcgccttggccgcgataaagggacgcgttacgggcgccgacggcgttcaggtcgatgtgattgtccttgatgcccaaaaccggattgtcgcgtctacaaaaagcgtaggtggctcatacgaggtgaggaacatccccaacggaagttttaccgttacagccggcgcgaccggatattttacgcggccccgccttgtcaccgtaaatatggggaaacccgaaaccgacggcgacaactacgattttccgatggagatcggtgacaagagcattcgctttaaagtcgatggctacacgagaggcggggcggtgaaagtggtctcgccgctcaatctgacgcttcctttagatggcgcggacggagccttgcttgacggcgtaggcgccggagagtacgttgtggaggctgttccggccgccgccgactcaagcctcttagagtttgtcgtatcgtaa

SEQ ID NO: 69054 - protein, 642 aa, Unknown
  Obtained from environmental sample
  misc_feature (1)..(642): Xaa is any amino acid
MDGMASRFIINTGGSKLAAPRVVSPKNVVFSGMATIRFEWDNLDVNANSYLVNLLKVVNSKDIDMGGKDNIKMGVLAWEAIVPRGDRRGGDKLSVTLDAASSLDSGSYKWRVYALDNRGAASTDTVSSSAFEYKKSGEVDLTVKTLERIGGVDVPVAYVGLTLDVVSGLKVAPIFFYTNGKGVVKRRFSAGTYRVSTAKVGYPAHASTITVGGAAATLAIPMSRSEAVLHGRVLAAADNSAVSAAKVTAVSEWGDTVSTTTDGSGGFVLACRAADWTITAEKSGFRVSSSGKVTLRQGEYRNFGDIFLSRSSFAMSGVVRNLTGGPVVGARVRLLREGVLIDELTSTPQNGSYAFYLNAGTYTVTAEKPGFAMFSRSVVVAGNVAQNITLKEGAVLVSGVIIGRSWVAGTGNYVFAPITSARATFAEVGAAGSDTFMVTSDAVFGKFSVSLPKDKNYNVTASAAGFTSGAVRKFATGDVGNDLSKAFADTLVALAAIKGRVTGADGVQVDVIVLDAQNRIVASTKSVGGSYEVRNIPNGSFTVTAGATGYFTRPRLVTVNMGKPETDGDNYDFPMEIGDKSIRFKVDGYTRGGAVKVVSPLNLTLPLDGADGALLDGVGAGEYVVEAVPAAADSSLLEFVVS

SEQ ID NO: 69055 - DNA, 435 bp, Unknown
  Obtained from environmental sample
  misc_feature (1)..(435): n is a, c, g, or t
atggctattgtaaatctttttaaaatactcagggataaagagaaagtcagcgttatttacattacccacgaccttgcgaccgcctattatatcagcgacaggatcgccattatgctccgaggttatgtggtggaaatgggaccggtggaagcggtattgggtaatcccctgcacccatatacaaaactgttaaaagaatccgttccggctcccgctccggaggataaggaaggttgggcaaagcgaattggcctttccactatcgaagtaaaagagtattcaagacaaggctgtaaattccacggaaggtgtcccaatgcgctggaacagtgcaaacacgacgatccgccggatatagaggcagagggcagaattgtaaaatgccatctttatacgaataaaaataagttaaattatgaacaggagaagaggtaa

SEQ ID NO: 69056 - protein, 144 aa, Unknown
  Obtained from environmental sample
  DOMAIN (44)...(111): Oligopeptide/dipeptide transporter, C-terminal region
  misc_feature (1)..(144): Xaa is any amino acid
MAIVNLFKILRDKEKVSVIYITHDLATAYYISDRIAIMLRGYVVEMGPVEAVLGNPLHPYTKLLKESVPAPAPEDKEGWAKRIGLSTIEVKEYSRQGCKFHGRCPNALEQCKHDDPPDIEAEGRIVKCHLYTNKNKLNYEQEKR

SEQ ID NO: 69057 - DNA, 468 bp, Unknown
  Obtained from environmental sample
  misc_feature (1)..(468): n is a, c, g, or t
atggacgtaaaacaagctattatagaaaacaaaacagcccttggaatcgaacttggctccaccaggataaaagcggtattaattgatgaaaacttcgcgcctgtcgcgcagggcagccatgattgggaaaacaagctggaagacggtatctggacatacaatcttagtgatgtatggacaggattgcagaattgttttaaagatttggctcttgatgtaaaaaaccgctacggcctcgctctttcatcagtcggcgccatcggcatttccgccatgatgcacggatacatggtgtttgacaaaaacggcaatcagcttgttccattccgaacatggcgcaatacaatgacagaaaaagccgcaacactgcttaccgaanaattcaagttcaatattcctcagcgttggagcatcgctcacctgtaccaggcaatttttaaacggagagccgcatgtaaaggatattga

SEQ ID NO: 69058 - protein, 155 aa, Unknown
  Obtained from environmental sample
  misc_feature (1)..(155): Xaa is any amino acid
MDVKQAIIENKTALGIELGSTRIKAVLIDENFAPVAQGSHDWENKLEDGIWTYNLSDVWTGLQNCFKDLALDVKNRYGLALSSVGAIGISAMMHGYMVFDKNGNQLVPFRTWRNTMTEKAATLLTEXFKFNIPQRWSIAHLYQAIFKRRAACKGY

SEQ ID NO: 69059 - DNA, 1089 bp, Unknown
  Obtained from environmental sample
  misc_feature (1)..(1089): n is a, c, g, or t
gtgcattggaaattaacaggtaaaaaagttcttggcgtcggcgacgcttcgggcatgtttccggtggacggtgacagttacaattcttttatgctgaagcagtttgacgatcttatcgcttcccgcaattacggctggaaaatcgcggatattctcccctccgttttgagcgccggcgaggacgccggaaccctcaccggggcgaaactgcttgacccttccggctgcctgtgggacggcatacccctctgcccgccggaaggagacgccggtacgggcatggttgcgactaacagcgtggcccagcgtaccggcaatgtttcggcgggcacttccattttcgccatgatcgttatggaaagggaactgtcaaaggtataccccgaaattgatatagttactactccggcgggaaagccggtggccatggttcactgcaataactgtacttcagatattgacgcgtggataaaattgttcagggaactgctggatataagcgggtcaaaaacggataaagcggcgttttacgacgcgctgtattacaaagccctggaagcggatgaggattgcggcgggcttctttcctataattacttttccggcgagcatattaccgaaattgaggaaggccgcccgctgttcgcgcgtctgccggacagccgtttcactctggcaaattttatgcggactcttcttttttccggcataggaacattaaagtacggcatagacatccttaccgagaaggagaaagtgcggatagacagcttgttgggccacggcggcttgttcaaaaccaaaggcgtggggcagcgttttttagccgccgcttttaacgcgccggtttcggtgatggaatccgccggagaaggcggcagttggggcattgcgcttcttgccgcgtttatgcgcgaaggggaagggactctggagaacttcctggctgaaaaagtcttcgccggtaagacgggagcgcaaattgagcctgatccaaaagatgtgaagagttttaataagtttatggaacattataccgcgggactcaagattgaacgggcggcggttgaaaattttagaaaggggtga

SEQ ID NO: 69060 - protein, 362 aa, Unknown
  Obtained from environmental sample
  DOMAIN (99)...(336): FGGY family of carbohydrate kinases, C-terminal domain
  misc_feature (1)..(362): Xaa is any amino acid
MHWKLTGKKVLGVGDASGMFPVDGDSYNSFMLKQFDDLIASRNYGWKIADILPSVLSAGEDAGTLTGAKLLDPSGCLWDGIPLCPPEGDAGTGMVATNSVAQRTGNVSAGTSIFAMIVMERELSKVYPEIDIVTTPAGKPVAMVHCNNCTSDIDAWIKLFRELLDISGSKTDKAAFYDALYYKALEADEDCGGLLSYNYFSGEHITEIEEGRPLFARLPDSRFTLANFMRTLLFSGIGTLKYGIDILTEKEKVRIDSLLGHGGLFKTKGVGQRFLAAAFNAPVSVMESAGEGGSWGIALLAAFMREGEGTLENFLAEKVFAGKTGAQIEPDPKDVKSFNKFMEHYTAGLKIERAAVENFRKG

SEQ ID NO: 69061 - DNA, 1497 bp, Unknown
  Obtained from environmental sample
  misc_feature (1)..(1497): n is a, c, g, or t
gtgattatggatctcaagaaatacgaatactggtttatcgtcggaagccaggacctttacggggatgaaacgcttaaacaagtcgctgatcatgccaaaattatggcggaagattttaacaaagatcccctgctttccggcgcggtggtattaaaacctacggcaataacgccgcgggcgatacgcggcctttttgaggaagcgaacgcctcaaacaactgcgcgggcttaattacatggatgcacacattttcgccttcaaaaatgtggatacaggggctggcgcttaaccgcaaaccgcttctgcacctccacacccagttcaaccgcgatatcccctggtcttcaatagacatggattttatgaatctgaaccagtcggcacacggcgaccgtgaacacgggtatattcatacgcgaatgcggctgccccgcaaagtagttgccgggttttggcaggataaggaactgcgccgccggatggacgtttggatgcgcgccgccgccgcgagaaaagacggcatggattcgaccgttatgcgtctgggagacaatatgcgggaagtggcggtaaccgaaggcgacaaggtcgaggctcaaatcaggatgggctggcaggtgaatacctggggcattggcgaccttgccgtccgttacgcgaaaatcaacgaggagcgggctaaaaaactggcggaggaatacgccgcgcgttatgagcttgcgccggaacttaaacaggacggcaaggcaagaaccgcgatgcttgaacaggcaaaaattgagatcgcccttaaagaaatgcttgaagcggaacacgccggagcttttaccacaaccttccaggacctccacggcctgccccaactgccgggccttgcctgccagcggcttatggaacagggttacggcttcggcgcggaaggggactggaaacagtccatgctgacccgcgccgcaaaagtcatggcttcggggctgcccggcggcgtttcctttatggaagattacacttaccattttgagcccggtaaagaagcggctttgggcgcccacatgcttgaagtatgcccttccatcgcggacggcaaagcgcgtatcgaagttcacccgctgggaataggcggcaaggcggatccggcccgtatggtgtttgatgccgcccccggccccgcggtgctggcgacgcttattgatcttggcagccgtttcagaatgattgttaatgaaattgaaactatcaagatcgataacgcaatgccgaaactgccggtcgcccgcgccctctggaagccgtatcccagcctgagcggcgccgccgaagcctggataatatcaggcggcacgcaccattccgtatacagcgccgcgcttaccgcggagtatttccgtgattgggcggaaatgagcggcattgagtttgtgcttatcgaccgcgatacaaaaccggcgcgtttgcaggacgaactgcgccgcaatgacacatggtggtcccgttaa

SEQ ID NO: 69062 - protein, 498 aa, Unknown
  Obtained from environmental sample
  DOMAIN (2)...(498): L-arabinose isomerase
  misc_feature (1)..(498): Xaa is any amino acid
MIMDLKKYEYWFIVGSQDLYGDETLKQVADHAKIMAEDFNKDPLLSGAVVLKPTAITPRAIRGLFEEANASNNCAGLITWMHTFSPSKMWIQGLALNRKPLLHLHTQFNRDIPWSSIDMDFMNLNQSAHGDREHGYIHTRMRLPRKVVAGFWQDKELRRRMDVWMRAAAARKDGMDSTVMRLGDNMREVAVTEGDKVEAQIRMGWQVNTWGIGDLAVRYAKINEERAKKLAEEYAARYELAPELKQDGKARTAMLEQAKIEIALKEMLEAEHAGAFTTTFQDLHGLPQLPGLACQRLMEQGYGFGAEGDWKQSMLTRAAKVMASGLPGGVSFMEDYTYHFEPGKEAALGAHMLEVCPSIADGKARIEVHPLGIGGKADPARMVFDAAPGPAVLATLIDLGSRFRMIVNEIETIKIDNAMPKLPVARALWKPYPSLSGAAEAWIISGGTHHSVYSAALTAEYFRDWAEMSGIEFVLIDRDTKPARLQDELRRNDTWWSR

SEQ ID NO: 69063 - DNA, 726 bp, Unknown
  Obtained from environmental sample
  misc_feature (1)..(726): n is a, c, g, or t
atggtggtcccgttaactatggacgtatacaaaacactgcgggaagaagcattcgaggcgaatcttgaaataaagcggagaaatctcgccatttacacatggggcaacgcttccgcatttgatcccgacaagggggtgtttgccataaaaccttccggtgtggaatatgatgaattaacgccgaaaaatatggtgttagttgatcttgagggaaaggttatcgacggcaaactcaagccatcctccgacactaaaactcaccttgtactgtaccggaaatttatgggaatctacggcgtaacgcatacgcactcgccttacgcggtcgcctgggcgcaggccggaaaaccggttcctgttttcggaaccactcacgccgatcactgcgcttatgaaatcccgtgtactgcctttatgaatccggaggaagtaaaaaataattacgaactggaaacaggcaatttaattgttaatacttttaaaaatagtagtttggattattcgcagattacaatgacgctggtagccgggcatggcccttttacctggggaaacagcgccgcacaatcggtctgtcatagcgttattctggaagaaatatgtaaaatggcgttattcactgtaatgattgagccgggagcaaaaccgctgcccgatcatatcatcagaaaacactgggaacgcaaacacggccctgacgcgtattacggtcagaagcagctgtga

SEQ ID NO: 69064 - protein, 241 aa, Unknown
  Obtained from environmental sample
  DOMAIN (15)...(225): Class II Aldolase and Adducin N-terminal domain
  misc_feature (1)..(241): Xaa is any amino acid
MVVPLTMDVYKTLREEAFEANLEIKRRNLAIYTWGNASAFDPDKGVFAIKPSGVEYDELTPKNMVLVDLEGKVIDGKLKPSSDTKTHLVLYRKFMGIYGVTHTHSPYAVAWAQAGKPVPVFGTTHADHCAYEIPCTAFMNPEEVKNNYELETGNLIVNTFKNSSLDYSQITMTLVAGHGPFTWGNSAAQSVCHSVILEEICKMALFTVMIEPGAKPLPDHIIRKHWERKHGPDAYYGQKQL

SEQ ID NO: 69065 - DNA, 486 bp, Unknown
  Obtained from environmental sample
  misc_feature (1)..(486): n is a, c, g, or t
ttgcttttaccggctggtttaagattcacggcgcggtacgcccctttacggaggcccttgcttttttcaggatacggccaccttaacctggcgcatctgtttatcgcggggatttttatcgctgcatccggcgcgatgatggatttagcgatggacgttgccgccgccatggacgaaatcaaaaaacagcagcccgccctgactagtgtggctcttatgcgttccggcttcactgtggcgcggcaagccgccggaaccatgtccacaactttactgcttgcctattccgccgaatataccgccatgatcatgaccttcatcgcccagggcgttcccctggaaaacgtcattaacatggtctgggtttcatcagaggtggtacataccttagtcggctgtttcggcctgctcctcgtcgcgcccttgactgtatgcgcgggcggaatgttgctcagtaatatgaaagttcacgagatgccgcaatga

SEQ ID NO: 69066 - protein, 161 aa, Unknown
  Obtained from environmental sample
  DOMAIN (6)...(150): YibE/F-like protein
  misc_feature (1)..(161): Xaa is any amino acid
MLLPAGLRFTARYAPLRRPLLFSGYGHLNLAHLFIAGIFIAASGAMMDLAMDVAAAMDEIKKQQPALTSVALMRSGFTVARQAAGTMSTTLLLAYSAEYTAMIMTFIAQGVPLENVINMVWVSSEVVHTLVGCFGLLLVAPLTVCAGGMLLSNMKVHEMPQ

SEQ ID NO: 69067 - DNA, 1056 bp, Unknown
  Obtained from environmental sample
  misc_feature (1)..(1056): n is a, c, g, or t
atgaaaacaattacggttaacgcttctaaaacttatgatataaaaataggttccggtattctggacgacgccggcagtattctgccaaaaatcggcagtaccgccgtaatcgtaaccgatgatattgtcgccccgttgtacgcacagcggttggagcaagcactatctcataataaaacccgtgttgcacgctatgtcatccccaacggagaggcttccaaaagcgcggaacaactgatgtcccttgttaattttttggcaaaggaaaaactttcgcgcacagacaccgtaatcgctctgggcggcggcgttgtcggcgatttggcgggattcgcggcggcggtctacatgcgcgggatcggctttgtacagatacccactacccttctagccgcggtagattcctcggtcggcggaaagaccgcgattaatcttgaggcgggaaaaaatttagccggcgctttttaccagccggacgccgtgttatgcgatatctcattgctttccacgcttacgcctgaagttttcagggacggctgcgcggaagttattaaatacgcagttttagcggacagcgaattgtttaaatcttttgaaaaacccataaaagaccggcttgaagatgttatcgcccgctgtgtcgagataaaacgcgatattgtcgcggaagacgagtttgaaaaaagcgtaagaaagtttttaaactttggacacacaatagggcacgccatcgaacttttaagcggatacgaaattacccacggaagcgccgtcgccgccggaatggcgatagttactcgcgcagccgcccaaatgaaaatctgcgataattcatgctggcaggatttattaaaaaccttaaaactttataagcttcctgttaacaccgcatacgacgcggcaagtctcgctcaagcctgcctttccgacaaaaaaagagacggcggcaaggtaacaatgatcttccctgaaaaaataggaaaatgtgtcatgaaagagattaaggtagacgaattggagaacgtgatcaggcttggtctggaggagcaaacttga

SEQ ID NO: 69068 - protein, 351 aa, Unknown
  Obtained from environmental sample
  DOMAIN (16)...(314): 3-dehydroquinate synthase
  misc_feature (1)..(351): Xaa is any amino acid
MKTITVNASKTYDIKIGSGILDDAGSILPKIGSTAVIVTDDIVAPLYAQRLEQALSHNKTRVARYVIPNGEASKSAEQLMSLVNFLAKEKLSRTDTVIALGGGVVGDLAGFAAAVYMRGIGFVQIPTTLLAAVDSSVGGKTAINLEAGKNLAGAFYQPDAVLCDISLLSTLTPEVFRDGCAEVIKYAVLADSELFKSFEKPIKDRLEDVIARCVEIKRDIVAEDEFEKSVRKFLNFGHTIGHAIELLSGYEITHGSAVAAGMAIVTRAAAQMKICDNSCWQDLLKTLKLYKLPVNTAYDAASLAQACLSDKKRDGGKVTMIFPEKIGKCVMKEIKVDELENVIRLGLEEQT

SEQ ID NO: 69069 - DNA, 1110 bp, Unknown
  Obtained from environmental sample
  misc_feature (1)..(1110): n is a, c, g, or t
ttgaacatcaggattgttaagccggttcaaggcggcactataggggcgattgcctcaaaatccgccgcgcaccgcttgttaatttgcgcttctcttgcggataacgaaacatttgtccgctgtcaggaacgctctcaggatattgacgcaacggcgcattgccttgaatcattaggcgctgttatatgctatgaaaacggcggcttttttgtaactccggttaataaaacaaaagacttaacaaaagaacgctctttgaactgcggcgaaagcggatcaactctccgcttcttactccccgtctgcggcgctctgggaatgaatgtaaaatttaacatggaaggccgtcttcccgcccgccctcttaccggcttgtatgaggaaatgacatctaacggctgtaaactctcaaaacagggatattcccctcttgtccttggcggcaaattaaaaagcggcaattattatcttcctggaaatatttcctctcagtttacaagcggattgctgttcgctcttccattactcgaaggttacagcacaatcggcgtaacaggcaaattagaatcgcgcccatatgttgatatgacgctggacgctttgcgtcttttcagaataaatgttcatgaagaagaaaaaccgcgcttagcattttgcataacgggaaaccaagctttccgctcgcctaaaactgtccaaaccgaaggagactggtccaacgcggctttttggctctgtgcgggcgcaatcggcacaagcggtataacctgtaccggactttacaaagattcacggcaaggcgaccgcgccattgcagaaatattaaaaaaattcggagcgcgcgtttccatagacggcggcgcggtaacggtatttcccaacgatctgaaaggaattgaaattgacgcggaaaatatccccgaccttgtacccgtcatggccgccgtagcgtcaacggcgcgcggggaaaccgtaatcagaggcgcgggaagactaaggttaaaagagagcgacaggcttcgcacaatagccgcatctctttccgccttgggcgcggatgtaaaggaaactgacgacggactatcatctcggccaatctgtcttgcctga

SEQ ID NO: 69070 - protein, 369 aa, Unknown
  Obtained from environmental sample
  DOMAIN (3)...(369): EPSP synthase (3-phosphoshikimate 1-carboxyvinyltransferase)
  misc_feature (1)..(369): Xaa is any amino acid
MNIRIVKPVQGGTIGAIASKSAAHRLLICASLADNETFVRCQERSQDIDATAHCLESLGAVICYENGGFFVTPVNKTKDLTKERSLNCGESGSTLRFLLPVCGALGMNVKFNMEGRLPARPLTGLYEEMTSNGCKLSKQGYSPLVLGGKLKSGNYYLPGNISSQFTSGLLFALPLLEGYSTIGVTGKLESRPYVDMTLDALRLFRINVHEEEKPRLAFCITGNQAFRSPKTVQTEGDWSNAAFWLCAGAIGTSGITCTGLYKDSRQGDRAIAEILKKFGARVSIDGGAVTVFPNDLKGIEIDAENIPDLVPVMAAVASTARGETVIRGAGRLRLKESDRLRTIAASLSALGADVKETDDGLSSRPICLA

SEQ ID NO: 69071 - DNA, 1350 bp, Unknown
  Obtained from environmental sample
  misc_feature (1)..(1350): n is a, c, g, or t
atgccggaaaggacaaagttctccgcttattgtatgtacagtttaatcatcagcgcttttgtatatccggtctccggtcactggatatggggcggcggctggcttgcacagcttgatttccatgactttgccggttctacagccgtacacatgttcggcggtgtagcggcgctggttggcgcaaaaatagtcggtccccgtatcggcaaatattcccaatcgggcgaatcacgcgctattcccggtcacagcttaacgctcggcgcgcttggcgttttcattctctggttctgctggttcggctttaacggcggttccactgtttgtatgacaggcgatgaaaatgttgtttcagccagcaaaattttcgttacaacaaacctggcagctgctacagcggcggtcttcacaatgatcattacatggatacgttacaagaaacctgacgtgtcaatgacactgaacggcgctcttgccggtcttgtagcgattaccgcgggatgcgacgctgtatcaccgttcggcgctttctgtatcggtattattgcggcgattgttatcgtattcggtattgagtttgtcgacaaagtattaaaggttgacgatcctgtcggcgctatcggcgtacacggtattgccggcgcgttgggaacaattcttaccggtatattcgctcttgacggcggactggcgtacggcggcggatggacgatggttggagttcaagctctcggcgttgttgcagtagctgcatgggtagcggtaacaatgggtattgtctttacggtaatcaagaaagtaatgggtcttcgcgtttcacataccgaagaacttgcaggcttggatattaccgagcacaatattgcaagcagctatgccgactttatgataactcctgcgggcgctgactttaagccttattccgcagacgatgaagaagagacggttccggtcaatacggcaattccagttgtaaacaactcaaagccgggcgcgaagatgacgaagattacaatcatcacaaaccagaacaagcttacggctcttcacaacgcgctcgacagaatcggtattacagggcttacggttaccaacgtgcttggtcacggaatgcaaaaggggcataccgagtattaccgcggcgctcctgtaaccatgaaactgcttcccaaggttcaggttgatatcatcgtatgtaagattcctccgcaaaccgtaatagacaccgtaaagaaagtgttgtatacgggaaaagtcggagacggcaagatatttatttatgatgtcgaaaacgtcgttaaggtacgcacaggcgaacaaggatacgacgcgttacaggacaatgaataa

SEQ ID NO: 69072 - protein, 449 aa, Unknown
  Obtained from environmental sample
  DOMAIN (337)...(438): Nitrogen regulatory protein P-II
  misc_feature (1)..(449): Xaa is any amino acid
MPERTKFSAYCMYSLIISAFVYPVSGHWIWGGGWLAQLDFHDFAGSTAVHMFGGVAALVGAKIVGPRIGKYSQSGESRAIPGHSLTLGALGVFILWFCWFGFNGGSTVCMTGDENVVSASKIFVTTNLAAATAAVFTMIITWIRYKKPDVSMTLNGALAGLVAITAGCDAVSPFGAFCIGIIAAIVIVFGIEFVDKVLKVDDPVGAIGVHGIAGALGTILTGIFALDGGLAYGGGWTMVGVQALGVVAVAAWVAVTMGIVFTVIKKVMGLRVSHTEELAGLDITEHNIASSYADFMITPAGADFKPYSADDEEETVPVNTAIPVVNNSKPGAKMTKITIITNQNKLTALHNALDRIGITGLTVTNVLGHGMQKGHTEYYRGAPVTMKLLPKVQVDIIVCKIPPQTVIDTVKKVLYTGKVGDGKIFIYDVENVVKVRTGEQGYDALQDNE

SEQ ID NO: 69073 - DNA, 600 bp, Unknown
  Obtained from environmental sample
  misc_feature (1)..(600): n is a, c, g, or t
gtgatatacggctatattagagtcagtacagacaaacaaacggttgataatcaacggtttgagatcgaacggttttgtatgaaaaacagtttgaaaatcgacgaatggattgaagaaactatcagtggttgtaaaacgcctgataagcgtcttttaggatcgcttctgcaggaggtaaagtcgggcgatttgattatttgttcggaattatcaaggcttggaagaagtctttttatgattatgtcgatacttaaccagttaatgttgaacgaggtaagagtatggacaataaaagacaattacaggttaggtgacaatattcagtcaaaagttttagcgtttgcatttagtttaacagcggagatagagcgcgatttaatttcccagagaacaaaagaagcgcttgcgcgcatgcgcgccgagggtaaaatccttggcagaccttttggcagcctgtcaaacatggtaaaactttcagggcgcgagaaggatattaaaatgcttcttgacaggcattttacaaaatccgcgataggcaggatatacggcgttaatagaaccacagtggagtcatttttaaaaacaagaatgacgatgtag

SEQ ID NO: 69074 - protein, 199 aa, Unknown
  Obtained from environmental sample
  DOMAIN (2)...(144): Resolvase, N terminal domain
  misc_feature (1)..(199): Xaa is any amino acid
MIYGYIRVSTDKQTVDNQRFEIERFCMKNSLKIDEWIEETISGCKTPDKRLLGSLLQEVKSGDLIICSELSRLGRSLFMIMSILNQLMLNEVRVWTIKDNYRLGDNIQSKVLAFAFSLTAEIERDLISQRTKEALARMRAEGKILGRPFGSLSNMVKLSGREKDIKMLLDRHFTKSAIGRIYGVNRTTVESFLKTRMTM

SEQ ID NO: 69075 - DNA, 2190 bp, Unknown
  Obtained from environmental sample
  misc_feature (1)..(2190): n is a, c, g, or t
atggaattacttgcacccgctggatcgcctgaggcgcttgacgccgcaataggcgaaggcgcagacgctgtttatcttggcttaaaagattttaacgcccgcttaagaagtgccaattttacttacgcgcagtttgaaagcgctctgcgttctctgcataaaatgggaaaaaaagtttacgttacggtaaataccgtttttgaacaacgcgaagccgatagaatgtaccaatttttgaaatatctttcaggacagggaccggacgcgctgattgttcaggattacggcgttatcgcgatggcgagagcggaatttccgtccttgcggcttcacgcttccacccaaatgaatatcgcgtcggcaagaggagcgaacgcgctttcgcgtcacggcgtttcgcgcgtggttttagcgcgggaactatctcttgaagagctgaaaagcgttaaaagcgaaactaatttggaacttgaggtttttgtccatggagcgttatgcataagcgtttcgggtctttgtcttttttcaagttttctcggagggaaatcagctaacaggggaatgtgtactcaagcgtgcagaagattgtaccatagagccgacggcgagagcggctactatttcagccctaacgatttacaattattggagaacgtaccgcagttagccgccgccggaatcagcgcgttaaaaattgaagggcgcatgaaaagcgcggcttatgtgggaactgtagtttccgcctaccggcttgtaatggacgcctacgctgatagcgtaagcgccaacggagacgcggacgatattcagcgaagtattgaacgcgggcgggagattttgcgtaatgattttgcgcgtcctaaaactcagtattttttcggcggattgacaaaagccgccgcgcaaaacagcgaaggcattgattggctgaaccctgcgcaggacggcggcacgggcataagtcttggaacaattttaagagtgaaaggcacggacgatgaaagacgcgcccttgtccgtccgccaataggactttccatttccgttagggattcggtgcggatacaccacagcgacgactcaggcagagtttcccataaattgacttacgcgcaggaagacagcggacattccggttactggatttccgcgccggaaggaagccttggcgaccatgtatatttgatacaaattaaagaaatgcgaaagcgttatgcgccaataattactaaagtgtccgcaagcaagggaccgggcagggaaaaagccccctttccgcagatacaagtgcgcaaaagggaagaacgcggcaaacattcaaaaaataccgaaatttttcccgaaggactgtacatcgccatctcccgcccggaagatttttttattttgcagtcttcccgcccgcagcgggtaatgctcgccctttcccgaaaaaacgcaagatatttgttagacgacactaaaccgcccctgccgtttaaacccgctgaaattattttaacgcttgatccgtggtttccccaggaaattgccgaatacgaaaacggaaaaatggcgcaggaaatcgagcggttaaccgaaaagggctataatcaatatgtgttgaataatcccggacatttttcactgttcagagagcatgaaaatataaaattgatagcgggaccgtggctttacacgtttaattcatgggcgctttcttttgtttcgtctctgggagtagacgcctttgtttcgccgctggaaaacaacaggcagaatttggaacgaacattgggcatggaaagcagaaaaaaagaagacaaaggcgacagaaaacggcaaaacaagagcgcgttaaactctaaattttttattacggttttttcgtggacgcctttattcaatataagggcgaatcttagctctgtccttgactttgattcatttgcagacaacatggacgaggaatttttacttgaaacaagtcccgaaggctcgcgcgtttacccgaaaaaatatttttctattaccgataaaattccgtttttaaaagaggcgggattcggacgtttcatcattgatttatcggggcaggtattaaaaaaatcaaactaccgcgatttgatgcgctctgttaataataacgctcccctgccgcaatcaagccgttttaactggaaagacgggttttacgcgagtaaggtttaa

SEQ ID NO: 69076 - protein, 729 aa, Unknown
  Obtained from environmental sample
  DOMAIN (72)...(299): Peptidase family U32
  misc_feature (1)..(729): Xaa is any amino acid
MELLAPAGSPEALDAAIGEGADAVYLGLKDFNARLRSANFTYAQFESALRSLHKMGKKVYVTVNTVFEQREADRMYQFLKYLSGQGPDALIVQDYGVIAMARAEFPSLRLHASTQMNIASARGANALSRHGVSRVVLARELSLEELKSVKSETNLELEVFVHGALCISVSGLCLFSSFLGGKSANRGMCTQACRRLYHRADGESGYYFSPNDLQLLENVPQLAAAGISALKIEGRMKSAAYVGTVVSAYRLVMDAYADSVSANGDADDIQRSIERGREILRNDFARPKTQYFFGGLTKAAAQNSEGIDWLNPAQDGGTGISLGTILRVKGTDDERRALVRPPIGLSISVRDSVRIHHSDDSGRVSHKLTYAQEDSGHSGYWISAPEGSLGDHVYLIQIKEMRKRYAPIITKVSASKGPGREKAPFPQIQVRKREERGKHSKNTEIFPEGLYIAISRPEDFFILQSSRPQRVMLALSRKNARYLLDDTKPPLPFKPAEIILTLDPWFPQEIAEYENGKMAQEIERLTEKGYNQYVLNNPGHFSLFREHENIKLIAGPWLYTFNSWALSFVSSLGVDAFVSPLENNRQNLERTLGMESRKKEDKGDRKRQNKSALNSKFFITVFSWTPLFNIRANLSSVLDFDSFADNMDEEFLLETSPEGSRVYPKKYFSITDKIPFLKEAGFGRFIIDLSGQVLKKSNYRDLMRSVNNNAPLPQSSRFNWKDGFYASKV

SEQ ID NO: 69077 - DNA, 1335 bp, Unknown
  Obtained from environmental sample
  misc_feature (1)..(1335): n is a, c, g, or t
ttgaataaattaaaccgtttattatttttattttctctttttttaatactggcgttgtcttcctgttcaaagctgggttacggcgttttactgtggtctattgacgaaccgccggttgattcaggcactgttctgcccgtttatatcaaatcaaatatcgaaaaaaaatgggtagtaggaatacctgaaaaagccggaacatacaaggggaacaaaaaagaaattccgcttacccagcttgaatttatcggcagtaaacgaaaaaccgaaaaatgggcagaaggttttgcgccgtacgcgacgctctacgctgaaaatttacaggacgggcttccgatacgctcctccaccgacaataattccaagcgcgtataccgtctgcgtcttggagaaattgtcaaagttctgggcgtagcaaaaggcgttccccctataagcacaactggcgatcccttacccggcgaatggtacaaagtgctgacaaatgacggcgctataggctattgcttttctttcagattaaaattatttaatcaaaatgaaggttccgttcaatataccgcctctactcaaaaagataatcctgatcccgaccttgatatgattttgtcaaaaatatggtcttccgagatttattcgcaaatgattaattcaggacggataaatattcaggagatggaaaaaaattatcgttttgatccgggacaggataccggcaccgcgagaattattttgccgaatttggaaagacaatttacatatcaaagaataatttccgaaggcgagcgcacttggaattttgaaggaacaaatctaataatggaattaaaaacaaataataacttgtctatacaatttacggaaagctccggtttaaggcgcactcttttgtttaccgctcttcccactaaggtagacgatcttatcattcaggaaaacgcgcgccgcgatactcagttcatgacaatttataatcagggtcctgtattttcgagcaacaattacggaactattacatttttacagacgagagattttacatggtcaggatatgatctccttgttccgcagattattccgcaggaaactaaaggcggcggacgaatcaacatggatctttatatttcgccgtcttacgaagaaagatacaacggcgcttttactcttacttttaccgataccagacaaaataacactatttatttcttatacgcgcttgacaaccaagggctgcgccttgaagtcgttcccgattacggtatagaaaacattaccgttatgcgaagagcgtcatcccctgtagttttatactttttcacggactcacctccttaa

SEQ ID NO: 69078 - protein, 444 aa, Unknown
  Obtained from environmental sample
  SIGNAL (1)...(26)
  misc_feature (1)..(444): Xaa is any amino acid
MNKLNRLLFLFSLFLILALSSCSKLGYGVLLWSIDEPPVDSGTVLPVYIKSNIEKKWVVGIPEKAGTYKGNKKEIPLTQLEFIGSKRKTEKWAEGFAPYATLYAENLQDGLPIRSSTDNNSKRVYRLRLGEIVKVLGVAKGVPPISTTGDPLPGEWYKVLTNDGAIGYCFSFRLKLFNQNEGSVQYTASTQKDNPDPDLDMILSKIWSSEIYSQMINSGRINIQEMEKNYRFDPGQDTGTARIILPNLERQFTYQRIISEGERTWNFEGTNLIMELKTNNNLSIQFTESSGLRRTLLFTALPTKVDDLIIQENARRDTQFMTIYNQGPVFSSNNYGTITFLQTRDFTWSGYDLLVPQIIPQETKGGGRINMDLYISPSYEERYNGAFTLTFTDTRQNNTIYFLYALDNQGLRLEVVPDYGIENITVMRRASSPVVLYFFTDSPP

SEQ ID NO: 69079 - DNA, 903 bp, Unknown
  Obtained from environmental sample
  misc_feature (1)..(903): n is a, c, g, or t
atgtctgtaagagaaacactcaatgccatcgcggcgaaacggatacttgtgcttgacggcgcgatgggttcaatgatacaaaacctcaaactcggcgaggaggattttcgtggcgaactctttgccggccataaaacgccgcttgcgggctgtaatgacctgctctgcctgaccagaccgcaggcgatcagcgacatccacaggctctatctggaagccggggcggacataatcgaaacatgcagttttaactcaacatccgtatcccttgaggattacggtattggcgatctggcctatgagatcagcgtggcggcggcgcgtattgcgcgggaagtggcggacgctttttccaccggggacaagccgcgttttgtggcggggagcatgggccccaccggaaaaagcgccggcctctcgccagatgttaacgatcccgcaaagcggaacatttactgggacgagcttgaggcggcttactatgacaacgcgcgggggcttgttgacggcggcgcggacatattattattggaaaccatttttgactcgcttaatgccaaagccgccctgcttgccataaaaagacttctgaatgaacgtaatatagatgtccccattattatttcagcgacgatcacgggcgaatcggggcggctcctttcgggccagtccctggaggctttttgcgcttcgatacttcacgcggagccctgggcaatgggccttaactgttcctttggagctgaaaaactactgccccacatacgccgcctttccgcggctgcgccctgttttatcagctcccacccgaacgcgggacttccaacaaactcggcgcttacgatgaaagccccgaatcaatggcctcctgtgtcgaaaaatatttacaggaaggcttgttaa

SEQ ID NO: 69080 - protein, 300 aa, Unknown
  Obtained from environmental sample
  DOMAIN (15)...(298): Homocysteine S-methyltransferase
  misc_feature (1)..(300): Xaa is any amino acid
MSVRETLNAIAAKRILVLDGAMGSMIQNLKLGEEDFRGELFAGHKTPLAGCNDLLCLTRPQAISDIHRLYLEAGADIIETCSFNSTSVSLEDYGIGDLAYEISVAAARIAREVADAFSTGDKPRFVAGSMGPTGKSAGLSPDVNDPAKRNIYWDELEAAYYDNARGLVDGGADILLLETIFDSLNAKAALLAIKRLLNERNIDVPIIISATITGESGRLLSGQSLEAFCASILHAEPWAMGLNCSFGAEKLLPHIRRLSAAAPCFISSHPNAGLPTNSALTMKAPNQWPPVSKNIYRKAC

SEQ ID NO: 69081 - DNA, 762 bp, Unknown
  Obtained from environmental sample
  misc_feature (1)..(762): n is a, c, g, or t
atggcctcctgtgtcgaaaaatatttacaggaaggcttgttaaacgtaatcggcggctgctgcggcaccacccccgcgcacatcgccgccatagccgcaaaagccgccctgcacaaaccccgcccattaccgcaaagcccatcaccacggcctcttcttctatcaggtctcgaacagctggaaataaaaatctcaaagcccgataccacaaccccgaaccccgaaccccgaaccctgatccccgttggtgaacgcaccaacgtctccggaagcagaaaattcctgcgcttaatcagcgaaggaaaatacaacgagacgcttgcctttgccagaagcatgatcgaagacggcgcgaaaattatcaacgtaggcatggacgacgccatgctggacgcggaaaaatcaatgggcgcttttcttgaccttgccctctccgatcctgaaattgccaaagttcccgttatgatcgacagttcccgctggaacgtgatcgaggcaggccttaagcggttgccgggaaaagggctggtaaattcaataaacctgaaagacggcgaggcggaattcctgcgccgcgcgtcattaatcaaatggtatggcgctgccgccgtggtaatgctcatagacgagaaagggcaggcggtaagctatgatcgcaaaattgaaattgccggacacgcctacaagctgctggttgattccggctttccgcctgaaaatatagtgtttgatcccatgtgcttgccgtcgcgacggggataa

SEQ ID NO: 69082 - protein, 253 aa, Unknown
  Obtained from environmental sample
  DOMAIN (79)...(253): Pterin binding enzyme
  misc_feature (1)..(253): Xaa is any amino acid
MASCVEKYLQEGLLNVIGGCCGTTPAHIAAIAAKAALHKPRPLPQSPSPRPLLLSGLEQLEIKISKPDTTTPNPEPRTLIPVGERTNVSGSRKFLRLISEGKYNETLAFARSMIEDGAKIINVGMDDAMLDAEKSMGAFLDLALSDPEIAKVPVMIDSSRWNVIEAGLKRLPGKGLVNSINLKDGEAEFLRRASLIKWYGAAAVVMLIDEKGQAVSYDRKIEIAGHAYKLLVDSGFPPENIVFDPMCLPSRRG

SEQ ID NO: 69083 - DNA, 2028 bp, Unknown
  Obtained from environmental sample
  misc_feature (1)..(2028): n is a, c, g, or t
gtgcttgccgtcgcgacggggataagcgagcatgactcctgcgcggtagattttatccgcgcctgcgcgtggattcgcgataactgccccggagtcaatatatcaggcggcatctcaaatctttcgtacagcttcaagggaaacaacaaggtgcgcgaggccatgcacagcgttttcctggtacacgcgcgggcggcgggtttgacaatggcgatcgtaaatccggcagagctcattgcgtctaacgtaattgaggaagatctccgcaacgccgtggaaaatgtaatcctcaaccgcaatccgggcgtggcggaacgcctccttgcgctcgcggaaaaaatcagcgctgcctcatctattactcattcctcattcctcattcctcattcttcatcggactggcgcaaccagcctgttgaaacgcgcatcattcacgccatgctgcgcggcattgacgattttatcgaggtggacgcgctcgaattgttaaaagccggaaaaacagcccttgagatcatcgaaggccctttgatggacggtatgaaagaagtagggaaacgctttgacgaaggaaccatttaccttccccatgttatacgcagcgcgagggtgatgaaaaaagccgccgccgcgcttgaaccccatatgggcaaagccaataaaggcgacagcgccacggctatagggcccaaaataattcttgcgaccgtaaagggcgatgtccatgacattggcaaaaacatcgtcggtattgtccttgcctgcaatgggtatcaggttatagaccttggggtgatggttcccgccgagcagatactcgacgccgcggaaaaagagcaggctgtcatgatcggcctttcggggctaatcgccccttcgctggacgagatggcgcacattgcaagagagatgcaaaagcgacgtatgaagatacctctacttgtcggaggcgcggcaacaagccttgtccataccagcctgcgccttgtcccgaaatactcaggcccggtagtttatgtgccgaacgcgggaaaatccgccgagacggtacgcgctctgctttccgatttactgcgtccgcgtttcctgcgggaactggaaaaaaattaccagaacgcagcctggcggcatgaggagctcctgtcccgcgtagagatcatttctcttgaaaacgcccgcgccaacagagtcccccccgcagcatacaaacccgccgctccaaaaaaagccggcattatagacctgaacaattaccctataaatagagtaattccgtacattgactggcagtcgattttgcgcggctgggagacgaagggcccccagagcagggaacctgccaaggacagagcacctgccccggcggctgacgccattttggatgacgctaaacggctgctcgaactggtggaagccaagggccttttgcagctccggggcgtcgcggggatttttcccgcctcatccgaaaatgaagaaatcaggtaccagatatcaaattctggtgtcagataccgcttttgcttccggcgcaatttgcaaaaaaagcccgccgggattttcaatccctgcctcgcggattttattttgcccgcacaaaacgggcagaccgttgactggcttgggctgtttgctattagcgcgggcttcggccttgaggcagcagcggaacaataccggagcagcggcgatgactacagcgcccttctgctggcaagcctggcaaatgcccttgcggaagcctttgtcgaagaactacacctccgcgtccgccgggaatggtggggctacgcgccggatgaatccctttcagttgatgaaatcctcaaaggcaagtatacaggcatacgccccgcctttggctatccttcctgccccaaccaccaagataaacgtattgtctttgaactgcttgaagcggaaaaacgctgcgggctgaagctgacggataccgcgatgatcatccccgccgcgtctgtctgcgggatgttttttgcaagtccctcgtcttattatttcagtgtgtaa

SEQ ID NO: 69084 - protein, 675 aa, Unknown
  Obtained from environmental sample
  DOMAIN (230)...(354): B12 binding domain
  misc_feature (1)..(675): Xaa is any amino acid
MLAVATGISEHDSCAVDFIRACAWIRDNCPGVNISGGISNLSYSFKGNNKVREAMHSVFLVHARAAGLTMAIVNPAELIASNVIEEDLRNAVENVILNRNPGVAERLLALAEKISAASSITHSSFLIPHSSSDWRNQPVETRIIHAMLRGIDDFIEVDALELLKAGKTALEIIEGPLMDGMKEVGKRFDEGTIYLPHVIRSARVMKKAAAALEPHMGKANKGDSATAIGPKIILATVKGDVHDIGKNIVGIVLACNGYQVIDLGVMVPAEQILDAAEKEQAVMIGLSGLIAPSLDEMAHIAREMQKRRMKIPLLVGGAATSLVHTSLRLVPKYSGPVVYVPNAGKSAETVRALLSDLLRPRFLRELEKNYQNAAWRHEELLSRVEIISLENARANRVPPAAYKPAAPKKAGIIDLNNYPINRVIPYIDWQSILRGWETKGPQSREPAKDRAPAPAADAILDDAKRLLELVEAKGLLQLRGVAGIFPASSENEEIRYQISNSGVRYRFCFRRNLQKKPAGIFNPCLADFILPAQNGQTVDWLGLFAISAGFGLEAAAEQYRSSGDDYSALLLASLANALAEAFVEELHLRVRREWWGYAPDESLSVDEILKGKYTGIRPAFGYPSCPNHQDKRIVFELLEAEKRCGLKLTDTAMIIPAASVCGMFFASPSSYYFSV

SEQ ID NO: 69085 - DNA, 891 bp, Unknown
  Obtained from environmental sample
  misc_feature (1)..(891): n is a, c, g, or t
atgaaaccatatcaattacttgaaaacatattgattgatattgaagaaggtatcaaacaaaatattgacgcctttactctttcaaaaagatacaactattcggaaatccatttacgcagattattcagttttgcgtttaataagcccatatccggttatatacgttcccgcaccctgtcagaaagtcttaacgatctgttgcatacagataaaaacatagtagatattgcgcttgaatacggttttagttttgagaattcatacagcagatcatttaagcgagaattcggtatatctcctgacaatctgcgcaagtataggcaaattgtaaaaattcagccacctttacaccttcttgttgaaaataatttagatgataacgttttatttggtcctgaatttgtagtagttcctcaatttcacttaataggaaaaccgcaccgattaccgtttgaaactgcccaaaaatcactttataatatcggagcgcacttttggttaaatgaacgccgccatgttaaaaagataataaatcccgatgtttatataggtcttaaccacaatataaacaatgaaaaaaagtattcagaatatttaacttctgttcaggtacgtaatttgtctgacattcctgacggattttgcggtacaacattcgatacatcaatgtgcgctcgctttcgatttatcggacagcataaaaataaagaaattaacgctgaaacagcaaacaaaatgtacagcgcaatcaggaaatatgttaatgataaaaattgtaaatataatctgtacattgacaaagtatattttgaaagaatagattggaatatatataacggtaatttctttcaagttgaatgttttacccctgtaacggaaaaaaccgcataa

SEQ ID NO: 69086 - protein, 296 aa, Unknown
  Obtained from environmental sample
  DOMAIN (61)...(105): Bacterial regulatory helix-turn-helix proteins, AraC family
  misc_feature (1)..(296): Xaa is any amino acid
MKPYQLLENILIDIEEGIKQNIDAFTLSKRYNYSEIHLRRLFSFAFNKPISGYIRSRTLSESLNDLLHTDKNIVDIALEYGFSFENSYSRSFKREFGISPDNLRKYRQIVKIQPPLHLLVENNLDDNVLFGPEFVVVPQFHLIGKPHRLPFETAQKSLYNIGAHFWLNERRHVKKIINPDVYIGLNHNINNEKKYSEYLTSVQVRNLSDIPDGFCGTTFDTSMCARFRFIGQHKNKEINAETANKMYSAIRKYVNDKNCKYNLYIDKVYFERIDWNIYNGNFFQVECFTPVTEKTA

SEQ ID NO: 69087 - DNA, 1338 bp, Unknown
  Obtained from environmental sample
  misc_feature (1)..(1338): n is a, c, g, or t
atgctgacatctttgaaataccgcaaccttccaaccgtagttctcgccggacgccccaacgtgggaaagtcaacgctctttaaccgcctgcttcacaaacgcagggcgattaccgacccgacgccgggcgttacgcgcgaccccgtagaagcggattgccttatcaatgaaaaaccattgcgccttatcgacacaggcggcttcaaacttacggattgcgatgagcttgacaagttggtagttgaaagaactcttgaaacaattaaaaaagccgaccttgttgttttactgctcgaagcgggagagataacaagcgaggacgaagaacttataaacactctgcgcccgtaccgagaaaaattaattgtaacggtaaacaagacggaaggcggcagacacgaagccgacgcgtggaatgttctcaccttcggttttgaaaaagttttaatgatctccgcagagcatggcgacaatatcggcgaacttcaacaggaaattataaagcgtcttgatttttccaaagtggaagaagcgcaggaagaaaaagttatcaggattgcgctccttggcaaacccaacacaggcaagtccacgctgtcaaacagactgacaggagccaacgcttctatcgtaagcgaaattcccggcacgacaagggacactgttgaggggcgtttcagttggaagtcacgcaattttattatcatggataccgcaggcattagacgcaaggcaaaggtgaacgaaaacatcgaatactattccgtaaaccgcgccattaaaacaataagcgacgcggatattgtcatattgatgattgacgccgcggatgggctttccgatcaagacaagaaaatcgccgccctcgcccatgacaagggcagggggataattatggcgctcaacaaatgggatacaatgcctcagcagaaaaatacattcaaggacgctgaagggaaaatacactttcaattcgggcaaatggaatatgcgccgattatccccgtcagcgcaaaagacggctccggcgtcgataaactgctgaatacggcgataaaaatgtacggacagcttaatctgcaaataggaacatcacagcttaatcaggctttggaaaagtggctgcaggaatatccgccgcctacgggaccaagaacgtacttcaaaatcaaatacgccgtgcaaaaatccgcaaaccccgtacacttcattttttttgtttcccgtattcatgttgtaagcgattcttatattgcgtatttaaggaacaaaatacgcaaagatttgggattttctcttatccccgttttaatcgacgtaaaaagctcttcaaagtaa

SEQ ID NO: 69088 - protein, 445 aa, Unknown
  Obtained from environmental sample
  DOMAIN (186)...(305): Dynamin family
  misc_feature (1)..(445): Xaa is any amino acid
MLTSLKYRNLPTVVLAGRPNVGKSTLFNRLLHKRRAITDPTPGVTRDPVEADCLINEKPLRLIDTGGFKLTDCDELDKLVVERTLETIKKADLVVLLLEAGEITSEDEELINTLRPYREKLIVTVNKTEGGRHEADAWNVLTFGFEKVLMISAEHGDNIGELQQEIIKRLDFSKVEEAQEEKVIRIALLGKPNTGKSTLSNRLTGANASIVSEIPGTTRDTVEGRFSWKSRNFIIMDTAGIRRKAKVNENIEYYSVNRAIKTISDADIVILMIDAADGLSDQDKKIAALAHDKGRGIIMALNKWDTMPQQKNTFKDAEGKIHFQFGQMEYAPIIPVSAKDGSGVDKLLNTAIKMYGQLNLQIGTSQLNQALEKWLQEYPPPTGPRTYFKIKYAVQKSANPVHFIFFVSRIHVVSDSYIAYLRNKIRKDLGFSLIPVLIDVKSSSK

SEQ ID NO: 69089 - DNA, 612 bp, Unknown
  Obtained from environmental sample
  misc_feature (1)..(612): n is a, c, g, or t
atgaacctcgcaaacaaattatcatttttccgtataatcctcgcccccttgttttttgtcatttatcttatgcctcgcttttttccttcgttattcgtaaacggaacggcatggacagtgccggtactttggggcatttctgtcgtctctgaaataacagattatttcgacggttttgccgcccgcaaactcaacctgacaagcgactttggaaaacttttagacccattcgccgacacgcttacgcaaattacttttttcctttgttttataattgacggtacttttcccggcggtatttttccggtaattttatttttaatagttgtttaccgcgagttcgctatcatgttccttcgcaacctgatggcgaaaaaaggcgttgttatgggcgcgcgaatgggcgggaaaataaaaaccgtcgcgtatatcacctcggctgcaatcgctctcttaacctcaagttttgaacgattggaagtattaacatcgattttgccgtacattaaaatcggcgcgcttattgcctttactatttccgtaattatctcgatagtttcgttttttgattatttgataatctataaaaaaacggcggacataaaagcgtaa

SEQ ID NO: 69090 - protein, 203 aa, Unknown
  Obtained from environmental sample
  DOMAIN (44)...(194): CDP-alcohol phosphatidyltransferase
  misc_feature (1)..(203): Xaa is any amino acid
MNLANKLSFFRIILAPLFFVIYLMPRFFPSLFVNGTAWTVPVLWGISVVSEITDYFDGFAARKLNLTSDFGKLLDPFADTLTQITFFLCFIIDGTFPGGIFPVILFLIVVYREFAIMFLRNLMAKKGVVMGARMGGKIKTVAYITSAAIALLTSSFERLEVLTSILPYIKIGALIAFTISVIISIVSFFDYLIIYKKTADIKA

SEQ ID NO: 69091 - DNA, 1041 bp, Unknown
  Obtained from environmental sample
  misc_feature (1)..(1041): n is a, c, g, or t
atgactgataccggtcttttggaaaaaatcaattcaaaacgcgccatggaaattttcgcggagctttacggggagcgtgaagttgacgccgcaaaacagcggtatacatcgctaattaccggaacacaaaaagaagatgcggaatttagcggcggtcaagaaaacttgcgggttttcagcgcgcccggaagaacggaacttgctggcaaccacacggatcataaccgaggcaaagtgctggcggcatccattcaactggacaataccgccattgtgcaaaagcgcggcgacaacattgtatttttccgctcaacaggtttccctgatgaaaaaattaaattgacagataaaaacggcgctcccgatttacagccgaagcccgaagaaaaaggaacgacatcagcgctcatcaggggaatagcctctgaattatcaagccgaggctgcaaagtaggcggcttttcagctaacgccgattccgctgttttcgccggttcgggactatcatcatcggcggcgcttgaaactcttatatgccgtattttcgattctctttacggcgagggaaaacgcggcgcgctggaaatagcgcaaatcgggcaaatagcggaaaacgttcactttggaaaaccctgcggattaatggatcaggcggcatgcgcctgcggcggcgcggtagcgattgatttcgccgattcttcgcgccccgtaataaagcaaataaattttgatcccgccgccgccggatacgctctttgcgtagtgaacacaggcggcagtcacgccgatcttaccgccgattacgcttccattccggcggaaatgaaatccgtcgccgcgtttttcggcaagtcagtacttggagagttggaaaaggaaaccgtactttcccgagccgccgaagcgcgaaagtcattgggagacagagcattcctacgtgccattcactttttcaacgaaaacgaaagagtagacgcaatgaccgcaattttattggaaatggaaaaatccgcaacagccgccgacaaacaacggacataa

SEQ ID NO: 69092 - protein, 346 aa, Unknown
  Obtained from environmental sample
  DOMAIN (155)...(224): GHMP kinases N terminal domain
  misc_feature (1)..(346): Xaa is any amino acid
MTDTGLLEKINSKRAMEIFAELYGEREVDAAKQRYTSLITGTQKEDAEFSGGQENLRVFSAPGRTELAGNHTDHNRGKVLAASIQLDNTAIVQKRGDNIVFFRSTGFPDEKIKLTDKNGAPDLQPKPEEKGTTSALIRGIASELSSRGCKVGGFSANADSAVFAGSGLSSSAALETLICRIFDSLYGEGKRGALEIAQIGQIAENVHFGKPCGLMDQAACACGGAVAIDFADSSRPVIKQINFDPAAAGYALCVVNTGGSHADLTADYASIPAEMKSVAAFFGKSVLGELEKETVLSRAAEARKSLGDRAFLRAIHFFNENERVDAMTAILLEMEKSATAADKQRT

SEQ ID NO: 69093 - DNA, 306 bp, Unknown
  Obtained from environmental sample
  misc_feature (1)..(306): n is a, c, g, or t
atggacccgctggttatagacaaaccgtctgaaaaaatcgaagaaaacatcaaagaacctgaaaatttcagggttattctgcttaacgataactatacaactatggaatttgtggttgcggtattgattgaaatcttccataaagacatatcggacgcaaattcgataatgcttgacgtccacaaaaaaggcaaggggatagtggggatttatacatgggatatcgccgccactaaaaccgagcaggtccaccttgtggcaagagcgcacgagtacccccttcgctgtattatcgaaccggtttaa

SEQ ID NO: 69094 - protein, 101 aa, Unknown
  Obtained from environmental sample
  DOMAIN (17)...(98): ATP-dependent Clp protease adaptor protein ClpS
  misc_feature (1)..(101): Xaa is any amino acid
MDPLVIDKPSEKIEENIKEPENFRVILLNDNYTTMEFVVAVLIEIFHKDISDANSIMLDVHKKGKGIVGIYTWDIAATKTEQVHLVARAHEYPLRCIIEPV

SEQ ID NO: 69095 - DNA, 1692 bp, Unknown
  Obtained from environmental sample
  misc_feature (1)..(1692): n is a, c, g, or t
atggctgcagattcaaataaggcgctgattgtccagagcgacagaaccctgcttttggatgtccactgcgaaaccgcgcaggcggcgcggcaggcgattatgccttttgcggaacttgagaagtcgcctgaacatattcatacataccggataacccccctttctttgtggaatgccgcaagcgccgggttaacgccgcaggatgttgtcaaaaccctttgcgaacattcccgttacgacataccggcgggaattacggaaggatttgcgcttcttatgtcccgttacggaaaaatccgcatgacggaggaaaagaacgagccgaatctgcttgctctgcgcgtagatgatgaggcgctccgtcttgaaatcgggcagattaaagcccttgaaaaatacatcataaaaaacaacggcaaatttttacttgaattgattcacaggggaagcgttaagcgcgaattgatacgcgccggatggccggtacaggacgacgcgccgctgtcaaaaggcgaggatttgcagataactttgcgagagcgctgcctttcgggaaggccgtttatacctagggattatcaggtaactgcggcgcgttccgttgtaggttcgggaggacccggttccggttacggagttgttgttctgccgtgcggctccggcaagacaattgttggaatgttcattatgtcactgcttaaaaccaacacgttgattttaacgactaatgtcgcggctgttcatcaatggatagaggaacttttggacaagaccgagttgacgaaggagcagatagcggagtatacaggcgattgtaaagctgtcgcgcctgtaaccgtcgccacttatcagatcatcacatggcgtcccgacagggattcggactttccgcatttcaagctttttagggagcgtccctgggggctaatcatttatgacgaggttcaccttctgcccgcgccggtgtttcgcgtaacggcggaactgcaggctgtaaggcggctcgggctcaccgccacgctggtcagggaagacggcgaggaggacgcagttttcagccttgtgggaccaaaacgctacgatgtgccgtggaaggatctggagaacaagggctggatcgccggagctttctgcactgaaattcgcattgacatgcctgagaatttaaaaataccgtatgccatagctacccgccgcgaaaagtaccgcattgcaagcgaaaatcccctgaaaaacgaagcggtcgttcaattaatcgaaaaccatcgggacgatcagattcttgtgataggccagtacatcagccagctggaaggccttgcccgccttctaaaagcgcctcttataaccggcaaagcgcctaacaacgaaagagaacgcatctacggtgcgttcaggagaggggaagtaagagtcattgtcgtgagcaaggtggccaattttgccattgatttgccggacgcttcaatggcgattcaggtgtccggttcctttgggtcgcgccaggaagaagcccagcgcctgggccgcatccttcgccccaaggacaggaactcatggttttacacactggtttcccgctatactgtggaggaggaatttgccgccaaccgccagcagttcttggcggaacaggggtacaagtattctatccagcactggacagcggatgaaatggaggcggtcgtatga

SEQ ID NO: 69096 - protein, 563 aa, Unknown
  Obtained from environmental sample
  DOMAIN (191)...(349): DEAD/DEAH box helicase
  misc_feature (1)..(563): Xaa is any amino acid
MAADSNKALIVQSDRTLLLDVHCETAQAARQAIMPFAELEKSPEHIHTYRITPLSLWNAASAGLTPQDVVKTLCEHSRYDIPAGITEGFALLMSRYGKIRMTEEKNEPNLLALRVDDEALRLEIGQIKALEKYIIKNNGKFLLELIHRGSVKRELIRAGWPVQDDAPLSKGEDLQITLRERCLSGRPFIPRDYQVTAARSVVGSGGPGSGYGVVVLPCGSGKTIVGMFIMSLLKTNTLILTTNVAAVHQWIEELLDKTELTKEQIAEYTGDCKAVAPVTVATYQIITWRPDRDSDFPHFKLFRERPWGLIIYDEVHLLPAPVFRVTAELQAVRRLGLTATLVREDGEEDAVFSLVGPKRYDVPWKDLENKGWIAGAFCTEIRIDMPENLKIPYAIATRREKYRIASENPLKNEAVVQLIENHRDDQILVIGQYISQLEGLARLLKAPLITGKAPNNERERIYGAFRRGEVRVIVVSKVANFAIDLPDASMAIQVSGSFGSRQEEAQRLGRILRPKDRNSWFYTLVSRYTVEEEFAANRQQFLAEQGYKYSIQHWTADEMEAVV

SEQ ID NO: 69097 - DNA, 1305 bp, Unknown
  Obtained from environmental sample
  misc_feature (1)..(1305): n is a, c, g, or t
atgaaagcgtcatcaaaaccattcaggcctgtggatcattggaagtcagccataatggccctgcctgaaagcaacttctttgagctgttaagaagcgtattcggcaacattaaaacgccgtttagcaaacacaagcttttggaagatctctttgcttttctatccaaaaaggaaaaccaaaaaaccattgccgcctttatcggcgaacaggatcacaaggtgatagccgccacagcccttctgggcgagccggaaacgggcaacctggaaaaattctttgccggagaaatgaccgaggcagagcttcaagctattatcatcaaccttgaagaacggcttatcctttaccgttttcgggatgaaaaagttatgcgtctggcgctcaatccggttttggacgaagtcctggcccctttcattgcggacatcgatcctctgtttcgtagctttcctatggaaagccgttttccgaaagaagaaagcgccggaacggacgcaacgcttcctgaaagctgccggtcgttctacatttccgatcccagaattatggcggcgctttttgcctttatcattgaagaggaagagctgtttaaagctgaagccgtaacggagtccaaaggaacgagatcctcaggaaccaggtctcaggggactttaatccccgaactgcgcaaaaaagttctggacggtgcaaaaaattcctttcccgatctggattttgaactggcgataaacaacctgattcagatgggcttgttctcacgcacggatcgcctcttgattcccaacagggaaaaaatcgccgaatactccgagctatccgactctgaaaggcaggaatattgggcggccggactgttcatttgctttaaggagtccgaaaaaagttcgcatagcggtcattccgactgggatattttttcattttcctggagccgcctgcgcacaattgcctcatccatacacagcttcagaagcctgcttgatcctgaaaggctttatccggagcttaccctaaagcggctctgggaacttttggaagaaaagacgggagggctggtgaatcaatggccttcatttctttcggtgatggaaaagacaggccttttgatagccaaaagtatttccgaaaaagaaggaactttttggcttatccctccggagaaacccaaagaacattctgccggagaacctgtaatcgtcatggacacggcgttttcatttatactttacccggaaatttcatttgaggatgccctggcattaagcgctttttgttcgattaaagaatgtaccggatcttaa

SEQ ID NO: 69098 - protein, 434 aa, Unknown
  Obtained from environmental sample
  misc_feature (1)..(434): Xaa is any amino acid
MKASSKPFRPVDHWKSAIMALPESNFFELLRSVFGNIKTPFSKHKLLEDLFAFLSKKENQKTIAAFIGEQDHKVIAATALLGEPETGNLEKFFAGEMTEAELQAIIINLEERLILYRFRDEKVMRLALNPVLDEVLAPFIADIDPLFRSFPMESRFPKEESAGTDATLPESCRSFYISDPRIMAALFAFIIEEEELFKAEAVTESKGTRSSGTRSQGTLIPELRKKVLDGAKNSFPDLDFELAINNLIQMGLFSRTDRLLIPNREKIAEYSELSDSERQEYWAAGLFICFKESEKSSHSGHSDWDIFSFSWSRLRTIASSIHSFRSLLDPERLYPELTLKRLWELLEEKTGGLVNQWPSFLSVMEKTGLLIAKSISEKEGTFWLIPPEKPKEHSAGEPVIVMDTAFSFILYPEISFEDALALSAFCSIKECTGS

SEQ ID NO: 69099 - DNA, 777 bp, Unknown
  Obtained from environmental sample
  misc_feature (1)..(777): n is a, c, g, or t
ttggaacggctctctgaaaaccgccttgatccgaatcttgactggactctaaaagagtgggaaaaacgctacaccggggtttccattcaccagggcattgtccttacgctgacagaagacaaccgctacctagcgaaagcagggcccgtctctcacctgataggaaaaaccctggcaccgggtgtttacctgctttccacggaagaacgttcgacagtcgtcagggccctgcataaagccggcatcgatattgtcgctcagcggccagaggaagccgaaagcgccgggctaaggcgcggcggatcgtttagaaattcttttccgcgcctttattcatcggaagccgccgaattcggtttggctcattccattaatactaacactgacaagaaaacttctgaaacaaaaaaatccgaagagggagcggctataaaagaaaaattccgcggagttttggaaaaaatgaaaataaccaaacaggagcgggatgaacttcttgcaaggatagagcggggccttgtgctgaacgaaacccagcttgagccgacatcggtgcgctatgaaaaactggaagcgcgcgggctggattacacaggcaagacagctatagcaaagcaggctatcgaaacccattcgctgctggaaataacctggccgggccgcgatggagaatcgaaccgtacagtcgggataccgcaggcacttgagaaaaaagagagcgagagcgttctggttctcaaggccagcgggaattcagaaaacgccgcaagggtttaa

SEQ ID NO: 69100 - protein, 258 aa, Unknown
  Obtained from environmental sample
  misc_feature (1)..(258): Xaa is any amino acid
MERLSENRLDPNLDWTLKEWEKRYTGVSIHQGIVLTLTEDNRYLAKAGPVSHLIGKTLAPGVYLLSTEERSTVVRALHKAGIDIVAQRPEEAESAGLRRGGSFRNSFPRLYSSEAAEFGLAHSINTNTDKKTSETKKSEEGAAIKEKFRGVLEKMKITKQERDELLARIERGLVLNETQLEPTSVRYEKLEARGLDYTGKTAIAKQAIETHSLLEITWPGRDGESNRTVGIPQALEKKESESVLVLKASGNSENAARV

SEQ ID NO: 69101 - DNA, 582 bp, Unknown
  Obtained from environmental sample
  misc_feature (1)..(582): n is a, c, g, or t
atgcaacaaacaattttcggcaaaaccgctttaacagtaagccgcaccggattcggctgtatcccaatccagcgcatttcttacgatggaagcgccgcgttgttacagcgcgcctacgataacggcgttactttatacgataccgccaacgcctatacaaccagcgaagacagaataggcgctgcgcttcatcatgtccgcgataaaattgtgttatgtacaaagtccgccgcgcaaacgcccgacaaattaatggaacatatcgaaaacagcctgagaatgctgcgcacagattatattgacgtgttccagcttcataacccgtcctttgtgcctctccccgaaggcgaagacggattatatgcgtgcgcgttgaaagcgaaagagcaaggtaaaatccgccacatcggcattaccgctcacagcaaagacaacgcaaaaaaagcgatattatccggtttatacgaaaccttgcagtaccctttctcttacctctcttcccccgaagaattggctcttgtcgctctttgccgcgagcataacatcggctttcttgccatgaaagccctatgcggcggttaa

SEQ ID NO: 69102 - protein, 193 aa, Unknown
  Obtained from environmental sample
  DOMAIN (7)...(190): Aldo/keto reductase family
  misc_feature (1)..(193): Xaa is any amino acid
MQQTIFGKTALTVSRTGFGCIPIQRISYDGSAALLQRAYDNGVTLYDTANAYTTSEDRIGAALHHVRDKIVLCTKSAAQTPDKLMEHIENSLRMLRTDYIDVFQLHNPSFVPLPEGEDGLYACALKAKEQGKIRHIGITAHSKDNAKKAILSGLYETLQYPFSYLSSPEELALVALCREHNIGFLAMKALCGG

SEQ ID NO: 69103 - DNA, 1563 bp, Unknown
  Obtained from environmental sample
  misc_feature (1)..(1563): n is a, c, g, or t
atgaaagaacttaattttttgcgcgccgccttaattgccggtataaccgtcgtcagtatcgccgtttctttgagcttttgcgcgttgttgcttttttcctgcgaagttatgactccggttgacgaagttattattacgcgcgcggaagaattttccgcagagcgtgaatttctggagcagctttttttacagccggattttaaagataaaatgaaactccgtttgatttctgaaaacgaaaaagatgaacaagaagcggcgaaaaaaatgcaggttagttctccgtctctgattattgaatttacgccgtcatgggcgcaggcggacgggattccaatttcaaaaacatggtatgtaccaaaagaagatccgcttgcggaacgtatcggaacaagttttgccgcctgtcttgccggaaaggaaactctggttcccattgaagaaattgctccgccgtatacgggacttttggtagacgatctatccgcagccgatgaaaattatccgttggtgaggtatgtttcaatccgcgttagagcggcggaagacagcggaaaaaacgcgcggcttcagaaaaaaattaccgcgctggaaacaaaacttgcacaggagcccaagccgcttgtacagcaaacgccgtcaattgtttggatatgctccgccggagacctaatgctggacaggggttcaggcgatattttgatcgatgaaggggcggcgggtattttaggaaagaccgctgattattttaacaagtctgatttaaacattgtaaaccttgaaggagcggttagcaatcgcggcgataaagccgctaaaagttacaatttccgttttgatccacgggttgttccgccgttaaaagcgggaaaaataaacgcggtgttgttagcaaataaccatgcctttgattacggagaaacggcgtttttagatacgcttgagtatttggaaaaaaatgaaattgcgattcttggagcgggacgcgacattatcgccgcatccgcgccttttattttttcaacggagaaacttgaaatacgagttttcggaattgcctcattcccccgtgaacgcaccggttgggacggcgcgtcagtaaacgccgcagcggacaaagcgggaatgttatttgccgtacaaaacagcatagagcggcttaaagaaaattttgttcaaaaggacggagttttaaacgtgcttttatttcacggcggtcatgaatggacatggagaccggaacccggcgctcgcaaattgtacactgagcttgcgcaaagcggagcggatttacttatcggctcacatccgcatacagtgcaaggttttgaatggctggaaggaaaacttattttctggtcgcttggaaactatgtttttgccggaatgcacgatatgtacggaggcgaggaagggctgttgatccggctgggctacatggaaaaaacgctgatttattttgaacctgttccggtactgattaatggaccgcgttccgatgtcggtcaggcggagcaactaaaacgtttttacgcgctttcgcgggaactagccggcaagtaa

SEQ ID NO: 69104 - protein, 520 aa, Unknown
  Obtained from environmental sample
  SIGNAL (1)...(21)
  misc_feature (1)..(520): Xaa is any amino acid
MKELNFLRAALIAGITVVSIAVSLSFCALLLFSCEVMTPVDEVIITRAEEFSAEREFLEQLFLQPDFKDKMKLRLISENEKDEQEAAKKMQVSSPSLIIEFTPSWAQADGIPISKTWYVPKEDPLAERIGTSFAACLAGKETLVPIEEIAPPYTGLLVDDLSAADENYPLVRYVSIRVRAAEDSGKNARLQKKITALETKLAQEPKPLVQQTPSIVWICSAGDLMLDRGSGDILIDEGAAGILGKTADYFNKSDLNIVNLEGAVSNRGDKAAKSYNFRFDPRVVPPLKAGKINAVLLANNHAFDYGETAFLDTLEYLEKNEIAILGAGRDIIAASAPFIFSTEKLEIRVFGIASFPRERTGWDGASVNAAADKAGMLFAVQNSIERLKENFVQKDGVLNVLLFHGGHEWTWRPEPGARKLYTELAQSGADLLIGSHPHTVQGFEWLEGKLIFWSLGNYVFAGMHDMYGGEEGLLIRLGYMEKTLIYFEPVPVLINGPRSDVGQAEQLKRFYALSRELAGK

SEQ ID NO: 69105 - DNA, 1128 bp, Unknown
  Obtained from environmental sample
  misc_feature (1)..(1128): n is a, c, g, or t
atgagggaatatatatggctttttacaaaaaatatagaattaccgcttgaaaatccggtttatataggggatagagatgcggtagaaatggatttatcgattataacttatgacacggcatcggcggaattttttaaactatctaatattgatgaattaacaaaatatcagagtagttcaaaaaaatcgtggataaatatcagcggattaaaaaatattgattctataaaagcattgggaaaattatatgacattcacccgttaaccattgaagatattttaaatactgaacaacaaccaaaagttgaaatatttgaaaattataattttttatcgctaaagacaatacagcgtgaaaaaagatttcatcacaatcaaaataaaaagaaaagggcgtttttatttttaaaaaaagaagaggaaaaaattgatgaatttttgatagatcaagtcagtataatcattatgaaaaacacgctgataacttttcaggaaataccggatgattcatttgacggagtaagagagaaaatcttaagcggcgtcgggggaatccgtaaaacagggatggattatcttacatacgaaataattgacgatgtcgttgatgaatattttctggtgttaaaccatttggaagacgatattgaggattatgaagatcgcgctacaaaaacaaatgatgatatgtttattcaggaactgcaggatacaaaaaaatatcttttaaaaataaaaagagctatttctccgttaaaagataatgtctcgataattttacggcagaataaatttcttttagcggacaaattaaaaccatttgtacaggacttactggaaaatttacataatgcggaaataattgtggaacattatcgcgagtggttatcaaatataatggacgtaaatttatcggttttgtcgcagcagacgaacaaagtaatgaaagtattggcgattatatctacaatttttatccctttaacttttatcgtaggaatatacggtatgaattttgaatatatgccggaactaacaaaggagtggggttatcctgttgttttaggtctcatgggattaatcgcaatgacaatgatattaacatttaaatttaagcgttggttttaa

SEQ ID NO: 69106 - protein, 375 aa, Unknown
  Obtained from environmental sample
  DOMAIN (59)...(375): CorA-like Mg2+ transporter protein
  misc_feature (1)..(375): Xaa is any amino acid
MREYIWLFTKNIELPLENPVYIGDRDAVEMDLSIITYDTASAEFFKLSNIDELTKYQSSSKKSWINISGLKNIDSIKALGKLYDIHPLTIEDILNTEQQPKVEIFENYNFLSLKTIQREKRFHHNQNKKKRAFLFLKKEEEKIDEFLIDQVSIIIMKNTLITFQEIPDDSFDGVREKILSGVGGIRKTGMDYLTYEIIDDVVDEYFLVLNHLEDDIEDYEDRATKTNDDMFIQELQDTKKYLLKIKRAISPLKDNVSIILRQNKFLLADKLKPFVQDLLENLHNAEIIVEHYREWLSNIMDVNLSVLSQQTNKVMKVLAIISTIFIPLTFIVGIYGMNFEYMPELTKEWGYPVVLGLMGLIAMTMILTFKFKRWF

SEQ ID NO: 69107 - DNA, 687 bp, Unknown
  Obtained from environmental sample
  misc_feature (1)..(687): n is a, c, g, or t
ttggttgctccgcttggtgtaattgttggagtaagtgtttgcgtagcatttacagtaagggaaagggtgcttggtgaaagcgatactcctgttacggctaccgctgtggcgtttactgtaacagtacaggccgctgtcttgtttccgtctgcggttgtaacggtaattgtcgccgtgcctgcagctttggcggtaacttcgccgtctgtgactgttgctattgccgcgttgcttgttgtccatgttacggctttgtttgtcgcgttagctggtgtaaatatcgcggtaagtgtttctttattgcctatgagtattgttgtagcagacttgttcagtgatactcctgttacagctatcgctgtgtcgcttaccgtaacagtacaggttgccgtcttgccgccgtcctttgtggttaccgtgatggtcgcctcaccttgcttaacggcggtaatttttccatttgcgactgttgctattgccacgtcgcttgttgtccatgttacgtttttatttgttgcgttatttggttcgacttttgcggtaagggtttccgtgccatttactagtattgtcgtactagttttgtttagtgttacgcctgttaccggtacggttgagccgccgctgctgccacctgttgtgcctccgcttgagcctccactatttccgcctttgagccgcctgtag

SEQ ID NO: 69108 - protein, 228 aa, Unknown
  Obtained from environmental sample
  misc_feature (1)..(228): Xaa is any amino acid
MVAPLGVIVGVSVCVAFTVRERVLGESDTPVTATAVAFTVTVQAAVLFPSAVVTVIVAVPAALAVTSPSVTVAIAALLVVHVTALFVALAGVNIAVSVSLLPMSIVVADLFSDTPVTAIAVSLTVTVQVAVLPPSFVVTVMVASPCLTAVIFPFATVAIATSLVVHVTFLFVALFGSTFAVRVSVPFTSIVVLVLFSVTPVTGTVEPPLLPPVVPPLEPPLFPPLSRL

SEQ ID NO: 69109 - DNA, 903 bp, Unknown
  Obtained from environmental sample
  misc_feature (1)..(903): n is a, c, g, or t
gtggcaatagcaacagtcgcaaatggaaaaattaccgccgttaagcaaggtgaggcgaccatcacggtaaccacaaaggacggcggcaagacggcaacctgtactgttacggtaagcgacacagcgatagctgtaacaggagtatcactgaacaagtctgctacaacaatactcataggcaataaagaaacacttaccgcgatatttacaccagctaacgcgacaaacaaagccgtaacatggacaacaagcaacgcggcaatagcaacagtcacagacggcgaagttaccgccaaagctgcaggcacggcgacaattaccgttacaaccgcagacggaaacaagacagcggcctgtactgttacagtaaacgccacagcggtagccgtaacaggagtatcgctttcaccaagcaccctttcccttactgtaaatgctacgcaaacacttactccaacaattacaccaagcggagcaaccaatcaaaacgtaacatggtcttccaataatactagcgtagctactgtgaacgaaggaatagtaaccgccaaaaccttaggttcggcgacaattaccgttacaaccgcagacggaaacaaaaccgctacttgtactgttaacgtaatagtcccctactggacagccgtatcaaccagcacattcngcacatcaagcatcataacaatcgcctggggcaataacaagtttgtcgccgttggttatgacggcaaaatggcgacttcacctgacggcacaagctggacagccgtaacgactaccgcattcgacatcccagaaaaaggatacacttggggagcctcaatcaatgcaatcgcatttggcaacggaacgtttgtcgcaggtggctcaagaggcaaaatggcgtattcaacggggaattaa

SEQ ID NO: 69110 - protein, 300 aa, Unknown
  Obtained from environmental sample
  DOMAIN (44)...(121): Bacterial Ig-like domain (group 2)
  misc_feature (1)..(300): Xaa is any amino acid
MAIATVANGKITAVKQGEATITVTTKDGGKTATCTVTVSDTAIAVTGVSLNKSATTILIGNKETLTAIFTPANATNKAVTWTTSNAAIATVTDGEVTAKAAGTATITVTTADGNKTAACTVTVNATAVAVTGVSLSPSTLSLTVNATQTLTPTITPSGATNQNVTWSSNNTSVATVNEGIVTAKTLGSATITVTTADGNKTATCTVNVIVPYWTAVSTSTFXTSSIITIAWGNNKFVAVGYDGKMATSPDGTSWTAVTTTAFDIPEKGYTWGASINAIAFGNGTFVAGGSRGKMAYSTGN

SEQ ID NO: 69111 - DNA, 531 bp, Unknown
  Obtained from environmental sample
  misc_feature (1)..(531): n is a, c, g, or t
gtgaaatataaacctgatttgcaccataggcgttctattcgtttgcgtgattatgattatgcgaatgagggggcgtattttgttacgatatgttgcaaagaccgtgcgaattattttggcgaaattgttaatgagaaaatgattttgaatgaatatggcaatattgctagtgatgaatggggaaaattacaggaacgatatttggagaccaaatttgatgtttttcaaattatgccagaccatattcacggaataattgagataaatgtgggggcggtcgcccagccaattgggcgtattgttggggcgtataaatcattggtttttgcgaggtgtttggaaatatcaaatgaaaataaatgcgttttggggaaattatggcaacgcaattattgggaacatattatccgcaacgagacggaatatgcgaatatcacggaatatatccgcgataatcctgttttgtggggtaaaaaacgtttgggcgaaattttgccattcgcattaacgcggaaacgtaacccaatatga

SEQ ID NO: 69112 - protein, 176 aa, Unknown
  Obtained from environmental sample
  misc_feature (1)..(176): Xaa is any amino acid
MKYKPDLHHRRSIRLRDYDYANEGAYFVTICCKDRANYFGEIVNEKMILNEYGNIASDEWGKLQERYLETKFDVFQIMPDHIHGIIEINVGAVAQPIGRIVGAYKSLVFARCLEISNENKCVLGKLWQRNYWEHIIRNETEYANITEYIRDNPVLWGKKRLGEILPFALTRKRNPI

SEQ ID NO: 69113 - DNA, 438 bp, Unknown
  Obtained from environmental sample
  misc_feature (1)..(438): n is a, c, g, or t
atgcgttattttttagacacgaatatctttgtattctatgctttgggcggtgagaatttagacagagaaacaaccgccatatttggcgactacgaaaacataatttacgtaagtgccgaagtagtaaaagaaacaatgcacttaataaggcaaaagaaaatagacgtaaaacattggaaaaccccaaacgacatttggaaatctattagtgaatggggttttgtcgttgattacgtcaaggaagaacacataagaacattaggcaatttatccacagcaaaagaccacaaagacccaacagaccatataatcatagcacaagcaataacaaacaaaatgcccgtaatcagcagcgacagccaattcaggcattacaaaggacagggattgagtttggttttcaacaacgcccacgagagaaataagatagcgaggtag

SEQ ID NO: 69114 - protein, 145 aa, Unknown
  Obtained from environmental sample
  DOMAIN (3)...(130): PIN domain
  misc_feature (1)..(145): Xaa is any amino acid
MRYFLDTNIFVFYALGGENLDRETTAIFGDYENIIYVSAEVVKETMHLIRQKKIDVKHWKTPNDIWKSISEWGFVVDYVKEEHIRTLGNLSTAKDHKDPTDHIIIAQAITNKMPVISSDSQFRHYKGQGLSLVFNNAHERNKIAR

SEQ ID NO: 69115 - DNA, 1665 bp, Unknown
  Obtained from environmental sample
  misc_feature (1)..(1665): n is a, c, g, or t
gtgcgcagcatgatcctaagcggcgccggcgaagaagaggtgcgcgcctatctgaatgatactaacgaatatatactccaaaatgaaggcaaaccgctattgggctttggcggcattttcggttgttttaacatattcggcggagaaatgcttgacgggcaggatcgctatctgccggaagattatgaacctgcggaacagccatggtacaaggaagccgtggcggcgggcggcgaaatagtatatttacctccccataccggggaattaacgcctgttgccgtcattacctatgcgcgcggtttatttgataataacggaaaactgctcggcgcgattgccatggacacagagtttaaaaggatcagggaatatattgtcaatgagaatttagaaaaattatggttaggaattttattaaacgaacagtatgaatatatttcccaaagaaaccctgaaatggaaggtaaaaaatttgaagacgataacagcgatgccgcaaggctcgtggccgagcttaaactgggacgtgatgtttccgaatacaggatgagaaataatcaaaatgtaaattcaatcacttttatccgaaaactggaaaacggctggtatcttggcattgtaacgccggagaaaatatattttgaggaactcagaagaataagagctttaataatatttttggtaattgtgctgtcggtagtatttactattctcatactccgcgttttattggagaagaaaaaggtcagcgcgacgacaatatcaaaaatagaaaatatttctttccactctttgaatacatgttttctgctgctcctttcttttatcaccttatatcctttctggacaacaattgccgtgtcattcaatgacgcgctggactcgatccgcggaggcattactttcttccccagaaaattcagcctttttaattatgaggtaattttccggacaggggccattccccacgctttctttatttccgtcgcaaggacttcgattaatctggttacaagcgtattttttacggcaatgatcgcttttgccctttcacggcgtgaatttgtattgtcaaaaccttttacctttattctggtgctttccatgtatgtaaacgcgggccttattccgacatttttactgatcagaaatcttggcatgtacggaacattctgggtatatataattcccggaattgtaaacgcgtttaattttgttgtaatgaggacatatatgcgcactattccggaaagcattattgagtcggcgcgcattgacggttacggggatttttatatatttatccgtattattttccctttatgcctgcccgttcttgccacaatagggctttttgtcgcggtaggatcatggaacgcgtggtttgacacgatgatttacaattcaggcgatgagagactgcatactcttcaatacaagctgatggaatacctgcaatcaagccagtctcacggcaaatcggcgtcagacgcgggggctatggccctgtctgccggcgcgggaggaggctcaggtatggtaacgccgatgagcatacgcgcggcaattaccgtaatcgcggccgccccgattttgttaatttatccgtttatgcagcgttattttgtagtaggattgaatgtcggcggcgtgaaagaataa

SEQ ID NO: 69116 - protein, 554 aa, Unknown
  Obtained from environmental sample
  DOMAIN (322)...(549): Binding-protein-dependent transport system inner membrane component
  misc_feature (1)..(554): Xaa is any amino acid
MRSMILSGAGEEEVRAYLNDTNEYILQNEGKPLLGFGGIFGCFNIFGGEMLDGQDRYLPEDYEPAEQPWYKEAVAAGGEIVYLPPHTGELTPVAVITYARGLFDNNGKLLGAIAMDTEFKRIREYIVNENLEKLWLGILLNEQYEYISQRNPEMEGKKFEDDNSDAARLVAELKLGRDVSEYRMRNNQNVNSITFIRKLENGWYLGIVTPEKIYFEELRRIRALIIFLVIVLSVVFTILILRVLLEKKKVSATTISKIENISFHSLNTCFLLLLSFITLYPFWTTIAVSFNDALDSIRGGITFFPRKFSLFNYEVIFRTGAIPHAFFISVARTSINLVTSVFFTAMIAFALSRREFVLSKPFTFILVLSMYVNAGLIPTFLLIRNLGMYGTFWVYIIPGIVNAFNFVVMRTYMRTIPESIIESARIDGYGDFYIFIRIIFPLCLPVLATIGLFVAVGSWNAWFDTMIYNSGDERLHTLQYKLMEYLQSSQSHGKSASDAGAMALSAGAGGGSGMVTPMSIRAAITVIAAAPILLIYPFMQRYFVVGLNVGGVKE

SEQ ID NO: 69117 - DNA, 357 bp, Unknown
  Obtained from environmental sample
  misc_feature (1)..(357): n is a, c, g, or t
gtggctgtgaaatttccaaaatggccctttgataaattcgtgtacgcgcacaaggagcttggcacacagatgaaagccaccggcgaggtcatggccattgcagacacttttgaggaagcgctcttaaaagccgtgcgcggcgcggagatcggccttaacagccttaaccttccccgccttgcgtcaaaatctgacaaggaaatccgggagcttctgcaaaccgtaaccgacgagcgcctgttcgtgctgtacgaagcgctgaaacgcggcattagtgtcgatgaactgtatgatacgacaaaggtagacagatggtttttacatgggctggtgaatatattgaacaatgagcagtga

SEQ ID NO: 69118 - protein, 118 aa, Unknown
  Obtained from environmental sample
  DOMAIN (68)...(118): Carbamoyl-phosphate synthetase large chain, oligomerisation domain
  misc_feature (1)..(118): Xaa is any amino acid
MAVKFPKWPFDKFVYAHKELGTQMKATGEVMAIADTFEEALLKAVRGAEIGLNSLNLPRLASKSDKEIRELLQTVTDERLFVLYEALKRGISVDELYDTTKVDRWFLHGLVNILNNEQ

SEQ ID NO: 69119 - DNA, 813 bp, Unknown
  Obtained from environmental sample
  misc_feature (1)..(813): n is a, c, g, or t
atgaaaacagccttgagtatcgccgggtctgattgcagcggcggcgcgggcatacaggccgatctgaaaacattttccgcgcatggcgttttcggcatgacggctgttacttcggttgtcgcggaaaacacgttccgtgtgatcgaatatcaggatattcgccctgatattatagaaaaacagattgacgcggtgtttgaggatattccgcccgacgcgataaaagtcggtatgctttcatgcgtccaaaccatgacggctgtcgcgggaaaactgcgggaatggaaaccgcgcaatgtggttgttgacccggtgatgtacgcgaaaaacggagcccccttgatggagatggacgctatcagcacattgattaaggaagcggttccattggctgatgtaataacgccgaatgttcccgaagctgaaaaaatgtcaggaatgaccattaaaacgcatgacgatatgagggaagcggcgcggcgtattcacgcgatgggctgccgcgcggttgtcgttaaaggcggacacatcgaaggagacgcgaccgatattttgtttgacggggaaaagtttttcgaatacccgtcaccgcggatagacaccaaacatacccacggaaccggctgtacgttttcttcggcgattgccgcaaatctggctctgggggttcctgtttacaaagcagtcgaaaacgcaaaggcatatataaatacggcaattacctatgcgcccggactgggaaaggggcatgggcctacgcatcatttttatgcgttatataaatcttattttaaggagaaagaaaatggctaa

SEQ ID NO: 69120 - protein, 270 aa, Unknown
  Obtained from environmental sample
  DOMAIN (11)...(254): Phosphomethylpyrimidine kinase
  misc_feature (1)..(270): Xaa is any amino acid
MKTALSIAGSDCSGGAGIQADLKTFSAHGVFGMTAVTSVVAENTFRVIEYQDIRPDIIEKQIDAVFEDIPPDAIKVGMLSCVQTMTAVAGKLREWKPRNVVVDPVMYAKNGAPLMEMDAISTLIKEAVPLADVITPNVPEAEKMSGMTIKTHDDMREAARRIHAMGCRAVVVKGGHIEGDATDILFDGEKFFEYPSPRIDTKHTHGTGCTFSSAIAANLALGVPVYKAVENAKAYINTAITYAPGLGKGHGPTHHFYALYKSYFKEKENG

SEQ ID NO: 69121 - DNA, 915 bp, Unknown
  Obtained from environmental sample
  misc_feature (1)..(915): n is a, c, g, or t
atgcgcccggactgggaaaggggcatgggcctacgcatcatttttatgcgttatataaatcttattttaaggagaaagaaaatggctaactcgtatgccgccctgttgaataaggtgcgggaaaacaagccgctggtgcatcatattaccaactatgtaaccgtgaatgactgcgccaacatcacccttgctatcggagcgtcgccggtaatggcggacgctattggcgaagcggcggacattgccgccattgcgcgggcggtggttctgaacatgggaacgctcaatgagcgtaccatcccgtcaatgattgccgccggaaaaacagctaacgcaaaaggcattcctgttgtgtttgacccggtaggcgcgggcgtgtcaaagttacgcaatgataccgccgcgtccataacaggcgaattaaagttaagcgtaatccgtgggaatatttcagaaataaaatatatcgcaggcttgagttctcggacaaagggcgtggacgcttcggacagcgacattgccggagcgggcggcggcggcgcctttggcgccgggcagatcgcgcaaacactggcgcggaaactgggttgtgtggtggtgataagcggcgctgttgatgccatttcagacgataaaaagatcctttttgtggagaatggacatcccatgctgggtaatttaaccggtacgggctgtatgtgctcgtcgcttatcggttctttttgcggggccgctccggaggaacctttcgccgcggcggctgccgccatgatgtgcatgggcattgcgggagaattggcttacgaaagcgccggtcagcgcggtaacggaagcttccgcgccgcgctccatgacgcgataagccgcatggatgccgcgacgcttgaaaaactggcgagataccatgaagcgtaa

SEQ ID NO: 69122 - protein, 304 aa, Unknown
  Obtained from environmental sample
  DOMAIN (36)...(293): Hydroxyethylthiazole kinase family
  misc_feature (1)..(304): Xaa is any amino acid
MRPDWERGMGLRIIFMRYINLILRRKKMANSYAALLNKVRENKPLVHHITNYVTVNDCANITLAIGASPVMADAIGEAADIAAIARAVVLNMGTLNERTIPSMIAAGKTANAKGIPVVFDPVGAGVSKLRNDTAASITGELKLSVIRGNISEIKYIAGLSSRTKGVDASDSDIAGAGGGGAFGAGQIAQTLARKLGCVVVISGAVDAISDDKKILFVENGHPMLGNLTGTGCMCSSLIGSFCGAAPEEPFAAAAAAMMCMGIAGELAYESAGQRGNGSFRAALHDAISRMDAATLEKLARYHEA

SEQ ID NO: 69123 - DNA, 633 bp, Unknown
  Obtained from environmental sample
  misc_feature (1)..(633): n is a, c, g, or t
atgcccatgcacatcatggcggcagccgccgcggcgaaaggttcctccggagcggccccgcaaaaagaaccgataagcgacgagcacatacagcccgtaccggttaaattacccagcatgggatgtccattctccacaaaaaggatctttttatcgtctgaaatggcatcaacagcgccgcttatcaccaccacacaacccagtttccgcgccagtgtttgcgcgatctgcccggcgccaaaggcgccgccgccgcccgctccggcaatgtcgctgtccgaagcgtccacgccctttgtccgagaactcaagcctgcgatatattttatttctgaaatattcccacggattacgcttaactttaattcgcctgttatggacgcggcggtatcattgcgtaactttgacacgcccgcgcctaccgggtcaaacacaacaggaatgccttttgcgttagctgtttttccggcggcaatcattgacgggatggtacgctcattgagcgttcccatgttcagaaccaccgcccgcgcaatggcggcaatgtccgccgcttcgccaatagcgtccgccattaccggcgacgctccgatagcaagggtgatgttggcgcagtcattcacggttacatag

SEQ ID NO: 69124 - protein, 210 aa, Unknown
  Obtained from environmental sample
  SIGNAL (1)...(18)
  misc_feature (1)..(210): Xaa is any amino acid
MPMHIMAAAAAAKGSSGAAPQKEPISDEHIQPVPVKLPSMGCPFSTKRIFLSSEMASTAPLITTTQPSFRASVCAICPAPKAPPPPAPAMSLSEASTPFVRELKPAIYFISEIFPRITLNFNSPVMDAAVSLRNFDTPAPTGSNTTGMPFALAVFPAAIIDGMVRSLSVPMFRTTARAMAAMSAASPIASAITGDAPIARVMLAQSFTVT

SEQ ID NO: 69125 - DNA, 375 bp, Unknown
  Obtained from environmental sample
  misc_feature (1)..(375): n is a, c, g, or t
atgccgcgacgcttgaaaaactggcgagataccatgaagcgtaatattgattacagtctgtatctggtgacagaccgggacctcatggcggcttccagtattgaagaatgtgttgagcaggcgattcgcggcggctgtacggtagtgcagctccgggagaaaaccgcatcctcgcgcgagttttatgaaaccgccctgagggtgcgcaaaattacggctgaccttggcgtgcccctgattatcaatgaccgcgccgatattgcgttagctgtaaacgccgacggagtgcatgtcgggcaggatgatttacctcttgacgcggcgcgccgtataatgggaaaagacgccatatcggcgtttcggcacacaatttga

SEQ ID NO: 69126 - protein, 124 aa, Unknown
  Obtained from environmental sample
  DOMAIN (20)...(124): Thiamine monophosphate synthase/TENI
  misc_feature (1)..(124): Xaa is any amino acid
MPRRLKNWRDTMKRNIDYSLYLVTDRDLMAASSIEECVEQAIRGGCTVVQLREKTASSREFYETALRVRKITADLGVPLIINDRADIALAVNADGVHVGQDDLPLDAARRIMGKDAISAFRHTI

SEQ ID NO: 69127 - DNA, 312 bp, Unknown
  Obtained from environmental sample
  misc_feature (1)..(312): n is a, c, g, or t
ttgactgaagccctggcagccgccgctatgggcgctgattatctgggagtaggcgcaatgttcgcaaccgctaccaaaaaagacgctgacagtacaacaatggacgaactgcggcgcatacgcgctgaaattaaaatccccattgtggcaatcggcggcattaaccaaaacaacgtgccgctcttcgcgggaacgggaattgacggaatagcagtcgtttccgccattgtttgtcaaaaggacgcaagcggcgcggcgcgtgaattaaaagcattgtttcatagcgtaatggggaaaaatgaaagagtataa

SEQ ID NO: 69128 - protein, 103 aa, Unknown
  Obtained from environmental sample
  DOMAIN (2)...(76): Thiamine monophosphate synthase/TENI
  misc_feature (1)..(103): Xaa is any amino acid
MTEALAAAAMGADYLGVGAMFATATKKDADSTTMDELRRIRAEIKIPIVAIGGINQNNVPLFAGTGIDGIAVVSAIVCQKDASGAARELKALFHSVMGKNERV

SEQ ID NO: 69129 - DNA, 405 bp, Unknown
  Obtained from environmental sample
  misc_feature (1)..(405): n is a, c, g, or t
atgaaagagtataaatcttatatttttgatcttgacggcacgctgcttgattcaatgggcgtgtggggtcaaattgacgttgattttctcgcgaaacggggaattgccgttccgtccgattatatggacgctgtttcgtcaatgagtttccgggagactgccgcctatacaattaagcgattcgctttaccggacgccattgacagcttaatgcgtgaatggaacgatatggcggcattcgcctacggtcacacggtacagatgaagccctatgccaaagagtacctcatgacgctgcgtgaacacggagtaaaattagcggtcgcaactaccctgtccgccgaattgcgcgctcccgtactgcgtaacaacggtattgatactatgtttcacgcccatttgtaa

SEQ ID NO: 69130 - protein, 134 aa, Unknown
  Obtained from environmental sample
  misc_feature (1)..(134): Xaa is any amino acid
MKEYKSYIFDLDGTLLDSMGVWGQIDVDFLAKRGIAVPSDYMDAVSSMSFRETAAYTIKRFALPDAIDSLMREWNDMAAFAYGHTVQMKPYAKEYLMTLREHGVKLAVATTLSAELRAPVLRNNGIDTMFHAHL

SEQ ID NO: 69131 - DNA, 1785 bp, Unknown
  Obtained from environmental sample
  misc_feature (1)..(1785): n is a, c, g, or t
atggacgcgtcctttgaagatttccgccgccgcagcagagaaaccgagaaagagaacgagaagcaaatcgcgctgttccgccagagcgttgatgatataagcaaagaacttcacgatcagaaaagaatatttgatcaaacgggcgcgcttaaaaaggaccttgataaaaagatagaagaaatgaaagacgaccttaacaggctggaacagcgtaagagcgaaattactcagcttgaaaacaaactaaccaatgtaagacgtaccgaggacgaaataattaataagatgacaaggttcactaacgaacagcaccgcattgagcaaatggaaagagattttaacaacttgattaaaacgtcccaatcagttaaggaaaaacttgagcaagtttcatcttccgatgatattctcagcgccgtacaagtacagatacgcaaactggaagattcaattaaagaaacaaatgaaaaatatcagcgtatcgagaaaaagaacgaagtgcttgaacaaacaaacgaaggtatcgaccgcaattttaaagatctgcaaaaaacggaagccgcgattaagaatgccgataaggttattatgtctctttccaaacagtttgaagctctgcggacatcgatagagttgttggcgtcgcaaaatgaaaaagcgtccaacgccgttgataaaatcgcctccctcgacgaatcgcttgcgcaaattgaaaaacgtattaacgacgtgaatgtcgcccgcgaatggcttgctcgcacggaaacagaactcattgccttggataaagacgcaaaatctcttcttaaattaaccaagggaatagttgaaaaagaaaagggtaaaccaacaaagaacgaaggttctattactccgcaggaacgcgaagacatactaagattaaaagggcaaggctggtcaaccgaagaaattgcgaaagccacgagccgttccagaagcgaaatagagttaattctggaatttgccctcaaggggcgtttaaatctaccgtacggagaaaacaacttgaaccgcggcgcatggaacaagtttgaaaaaacacgggagcgttttcgcgtaacaacagaggagttatcccgctctctgccaaaacttaaaaaattacagcaggaacttgcggacacaagggcaaacggaaaaaattcatcttacaccgttgaaactcccgttgtttacaataccgcgcttaacgacataaaaattgacgatgaaataaaacttatcattgttgcggataaccctggacgcagagaacaagcggcggaaaacaggcgctatcttgtgggaccttccgggaaaatagcaaaaaagttttttattgacaaccagtctctcggaatagattttacaaaaaatgtcatcatattaaacaaaacccctattcactctccaagaactgttgaattacgggaacttgtcaaaatggaaactgcaagcggcagccattccattgcctccgctattgaagaatcccaaaaaagcatggctgatcttctatttgagtttcactccgcgttagactgccctgtctggataataggctacagtgaaatgcgtaagggcggcattttcgacagttacacggaaaaactgaaagacttatacgcgggtaacgaaaaaatgtataaacagttatttttttaccgccatttttccatgaatcaatttactatcgatttaaaacaacaggcaaaaacgggggaaagcgtaaagaaaagccttgaacgtatcggagaaggatacagggtaaggatacttgaataa

SEQ ID NO: 69132 - protein, 594 aa, Unknown
  Obtained from environmental sample
  misc_feature (1)..(594): Xaa is any amino acid
MDASFEDFRRRSRETEKENEKQIALFRQSVDDISKELHDQKRIFDQTGALKKDLDKKIEEMKDDLNRLEQRKSEITQLENKLTNVRRTEDEIINKMTRFTNEQHRIEQMERDFNNLIKTSQSVKEKLEQVSSSDDILSAVQVQIRKLEDSIKETNEKYQRIEKKNEVLEQTNEGIDRNFKDLQKTEAAIKNADKVIMSLSKQFEALRTSIELLASQNEKASNAVDKIASLDESLAQIEKRINDVNVAREWLARTETELIALDKDAKSLLKLTKGIVEKEKGKPTKNEGSITPQEREDILRLKGQGWSTEEIAKATSRSRSEIELILEFALKGRLNLPYGENNLNRGAWNKFEKTRERFRVTTEELSRSLPKLKKLQQELADTRANGKNSSYTVETPVVYNTALNDIKIDDEIKLIIVADNPGRREQAAENRRYLVGPSGKIAKKFFIDNQSLGIDFTKNVIILNKTPIHSPRTVELRELVKMETASGSHSIASAIEESQKSMADLLFEFHSALDCPVWIIGYSEMRKGGIFDSYTEKLKDLYAGNEKMYKQLFFYRHFSMNQFTIDLKQQAKTGESVKKSLERIGEGYRVRILE

SEQ ID NO: 69133 - DNA, 951 bp, Unknown
  Obtained from environmental sample
  misc_feature (1)..(951): n is a, c, g, or t
gtgataaaagggcgtaggaattttgcaatcttttccataatagcttgcgttttattatggggcttttcctttatttcaattaaagaatctctgccggtttttccgcccatgacgctggggtccgtacgttttataatcgccattgcggcgcttttcttaatgtatcgcttttccccggaatggcggggcgcaaacaaaacgcttaagtctgatatgtttctgttaataggctcaggtttgtcaggggttactttttattttttctttgaaaacaacggcgtgatgagggttaccgcctcggaggcttccattattacggcaacaattccagtgcttacaatgatcgccgattggcttgcggcaaaatcatcgttccaaagaaaacgcgcggatggtaacgagtgtgacagcatatcgcataacaatgcgccgcgtcttggatggcagtcatggctgggagcgtttatttccattgccggagtcgcgttagtcgcaggaatttccttttctctttcggggagcatatccggttatgtttacatgggaggagccgcgttgtgctgggttgcttacagcctgcttacccgtcctctatttgacagaaaacgatcccgtctctatatcgtattctggcaaaattttttcgggtttttaggattacttccatttgccatgctggaatacaaaaactggggcgatcccacattgccggtcatgcttcatgtgctttttcttgcgcttggttgttccgctcttgggtactggctctacgcttacgcaatggaagcgcttggagtatcaacaacgtcggtatttatcaatttaattccggtagtaacggtaattgccggattcatcgtcctgcatgaaaggcttacccttctgcaaggcgcgggagccgcgcttgttcttgcaggggtatatttaacaatactgcctcagcgcaaataa

SEQ ID NO: 69134 - protein, 316 aa, Unknown
  Obtained from environmental sample
  SIGNAL (1)...(26)
  DOMAIN (18)...(166): Integral membrane protein DUF6
  misc_feature (1)..(316): Xaa is any amino acid
MIKGRRNFAIFSIIACVLLWGFSFISIKESLPVFPPMTLGSVRFIIAIAALFLMYRFSPEWRGANKTLKSDMFLLIGSGLSGVTFYFFFENNGVMRVTASEASIITATIPVLTMIADWLAAKSSFQRKRADGNECDSISHNNAPRLGWQSWLGAFISIAGVALVAGISFSLSGSISGYVYMGGAALCWVAYSLLTRPLFDRKRSRLYIVFWQNFFGFLGLLPFAMLEYKNWGDPTLPVMLHVLFLALGCSALGYWLYAYAMEALGVSTTSVFINLIPVVTVIAGFIVLHERLTLLQGAGAALVLAGVYLTILPQRK

SEQ ID NO: 69135 - DNA, 2670 bp, Unknown
  Obtained from environmental sample
  misc_feature (1)..(2670): n is a, c, g, or t
atgctacaggctaccaggcttggattagtttcagcttactccatgctctacggggtgcataaaccagacaagcttcttgaccgttctgtttcttacgggattaaaacagtatcaatttgcgatctaaataacctctacggagtgcatgtctttatcgaggcggcgaaagagcgcaatataaagcctataatcggagcttccctctctgctgggaaaagcacaagggcgatggtacattgttttgtggaaaacagggcggggttcgcgcgcttatgtgaaatactcacggaacggaacaaagataaagagcgttttgatccattgccgtttttacgagaacaatctaaggggctggttctggcttcctcagacgaggcggttttggaaagcctgaacgggcggataaagcgcctgtacgcggcgatcacgcctacagacataagcgctgtaaaccctggtcgaaagctcaatatccccctcgcgtttatcgataattctttatttctggaaccgggggattttacggcccacaaggtgttacgcgctatcgcccttcttaaaacaataggcagcctgggacctgatgacaccgccaataaagaaagcattttgcgcccttcccaagaacttcgccgcatgcttgagtcatggccggaagctgtgaagggcacagaggaaatagcgtctatatgcacttacgacaatttattcagcggatggatttttccttcttacaatgccggagagatgtccagcgccgatgaattgcgaaggcgagtatacgatggcaacgccgaacggtacggcgagttgggggattatgagacagggcggataaattacgagttggatattattgaagaaaaggggttttcgtcctattttctgatcattgacgacatagtaagaatggcaaagcaagcttttggcaggcagcggacttgcggccgtggttcgggggcggcttccatcgtgtcttacgggctgggcattaccaatgtagacccgttgaggcataacctgtactttgagcggtttttgaacccctcccggcccgatccgccggatttggatattgattttgcctgggatgaaagggacgatttgattaaagccgttatcgataattttggcccggatcattgcgcgagggtagccaatcacaatatgttccggtacagatctgcgttacgcgaaaccgcgaaggctttcggcttcggcgacgcggaaatcacgcaaatggaacggcaaatacaaatgggcaataataaagaacaaataacaaatgacaaattgtggcaagaaatattcaggattgcgacgaaaatagaagggctgcccagaggcatgagcatgcattgcggtggcctggttattaccccggagccgattcgccgttacgcgccaatcgaaaagtcagccgaggggtatccgcttttggcgtgggagaaagagggggcggaagcggcggggtttgtaaaaatagaccttctgggaaacaggtctttagccgttatcagggacaccctaaagaaccttgaagaacagggcgtttacattgaccgcaatacctggcgtcccatagacgataaagaaacggtagaagcgctggcaaaaggcgacagcatgggggtgttctacattgaatcgcccgcaatgcggcaattgcaaaagaagacaaacgccggggactttgagcacatagtaatccattcaagcattatccgcccggccgccaacaagtttatttccgagtatgtaaggcgtcttaaaggcggcaaatgggaaccgctgcaccccaggcttgagaatatacttgacgagacttacggcattttatgctaccaggaagacgtgtcaaaaacggctgtcgcgctggcgggattcaacgaggcggacgccgataaactgcggaaggtaatagcaaaaaaaatgggcggtgttaagctggctgcgtatcaaaaccagttctacgacggctgccggaataacggagtaaacgacgagacaatacagaagatatgggaaatgatgctgtcttttgacggctatagtttctgcaagccccatagcgcaagctacgccatggtatccttccaatcggcttatctgcgcgtccaccatccggctgaattcatggcagcggtgttgtccaatcagggcggctattacaggccccatgcctatctcgccgaaagccgccgcatgaagctttttaccgtcgggcccgatattaacgcgtcccggtggaaatattacggtatttcagacaggaagggatttcaccagggcactttagtaatcggcttaatggcgataaagggcttgtccgcttccggagcgaatacaattatagaagaaagagacaaaagaggagaatataaaagccttgatgatttttcgcggaggatcaggctgaaccgcgatgacattaccgcgctctgcccttccggcgcgtttgacagcatagcaaacggcctttcgcggcctttacaggcccggcgattattatcaatgagaagcgagaaatcagaaagaaacaatggggagctattctcaaataataaatatcaaataataaataataaagaaggaataataaataacaaagataaaaaacctacaggcaaaaacgatttatgggaagaatacaagtcgttgggcttttaa

SEQ ID NO: 69136 - protein, 889 aa, Unknown
  Obtained from environmental sample
  DOMAIN (202)...(665): Bacterial DNA polymerase III alpha subunit
  misc_feature (1)..(889): Xaa is any amino acid
MLQATRLGLVSAYSMLYGVHKPDKLLDRSVSYGIKTVSICDLNNLYGVHVFIEAAKERNIKPIIGASLSAGKSTRAMVHCFVENRAGFARLCEILTERNKDKERFDPLPFLREQSKGLVLASSDEAVLESLNGRIKRLYAAITPTDISAVNPGRKLNIPLAFIDNSLFLEPGDFTAHKVLRAIALLKTIGSLGPDDTANKESILRPSQELRRMLESWPEAVKGTEEIASICTYDNLFSGWIFPSYNAGEMSSADELRRRVYDGNAERYGELGDYETGRINYELDIIEEKGFSSYFLIIDDIVRMAKQAFGRQRTCGRGSGAASIVSYGLGITNVDPLRHNLYFERFLNPSRPDPPDLDIDFAWDERDDLIKAVIDNFGPDHCARVANHNMFRYRSALRETAKAFGFGDAEITQMERQIQMGNNKEQITNDKLWQEIFRIATKIEGLPRGMSMHCGGLVITPEPIRRYAPIEKSAEGYPLLAWEKEGAEAAGFVKIDLLGNRSLAVIRDTLKNLEEQGVYIDRNTWRPIDDKETVEALAKGDSMGVFYIESPAMRQLQKKTNAGDFEHIVIHSSIIRPAANKFISEYVRRLKGGKWEPLHPRLENILDETYGILCYQEDVSKTAVALAGFNEADADKLRKVIAKKMGGVKLAAYQNQFYDGCRNNGVNDETIQKIWEMMLSFDGYSFCKPHSASYAMVSFQSAYLRVHHPAEFMAAVLSNQGGYYRPHAYLAESRRMKLFTVGPDINASRWKYYGISDRKGFHQGTLVIGLMAIKGLSASGANTIIEERDKRGEYKSLDDFSRRIRLNRDDITALCPSGAFDSIANGLSRPLQARRLLSMRSEKSERNNGELFSNNKYQIINNKEGIINNKDKKPTGKNDLWEEYKSLGF

SEQ ID NO: 69137 - DNA, 1506 bp, Unknown
  Obtained from environmental sample
  misc_feature (1)..(1506): n is a, c, g, or t
gtggtagaggatattcctttctatcaaaagcagttccgcgtagttttgcgtaactgcggtgttattaatcccgaaagtatagacgaatatatcgcgcgcgaaggctacagcggccttgaaaaagtgctttttgaatggacgcaggaaaaacttatcgaagaaatgaaaatttcgggtcttcgcggaagaggcggcgccggtttcccgacatggcttaaatgggatcttgcccgcaaggcacagggagacatcaagtacgttatctgcaacgccgatgaaggcgacccgggcgcgtacatggaccgttccacgatagaaggcgaccctcattcggttatagagggaatgattaccgccggaaaagcaatcggttcgaatcaaggttttgtgtatatccgggcggaatacccgcttgccatcgaaaggttaaaaatcgcccttaaacaggcgcaggaatacggccttttaggaaaaaacatacttggctccggttttgattttgatattgaaatccgccttggcgcgggcgcatttgtatgcggcgaagaaactgcgctcattaaatctgtagaaggtaaccggggaatgccggttccaaagccgccgttcccggcgaacaaaggcttgtggcaaaggccgacaatcatcaacaacgttgaaacctttgccaatgtgccggttattaccaacaaaggcggcgcgtggctcgctaaattaggcacggaaaaatccaaaggaacaaaagtattcgctcttacaggaaaaattaaaagctccggccttgttgaagttcctatgggcactacgttacgcgacatagtattcggcataggcggcggcattaaagacggcaagaaattcaaaggagtgcagacaggcggaccgtccggcggtattcttacggaaaaatcacttgatttgccgattgactttgaaacattagcagcaaacggctcgatgatgggttcaggcggcatgatcgtcatggacgaagatgactgtgtagttgacgtgtcgcgtttctacatggaattctgcgttgatgaaagctgcgggaaatgttccccttgtcggattggcactactcaaatccttaaaattctggaaaaaattgcggaaggcaagggtgaagaagaagaccttaaaaaactagatgacataggaactgcgatgacccgcgcatctctttgtatgctcggctgtactgcggcaaacccgacattatccacgctcaggaatttccgtgaagaatatatggagcatattcatgaaaaaaaatgccgctccggaaaatgcaaaaaacttgtcagttttaaaattgacgccgctaaatgtatcggctgcggtgcgtgcgctaaaaaatgccccggtaactgcattgccgcggaagaagcggcgaaatatcccgacaagaaacggcctccgtatattatcaatcaggctgattgtttgaagtgcggtgaatgtatgaatacctgtaaattcggcgcaatacttaagagttag

SEQ ID NO: 69138 - protein, 501 aa, Unknown
  Obtained from environmental sample
  DOMAIN (476)...(499): 4Fe-4S binding domain
  misc_feature (1)..(501): Xaa is any amino acid
MVEDIPFYQKQFRVVLRNCGVINPESIDEYIAREGYSGLEKVLFEWTQEKLIEEMKISGLRGRGGAGFPTWLKWDLARKAQGDIKYVICNADEGDPGAYMDRSTIEGDPHSVIEGMITAGKAIGSNQGFVYIRAEYPLAIERLKIALKQAQEYGLLGKNILGSGFDFDIEIRLGAGAFVCGEETALIKSVEGNRGMPVPKPPFPANKGLWQRPTIINNVETFANVPVITNKGGAWLAKLGTEKSKGTKVFALTGKIKSSGLVEVPMGTTLRDIVFGIGGGIKDGKKFKGVQTGGPSGGILTEKSLDLPIDFETLAANGSMMGSGGMIVMDEDDCVVDVSRFYMEFCVDESCGKCSPCRIGTTQILKILEKIAEGKGEEEDLKKLDDIGTAMTRASLCMLGCTAANPTLSTLRNFREEYMEHIHEKKCRSGKCKKLVSFKIDAAKCIGCGACAKKCPGNCIAAEEAAKYPDKKRPPYIINQADCLKCGECMNTCKFGAILKS

SEQ ID NO: 69139 - DNA, 1752 bp, Unknown
  Obtained from environmental sample
  misc_feature (1)..(1752): n is a, c, g, or t
atggtaaacataacaataaacggaaaagcattggaagttgagccgggaacgacgattcttgatgccgcaaaaaaagtgaatattaaaattcctactctttgttacagccccgatcttactccctgggcgtcctgcggtatttgtattgtaagaatggcgggttccccaaagatggtgcgtgcgtgtacgacagcctgcgaagacaaaatgaacattattacgcatgatccggaaattatcgccgtaaggcgcacagtgttggaattaatactttccaaccaccccaacgactgtctccagtgtccgcgtaaccagtcatgcgagcttcaggagttggcttcggagtttggaataagggaagcgccgttcaagaaagttgccaacgatattcccattgatgattccaaccccgcgattgtcctttgtcctgaaaaatgtattcgctgcggcagatgcgtaaaagtctgtcaggaagtgcagaatgtctgggcgctggaatttctgggacgcggcataaacggaaaaatcgcaagcgctgcggacgctccgttaggcgaaagcccttgtatcaagtgcggacagtgcgctgcgcattgccctgtgggcgccatttatgaaagagatgatactgtaaaagtctggagcgccctgcagaatccggaattgcattccgtggtgcagattgccccggccgtccgcgtcgcaatagccgaagaattcggccttccgcccgggacagtgttcaccaaaaaaatctacgctgccctgcgccgcttgggatttaagacagtctttgacacaaacttctcggcagaccttactattatggaagaaggctcagaacttgttaaacgcctcggtgaaaagggaagccccattccgttgatcacttcctgctgtcccgcatgggtagattacatggaaaaatattataccgatatgattcccaacttttcaaccgcaaagtcaccccagcagatgatgggcgcgatgatcaaagcctactgggcggataaagcgggaataagccccgacaaggtatactctgtttccgtaatgccatgtactgcgaaaaagtgggaaatcaaacgcaatgacgacatgaaaagcgcgggccacggttacgacgtagacattgtaattacgtcgagggaacttgcacgtatgataaaacaagccggtattgaaattgataaacttcccgatgaagaagcggacagtcctcttgggccgtacacgggcgcgggaacaattttcggcgcaacaggcggcgtaatggaagccgctgttcgcagcgcttactatcttgtaactaaaaaagaactgcctgatattaactttaaaccggcgcgcggtcttgaaggcgtaaaggaaggagaggttgactttggtaacgggacaaaaatccgcatcgctgtagctcaccaaatgggtaacattgccgccgtactggataaaattcgcgcggcgcgggatgagggaaaagagccgccctatcactttgtcgaagtaatggcgtgccgcggcggctgtattgccggcggcggccaaccttacggcgctaccgatgaaatccgccagcagcgcattaagggactgtacaacgatgatgaaaaatcacagtatcgctgttcgcaccagaacccgtgcataacccaggtttacaaggaattcctcggagaacccggaggacacaaggcgcatgaattgctccacacaaaatatgtggagaggcctttatatattaagtag

SEQ ID NO: 69140 - protein, 583 aa, Unknown
  Obtained from environmental sample
  DOMAIN (182)...(205): 4Fe-4S binding domain
  misc_feature (1)..(583): Xaa is any amino acid
MVNITINGKALEVEPGTTILDAAKKVNIKIPTLCYSPDLTPWASCGICIVRMAGSPKMVRACTTACEDKMNIITHDPEIIAVRRTVLELILSNHPNDCLQCPRNQSCELQELASEFGIREAPFKKVANDIPIDDSNPAIVLCPEKCIRCGRCVKVCQEVQNVWALEFLGRGINGKIASAADAPLGESPCIKCGQCAAHCPVGAIYERDDTVKVWSALQNPELHSVVQIAPAVRVAIAEEFGLPPGTVFTKKIYAALRRLGFKTVFDTNFSADLTIMEEGSELVKRLGEKGSPIPLITSCCPAWVDYMEKYYTDMIPNFSTAKSPQQMMGAMIKAYWADKAGISPDKVYSVSVMPCTAKKWEIKRNDDMKSAGHGYDVDIVITSRELARMIKQAGIEIDKLPDEEADSPLGPYTGAGTIFGATGGVMEAAVRSAYYLVTKKELPDINFKPARGLEGVKEGEVDFGNGTKIRIAVAHQMGNIAAVLDKIRAARDEGKEPPYHFVEVMACRGGCIAGGGQPYGATDEIRQQRIKGLYNDDEKSQYRCSHQNPCITQVYKEFLGEPGGHKAHELLHTKYVERPLYIK

SEQ ID NO: 69141 - DNA, 396 bp, Unknown
  Obtained from environmental sample
  misc_feature (1)..(396): n is a, c, g, or t
atggaaaagttatttaggttacaggaaaaaggcaccacataccagcgggagattgtagcaggtatcacaacgtttttgaccatggcctatattcttgcggttaatccgggaatgttgggagtgattggcggcggaatgacgccggaagcggtttttaccgctacggtaattgcttccgctattgctacaatggttatggcttttgcggccaatctgcctgtagctcttgcgccaggaatgggattaaacgctttttttacctataccgtatgtatgagaatgggttattcctggaagatagcccttaccgcagtgtttcttgaaggtattttatttataattctgtcgctgttgaatgtacgcgaagcgatcataaaagcaatccctgcaaattaa

SEQ ID NO: 69142 - protein, 131 aa, Unknown
  Obtained from environmental sample
  misc_feature (1)..(131): Xaa is any amino acid
MEKLFRLQEKGTTYQREIVAGITTFLTMAYILAVNPGMLGVIGGGMTPEAVFTATVIASAIATMVMAFAANLPVALAPGMGLNAFFTYTVCMRMGYSWKIALTAVFLEGILFIILSLLNVREAIIKAIPAN

SEQ ID NO: 69143 - DNA, 897 bp, Unknown
  Obtained from environmental sample
  misc_feature (1)..(897): n is a, c, g, or t
gtggctgtcggtataggtctatttatcgcccttatcggttttgcgaatgcgggcattgtcataggcgggcagggaacagtattgtcatttacagatataacttccggcgaacctcttttggcgtttattggtttaattattattatgattctttacgtcctgaagattcccggctccatacttataggaattattgccactgcgattataggtattccgatgggaataactgttattggtgaagggtggagtccgtttagtttaccggcagctcccctgttttttaaatttgatttttctccgggaacaattttttctcttaaattttttacggttttctttactttcctgtttgtggatatatttgatactatcggaacactggtgggagttacaacacaggcaaaacttattgataaagaaggaaatattccgtgtgtaaaacaggctcttctagccgacgctgtgggaacagtcgccggagccgcattgggtacttctactgttacgagttatattgaaagttccgccggtgtcgcagccggagggcgtacaggtcttaccagcctgaccacatctgtattgttcctgcttgcgcttttcctttcaccgttattcctgcttattcccggcgcggctaccgctccggcgctgattttagtcggctttttgatgatgcagcctgtactctcaattgactttaccgatccgaccgaaggtattccggcattccttgcgattgttatgatgccttttgcgtacagtattgcggacggcattgtatacggaattatttcctatgtaattctaaaggctgttacccgcaagttcaacgatattaccgtaattacatgggtgctttttgcggtatttgttcttagattttttataaaataa

SEQ ID NO: 69144 - protein, 298 aa, Unknown
  Obtained from environmental sample
  SIGNAL (1)...(17)
  DOMAIN (1)...(262): Permease family
  misc_feature (1)..(298): Xaa is any amino acid
MAVGIGLFIALIGFANAGIVIGGQGTVLSFTDITSGEPLLAFIGLIIIMILYVLKIPGSILIGIIATAIIGIPMGITVIGEGWSPFSLPAAPLFFKFDFSPGTIFSLKFFTVFFTFLFVDIFDTIGTLVGVTTQAKLIDKEGNIPCVKQALLADAVGTVAGAALGTSTVTSYIESSAGVAAGGRTGLTSLTTSVLFLLALFLSPLFLLIPGAATAPALILVGFLMMQPVLSIDFTDPTEGIPAFLAIVMMPFAYSIADGIVYGIISYVILKAVTRKFNDITVITWVLFAVFVLRFFIK

SEQ ID NO: 69145 - DNA, 306 bp, Unknown
  Obtained from environmental sample
  misc_feature (1)..(306): n is a, c, g, or t
atgatcagatcggccgaggctggggctgttatgagcgagctggctgctgctggcttccctgccatcacaaaatttgacgtgtttgggcgcggcaaacaaaaaggcattaccgttggcaatgttcactacgacgagattccaaaagaaatgctcgttatagtatgcaacgatgaagataaggacgatcttgtgaaaatcatcgttcgcgtggcaagaacaggcgaaggtaactacggtgatgggcgtatttttgtttcccctgtggaatctgcctacactatcagctccggcaagcccgggttgtag

SEQ ID NO: 69146 - protein, 101 aa, Unknown
  Obtained from environmental sample
  DOMAIN (1)...(97): Nitrogen regulatory protein P-II
  misc_feature (1)..(101): Xaa is any amino acid
MIRSAEAGAVMSELAAAGFPAITKFDVFGRGKQKGITVGNVHYDEIPKEMLVIVCNDEDKDDLVKIIVRVARTGEGNYGDGRIFVSPVESAYTISSGKPGL

SEQ ID NO: 69147 - DNA, 402 bp, Unknown
  Obtained from environmental sample
  misc_feature (1)..(402): n is a, c, g, or t
atgcgggaaattatgtgttttataaggcccaacaaggtcaatgaaactaaaaaggcattagcagaaaacggcttccccgcttttacctgccgtgtatgccttgggcgtggcaaaaaaagcattgacccagaactgcttaaaacagttcttgcagcgggcgaattgccgctttctccaattggggaaaaccttaccgaggctactcggctagttgccaaacgcttttttacgctgatcattgacgataaagatgttgataaagcggttaaagtaataataggtgccaaccaaacaggcaaccccggagacggcagaatttttgttttgcctatccttgaaacttattctgttaggactggcgaaggcggtttacacattgcaccagaaggaggcgcatcatga

SEQ ID NO: 69148 - protein, 133 aa, Unknown
  Obtained from environmental sample
  DOMAIN (4)...(120): Nitrogen regulatory protein P-II
  misc_feature (1)..(133): Xaa is any amino acid
MREIMCFIRPNKVNETKKALAENGFPAFTCRVCLGRGKKSIDPELLKTVLAAGELPLSPIGENLTEATRLVAKRFFTLIIDDKDVDKAVKVIIGANQTGNPGDGRIFVLPILETYSVRTGEGGLHIAPEGGAS

SEQ ID NO: 69149 - DNA, 1602 bp, Unknown
  Obtained from environmental sample
  misc_feature (1)..(1602): n is a, c, g, or t
atgacaaacagcagagaanagttgctcgaaaagtattccgctaagatctataaaaaccgtaaagatcaccttttgcagcttgccgaaggcgataaaaacgttgctattgccgcaaacactcgcgccattccgggagtgatgactgcacgcggttgttgctatgccggttgcaaaggcgttgtggttggtccgctgaaagacgtgttagttatcactcacggtcctattggctgcggcttttatagctggggcacaagaagaaacaaagcaaaacccgatgaaaatacagataaaaactttatcccatactgcttttccacagatatgcaggaatccaatattgtgttcggcggcgagaaaaagctggaacaagccattgaagaagctatggcactgttcagcccaaagtgcattatgatatgctccacttgccccataggtcttatcggcgatgatgtacaagctgtggcaaggcgaaccgaagccaaatacggcatagccgctattggttattcgtgcgaaggctacaaaggcgtttcgcagtctggcggtcaccatatagctaacaacgggcttatgcgctatgttataggcacaggcgataaaaaaccaaaaacaaaattttccgtcaatgtccttggcgaatacaacataggcggcgatggttgggaagaggaacgcattttcaaacgctgcggcattgaagtgctgaacctgtttaccggcgatgcttcttatgaagggcttaaaagtgcgcatttagcccatttgaatttggtgatgtgccaccgttccataaactacatagccgaaatgatgaaaaccaaatacggcatagattggatcaaagtgaattttatcggtgttgaggcaacgtgtaaatctctgcgagatattgcaaaatatttcaacgatgccgaactcacaaaaagagttgaagaagtgatagccgatgaagtcggggccattaaaagtgatatggaacattataaatccaagttgaatggcaaaactgctggtattttctccggtggttctcgttctcatcactatcaggttcttttggaagaactcggcatgaaaaccataattgctggttatgaattcgctcatcgcgatgattacgaagggcgagacataattccgcaaatcaaagaagatgccgacaacaaaaacattgaaagcatagtcgttgcaaaagacgaaaagttctatagagaaacttacaccgaagaaaaaattgccgccttaaaaagcggaggcattgagttagacacctacggtggcatgattcccgaaatggatgcagaatctgttgttgttgatgactacaaccactttgaaactgatgaacttatcaaagctatgaaacccgatattttcctgtctggcatcaaagacaaatattccatacaaaaagctggcacagcttctaggcaaattcattcctacgattactcaggtccgtattcgggttttcgcggtgcagtgacttttgggagagatgttgctatggctatatttaccaatgcttggcccttggttactccgccctggaaaaacaaacctatgcttatgggaaaattgaaggaggcaggataa

SEQ ID NO: 69150 - protein, 533 aa, Unknown
  Obtained from environmental sample
  DOMAIN (44)...(509): Nitrogenase component 1 type Oxidoreductase
  misc_feature (1)..(533): Xaa is any amino acid
MTNSREXLLEKYSAKIYKNRKDHLLQLAEGDKNVAIAANTRAIPGVMTARGCCYAGCKGVVVGPLKDVLVITHGPIGCGFYSWGTRRNKAKPDENTDKNFIPYCFSTDMQESNIVFGGEKKLEQAIEEAMALFSPKCIMICSTCPIGLIGDDVQAVARRTEAKYGIAAIGYSCEGYKGVSQSGGHHIANNGLMRYVIGTGDKKPKTKFSVNVLGEYNIGGDGWEEERIFKRCGIEVLNLFTGDASYEGLKSAHLAHLNLVMCHRSINYIAEMMKTKYGIDWIKVNFIGVEATCKSLRDIAKYFNDAELTKRVEEVIADEVGAIKSDMEHYKSKLNGKTAGIFSGGSRSHHYQVLLEELGMKTIIAGYEFAHRDDYEGRDIIPQIKEDADNKNIESIVVAKDEKFYRETYTEEKIAALKSGGIELDTYGGMIPEMDAESVVVDDYNHFETDELIKAMKPDIFLSGIKDKYSIQKAGTASRQIHSYDYSGPYSGFRGAVTFGRDVAMAIFTNAWPLVTPPWKNKPMLMGKLKEAG

SEQ ID NO: 69151 - DNA, 672 bp, Unknown
  Obtained from environmental sample
  misc_feature (1)..(672): n is a, c, g, or t
atgctagacttaactcctaaagaagtaaaagaacgcagtgctttgcgaataaatccctgcaaaacttgccaacctgttggcgcaatgtatgcggctttgggtgtggcaaaatgcatgccgcacagccacggctctcaaggttgctgttcttaccacagaatggtgttgtctcgccacttcaaagaacctgctgttgcatcttcgtcttcctttaccgaaggtgcctctgtattcggtggcaaagccaatatcactacagcggtgaaaaatatctttgaaatgtataatccagatattatcgctgtgcataccacctgcctctcggagaccatcggcgacgacttgtcgtcgttcatcatggacgttggagttgccggacggcaaactcgtcgtgcatacaaacacgccgagctatgtcgggtcgcacataaacggattcttcaacatgatgatcggcttcatgaactacttgacaaagaagacgggaacgcccaccggcaaaacggcggtcttccccggatgggtgaaccccggcgacatacgcgaactcaagcgcatagccgccatgatgaacgtccccgcggtcttcttccccgatcagagcggcgtcttacacgcgcccatgaccggcaggtacgagttctaccccgaaggcggcacgacgctcgatga

SEQ ID NO: 69152 - protein, 223 aa, Unknown
  Obtained from environmental sample
  DOMAIN (15)...(223): Nitrogenase component 1 type Oxidoreductase
  misc_feature (1)..(223): Xaa is any amino acid
MLDLTPKEVKERSALRINPCKTCQPVGAMYAALGVAKCMPHSHGSQGCCSYHRMVLSRHFKEPAVASSSSFTEGASVFGGKANITTAVKNIFEMYNPDIIAVHTTCLSETIGDDLSSFIMDVGVAGRQTRRAYKHAELCRVAHKRILQHDDRLHELLDKEDGNAHRQNGGLPRMGEPRRHTRTQAHSRHDERPRGLLPRSERRLTRAHDRQVRVLPRRRHDAR

SEQ ID NO: 69153 - DNA, 396 bp, Unknown
  Obtained from environmental sample
  misc_feature (1)..(396): n is a, c, g, or t
gtgtttgtatgcacgacgagtttgccgtccggcaactccaacgtccatgatgaacgacgacaagtcgtcgccgatggtctccgagaggcaggtggtatgcacagcgataatatctggattatacatttcaaagatatttttcaccgctgtagtgatattggctttgccaccgaatacagaggcaccttcggtaaaggaagacgaagatgcaacagcaggttctttgaagtggcgagacaacaccattctgtggtaagaacagcaaccttgagagccgtggctgtgcggcatgcattttgccacacccaaagccgcatacattgcgccaacaggttggcaagttttgcagggatttattcgcaaagcactgcgttcttttacttctttaggagttaa

SEQ ID NO: 69154 - protein, 131 aa, Unknown
  Obtained from environmental sample
  misc_feature (1)..(131): Xaa is any amino acid
MFVCTTSLPSGNSNVHDERRQVVADGLREAGGMHSDNIWIIHFKDIFHRCSDIGFATEYRGTFGKGRRRCNSRFFEVARQHHSVVRTATLRAVAVRHAFCHTQSRIHCANRLASFAGIYSQSTAFFYFFRS

SEQ ID NO: 69155 - DNA, 858 bp, Unknown
  Obtained from environmental sample
  misc_feature (1)..(858): n is a, c, g, or t
ttgaaatgtataatccagatattatcgctgtgcataccacctgcctctcggagaccatcggcgacgacttgtcgtcgttcatcatggacgttggagttgccggacggcaaactcgtcgtgcatacaaacacgccgagctatgtcgggtcgcacataaacggattcttcaacatgatgatcggcttcatgaactacttgacaaagaagacgggaacgcccaccggcaaaacggcggtcttccccggatgggtgaaccccggcgacatacgcgaactcaagcgcatagccgccatgatgaacgtccccgcggtcttcttccccgatcagagcggcgtcttacacgcgcccatgaccggcaggtacgagttctaccccgaaggcggcacgacgctcgatgaaatccgtaccctcggcgacagcgacggccttatcgcgctcggggagatcatcggggttgaacccgccgagtcgctcaacaagaagtgcaaagtaccgtacacgctgctgccgctgcccgtgggcgtcgcttatacagaccaatacgtgctggcgttgcgtaagcagtcgcacaccgaactccccgccgcgcttgaggaagagcgcggtaggctcgtctacctgatgctcgactcctcccaatatacaagcgggaaaaaggtcgcgatattcggcgacccggatatcgtcataggcctcacgtcgctcgcgcttgaatgggcatggttcccaagtacgtcattaccgggacgcccaaagaggagtttacccgcaaagtcacggaactcttcgagaagtacggcgcaacggactgcaaggccaaagcgagcgccgacctcttcgagctgcaccagtggataa

SEQ ID NO: 69156 - protein, 285 aa, Unknown
  Obtained from environmental sample
  DOMAIN (1)...(281): Nitrogenase component 1 type Oxidoreductase
  misc_feature (1)..(285): Xaa is any amino acid
MKCIIQILSLCIPPASRRPSATTCRRSSWTLELPDGKLVVHTNTPSYVGSHINGFFNMMIGFMNYLTKKTGTPTGKTAVFPGWVNPGDIRELKRIAAMMNVPAVFFPDQSGVLHAPMTGRYEFYPEGGTTLDEIRTLGDSDGLIALGEIIGVEPAESLNKKCKVPYTLLPLPVGVAYTDQYVLALRKQSHTELPAALEEERGRLVYLMLDSSQYTSGKKVAIFGDPDIVIGLTSLALEWAWFPSTSLPGRPKRSLPAKSRNSSRSTAQRTARPKRAPTSSSCTSG

SEQ ID NO: 69157 - DNA, 378 bp, Unknown
  Obtained from environmental sample
  misc_feature (1)..(378): n is a, c, g, or t
atgggcatggttcccaagtacgtcattaccgggacgcccaaagaggagtttacccgcaaagtcacggaactcttcgagaagtacggcgcaacggactgcaaggccaaagcgagcgccgacctcttcgagctgcaccagtggataaagaacgagccggtcgatttgctgataggctcaacctacggcaagcagatagcgcgcgccgaagacatccccttcatccgcgccggtttcccggtactcgacagatacggcggcccgttgctgccggtagtcggttacaatggaggcgttttgttagtagagaaaatcgtaggcgctttgttggacaagttcgataggacttgtgcggaagaagattttgagattgtgttgtag

SEQ ID NO: 69158 - protein, 125 aa, Unknown
  Obtained from environmental sample
  misc_feature (1)..(125): Xaa is any amino acid
MGMVPKYVITGTPKEEFTRKVTELFEKYGATDCKAKASADLFELHQWIKNEPVDLLIGSTYGKQIARAEDIPFIRAGFPVLDRYGGPLLPVVGYNGGVLLVEKIVGALLDKFDRTCAEEDFEIVL

SEQ ID NO: 69159 - DNA, 1071 bp, Unknown
  Obtained from environmental sample
  misc_feature (1)..(1071): n is a, c, g, or t
atgaataaaaagaaaattctaattaacggagattttctctgccgcaggcttacaggtattgaacgttacgcttatgaaattacccgccgcttggacaatctttgcgaaaaaaatgaaattgccgttgtaattccgtctcatgttgaaaatataccggcttataaaaaccttgaaattataagactggaaaaaaaaagtaaatcaaacattctctggcaaatgcttactttgcagggatttttgctgacgcacaagaaatatacgattcttgaatttggcagcgccaccatgcccttcactcccggtattgtttctttgcctgacattcactgcgaattttttccggaagactttgtcatccgcagagataaatttacgagattttacagcagacttcaatatcgtcttattgcgcatcatgcaaaaaaaattgcaactgtttctgaatacagtaaaaacgaaatctgtaaaacatttaaaattgatccttcaagaataaatgttatttacagcagcgcggatcatattcgtgatattgtttctgactcatctatatttgaacaatttccaatgcttgccaaagaaccgttttttttctctcttggaagtctttcaaaacgtaaaaacatcaaatggattcttgagtatgcaaaaaaacatcctgaatcgacttttgcaatttccgggacaagcctttcaacggtaaaagtaaatgaactggacgatgagattccaaaaaacattatcatgttgggttatcttgacgacggtaaagtaaaagccctaatgactaaatgcaaagcgtttattttgccttcctattatgaaggcttcggacttactccgcttgaagctctgtcctgcggcgcgcagataatagttgcaaaggcggctagtcttcctgaaatctacggaaaaaccgcgcactatatagacccatacagtatcgacattgatcttgacattctgcttaacgaacctgttgaaaaaccggacgcgattcttactaaatattcttatgatatttccgctgaaaaagtatataatctgataaaggaatttacgcgatga

SEQ ID NO: 69160 - protein, 356 aa, Unknown
  Obtained from environmental sample
  DOMAIN (182)...(342): Glycosyl transferases group 1
  misc_feature (1)..(356): Xaa is any amino acid
MNKKKILINGDFLCRRLTGIERYAYEITRRLDNLCEKNEIAVVIPSHVENIPAYKNLEIIRLEKKSKSNILWQMLTLQGFLLTHKKYTILEFGSATMPFTPGIVSLPDIHCEFFPEDFVIRRDKFTRFYSRLQYRLIAHHAKKIATVSEYSKNEICKTFKIDPSRINVIYSSADHIRDIVSDSSIFEQFPMLAKEPFFFSLGSLSKRKNIKWILEYAKKHPESTFAISGTSLSTVKVNELDDEIPKNIIMLGYLDDGKVKALMTKCKAFILPSYYEGFGLTPLEALSCGAQIIVAKAASLPEIYGKTAHYIDPYSIDIDLDILLNEPVEKPDAILTKYSYDISAEKVYNLIKEFTR

SEQ ID NO: 69161 - DNA, 894 bp, Unknown
  Obtained from environmental sample
  misc_feature (1)..(894): n is a, c, g, or t
atgaccaaaaacacaaagaccgtatatcttggcatgcgcggtgatattattcaccccggcataattaacattatccgccagggcgccatactcggcgaattaacggttggacttttaactgacgccgctatcgcgtcgcataaacgcctgccctatttaacatatgaacagagaaaagacgttattgaaaatgtaaaaggagtttcgcatgtaatcccacaggaagattggagttatgtgcctaacttgcgaaagctaaagcccgactatatcattcacggagacgattggaaaagcggtcctttgcaaaaagagcgcgacgaagtttttgcggtaatgaaagaactaggcggcgaggttatcgagattccctataccgcgggaattaattcatcttcaattaatgaggcgattcgttctgtaggaacaacgccggacattcgcttaaaaactctgcgcagacttcttgatacaaagcagatagtaagaattatggaagcgcattcaggtttgtccggtttaataatagagaatcttgaaattgaaaaagaagacggcttgcacagttttgacggaatgtggtcttcaagtttaacggactcaacaagcaagggaaaacccgatattgaagcggttgatcttactacacgtctgcacgatttaaccaatattctggaatgtacgacgaagccgataatttttgacggcgacacaggcggtcatcatttgtcttttaccgttaaaacccttgaacggaacggaatatcggcagtcattatagaagataaaaccggtcttaaaagaaattcactttttggaactgatgttaatcaggagttatgcccaattcacgacttctgtgaaagatcaaagccggcaaaaaggcgcaggtaa

SEQ ID NO: 69162 - protein, 297 aa, Unknown
  Obtained from environmental sample
  DOMAIN (9)...(137): Cytidylyltransferase
  misc_feature (1)..(297): Xaa is any amino acid
MTKNTKTVYLGMRGDIIHPGIINIIRQGAILGELTVGLLTDAAIASHKRLPYLTYEQRKDVIENVKGVSHVIPQEDWSYVPNLRKLKPDYIIHGDDWKSGPLQKERDEVFAVMKELGGEVIEIPYTAGINSSSINEAIRSVGTTPDIRLKTLRRLLDTKQIVRIMEAHSGLSGLIIENLEIEKEDGLHSFDGMWSSSLTDSTSKGKPDIEAVDLTTRLHDLTNILECTTKPIIFDGDTGGHHLSFTVKTLERNGISAVIIEDKTGLKRNSLFGTDVNQELCPIHDFCERSKPAKRRR

SEQ ID NO: 69163 - DNA, 399 bp, Unknown
  Obtained from environmental sample
  misc_feature (1)..(399): n is a, c, g, or t
atgattatcgcccgtcttgaaagcttaattgcgggtttccctgtatctcacgcgcttgaaagagcgcgggcctttgtcgaagctggcgctgacggcgttatgatacacagcaaggaaaaaacaggcgatgatattaaagaattttgctctcttttccgcgccgaatatccgcatgtgccgattattcttgttcctacaacatataataagtttacagaaaaagaacttgcctcatggggcgcgaatatcgttatctacgcaaaccatatgctccgttcagcgtatcccgcaatggtcaataccgcaaaaatgattttacaaaacgaacgttctcttgaagcggattcggtttgtatgccgataaaagaaatacttgaattgattccgggcggtaaataa

SEQ ID NO: 69164 - protein, 132 aa, Unknown
  Obtained from environmental sample
  misc_feature (1)..(132): Xaa is any amino acid
MIIARLESLIAGFPVSHALERARAFVEAGADGVMIHSKEKTGDDIKEFCSLFRAEYPHVPIILVPTTYNKFTEKELASWGANIVIYANHMLRSAYPAMVNTAKMILQNERSLEADSVCMPIKEILELIPGGK

SEQ ID NO: 69165 - DNA, 375 bp, Unknown
  Obtained from environmental sample
  misc_feature (1)..(375): n is a, c, g, or t
ttgatagaagcggcttatttttacaacaaactcgttgaaaagggagtcggttttttttcaggcgttcccgactcgctccttaaagatttttgcgcgtatattaccgatcatgctgataagcataatcatattatcgcggtaaacgaaggagccgccgtcgccctggcttgcgggtaccatcttgccacaggacggcttccgctggtgtatatgcaaaattcaggtataggaaatgcggtaaaccccctcctctcgcttgcggataacgatgtttaccgtatacctttagcgcttgtcataggctggcgcggagagcccggcgtacatgatgagcctcagcatgtcaaacagggtaagttacccgcgcgctgctga

SEQ ID NO: 69166 - protein, 124 aa, Unknown
  Obtained from environmental sample
  misc_feature (1)..(124): Xaa is any amino acid
MIEAAYFYNKLVEKGVGFFSGVPDSLLKDFCAYITDHADKHNHIIAVNEGAAVALACGYHLATGRLPLVYMQNSGIGNAVNPLLSLADNDVYRIPLALVIGWRGEPGVHDEPQHVKQGKLPARC

SEQ ID NO: 69167 - DNA, 789 bp, Unknown
  Obtained from environmental sample
  misc_feature (1)..(789): n is a, c, g, or t
atgatgagcctcagcatgtcaaacagggtaagttacccgcgcgctgctgaaagcatgggcatcccatacgcggtactggaaaaaaacgaggatgatgtaaacagccagattgaaacttgttttaagacaattgcgggaacaaacgctccatacgctcttgttatacgaaaagacacattcgcgccctatacccttcagaaaaaagaagaacatggcgcgataatgacgcgcgaagagacaatcgaagagattgcccttgcccgcggcggaattatagtttccactacgggaatgatttcgcgcgaattgtacgagttacgcgataaagcaggcgcgggccatgaacgcgattttcttaccgtaggctctatgggccacgcgtcttccatcgccctgtcaatagcccttcaaaagccggaattgcaggttacctgccttgacggagacggcgcgtcgcttatgcacatgggttcttttgccgcaatcgggacgcaaaaaccgcgtaactattgccacattgtcctaaataacggggctcatgattctgtcggcggccagccaacgattgcgccttttattgatatgccggcaatagcgcgcgcctgcggctatacaaaagtttatctggtaaaaacaaaagaagaattaaaaaaaattttagcagaaaaacacgaaggccttgcctttattgaggtaaaggtaaagaagggttcccgtaaagatttggggcgcccaaaaacaacgccgacagaaaacaaagaggcgtttatgaaattccttgagggatag

SEQ ID NO: 69168 - protein, 262 aa, Unknown
  Obtained from environmental sample
  DOMAIN (95)...(232): Thiamine pyrophosphate enzyme, C-terminal TPP binding domain
  misc_feature (1)..(262): Xaa is any amino acid
MMSLSMSNRVSYPRAAESMGIPYAVLEKNEDDVNSQIETCFKTIAGTNAPYALVIRKDTFAPYTLQKKEEHGAIMTREETIEEIALARGGIIVSTTGMISRELYELRDKAGAGHERDFLTVGSMGHASSIALSIALQKPELQVTCLDGDGASLMHMGSFAAIGTQKPRNYCHIVLNNGAHDSVGGQPTIAPFIDMPAIARACGYTKVYLVKTKEELKKILAEKHEGLAFIEVKVKKGSRKDLGRPKTTPTENKEAFMKFLEG

SEQ ID NO: 69169 - DNA, 759 bp, Unknown
  Obtained from environmental sample
  misc_feature (1)..(759): n is a, c, g, or t
atggcttcgcaagaaagacatccgcaagctgatgagagctttggaagcgatgggcgcgagcacgccggaacagtacaaaaatcaacctttaaccggcgaaccaatcgcctaggagacacaatggcaaaaacagacaaagacggatgctggctggacgcgagaggcaaagctacgcccgttgaatacataaacaggctcgacattgagaaagaggagcttgtggaaggcaaaatccacaaagccatcaagctgagcaagcagcttatggaattcaagcaggagtgcaccgctggcatagacacctacttgaagagcatggcaaaggcgaacaaggtcagggagaactggaagggaaacatagccctgagaagctttgacgaaagcatggtcatagaacgctcaatgagcgaccggatagagttcagcgagggcttgcagcttgcgaaagcgcagatagatgtgtggctcaaaaaccgccttgggtccctcgacctgaatttatcaaaaatcgtttcgcaggctttcaacgttgacaaacgcggacggataaacaccgcaatggtgctcaaactgatgcagcttgaaattgacgaaccggaatggaaaaaggcgatgtccatacttaaagaaagcatatcagttgcaagcactaaaatgtatataaggttcaaagtcaagaaagacggcgagggcggcgaaagctgggaaaacatatcgcttgatttcgcaaacgcgggagattccgatgccaaaaattga

SEQ ID NO: 69170 - protein, 252 aa, Unknown
  Obtained from environmental sample
  misc_feature (1)..(252): Xaa is any amino acid
MASQERHPQADESFGSDGREHAGTVQKSTFNRRTNRLGDTMAKTDKDGCWLDARGKATPVEYINRLDIEKEELVEGKIHKAIKLSKQLMEFKQECTAGIDTYLKSMAKANKVRENWKGNIALRSFDESMVIERSMSDRIEFSEGLQLAKAQIDVWLKNRLGSLDLNLSKIVSQAFNVDKRGRINTAMVLKLMQLEIDEPEWKKAMSILKESISVASTKMYIRFKVKKDGEGGESWENISLDFANAGDSDAKN

SEQ ID NO: 69171 - DNA, 546 bp, Unknown
  Obtained from environmental sample
  misc_feature (1)..(546): n is a, c, g, or t
gtgcaaactatccgccgagataatgctcaatggcaacgcgccaaagctgaccagggagatactggaaagcgcgaggagcctgtcaagatgaaagcatacagccagagttcgcgcatccacgccctggcggcagttctgggtatgggcgacacgcaatacagggatatgctgcacgacctctacggcaagcggtcaagcaaggaactgacccctgtccagcaaacagagcttatgaaaatactcggcaaacaggtgggggcagcaaacagcaagcggaacgaatttaaaagccgccatcccgcttgggcaacgaataggcagcttcacgccatagaagcgatgtggaaaaaagtgagccgtgccgagactgacgaaagcagaaaactggctttgctcgctttctgcaagcgcataaccggatgcgagcttcttgaatggcttcgcaagaaagacatccgcaagctgatgagagctttggaagcgatgggcgcgagcacgccggaacagtacaaaaatcaacctttaaccggcgaaccaatcgcctag

SEQ ID NO: 69172 - protein, 181 aa, Unknown
  Obtained from environmental sample
  DOMAIN (37)...(164): Protein of unknown function (DUF1018)
  misc_feature (1)..(181): Xaa is any amino acid
MQTIRRDNAQWQRAKADQGDTGKREEPVKMKAYSQSSRIHALAAVLGMGDTQYRDMLHDLYGKRSSKELTPVQQTELMKILGKQVGAANSKRNEFKSRHPAWATNRQLHAIEAMWKKVSRAETDESRKLALLAFCKRITGCELLEWLRKKDIRKLMRALEAMGASTPEQYKNQPLTGEPIA

SEQ ID NO: 69173 - DNA, 951 bp, Unknown
  Obtained from environmental sample
  misc_feature (1)..(951): n is a, c, g, or t
atgcgttcaaacggatttaaaacaccttttaaaataggagaaaaaaaggcaaatggcggaagagataaaaaacggcttgagtcattcatggcggacagcggcgcatcgcagaacagggtagcgaaagcactcggcataagcagcagcgcgctgtcccaatggctaagtggcacatacaagggcgactgcaacgcggtcgcggcaagggtggaggattacctgtccgcggcggaagagggcgatggcacggcaaactcattggaggaacagggcatagtggaaacgagctgctataagtccgtttccaagttctgcggcatcgccggaaaaaaccggatgatgggaatgctggttggcgaggcgggggctggcaaaacaaccgccttgagggactggaccagaaagcatcccacgagcatactggtggaggctgacccaggctacacgccgagagtgttctttgaggagctttgcaacaggctgaacataagcgcacccaacatcacccactccaaattcacgcaggttgttgacaagctcaaaaacagcggcaggcttcttatgattgacgaggcggagtggctcccaacggaaacattggaatatgtccgtaggattcacgacaaggcagggataggcatagttctctgcggtctcgcaagactagagaggaacgtgcgcggcaaccgcgagcagtttttgcaactgtcaagccgcatccagcttgttactaggctaaaaaacctgacccagaaagatgccgaggcatatttggaaagccgctttgagaaatacgcggacggttgcggcgaggctctttttgaactgagcggcaggaactgccgcataatggcgaacctgtgcaaactatccgccgagataatgctcaatggcaacgcgccaaagctgaccagggagatactggaaagcgcgaggagcctgtcaagatga

SEQ ID NO: 69174 - protein, 316 aa, Unknown
  Obtained from environmental sample
  misc_feature (1)..(316): Xaa is any amino acid
MRSNGFKTPFKIGEKKANGGRDKKRLESFMADSGASQNRVAKALGISSSALSQWLSGTYKGDCNAVAARVEDYLSAAEEGDGTANSLEEQGIVETSCYKSVSKFCGIAGKNRMMGMLVGEAGAGKTTALRDWTRKHPTSILVEADPGYTPRVFFEELCNRLNISAPNITHSKFTQVVDKLKNSGRLLMIDEAEWLPTETLEYVRRIHDKAGIGIVLCGLARLERNVRGNREQFLQLSSRIQLVTRLKNLTQKDAEAYLESRFEKYADGCGEALFELSGRNCRIMANLCKLSAEIMLNGNAPKLTREILESARSLSR

SEQ ID NO: 69175 - DNA, 1902 bp, Unknown
  Obtained from environmental sample
  misc_feature (1)..(1902): n is a, c, g, or t
atgatcgaagagggcgcgcagcggagcgccgaactctttctgtcgctgcttagggagcttagcgacctgtcggcgttcttttccggaaacgacggttcgcttgacatcggcgccgccgtggagaccgtcaggcgggcaatatggtcatggctcgggcgtataggcggaagttccgtagacgaggcggcggagacgcgcgtccgccgcgaggcgttgagcggattagcgcaaatagaactgcagcatacgtgcacggatcgagtcaacatatcaaaagaggagtttttgacattggcgcacggttgcgtagcgggagaactgacggcgccgtcagccgcgtggcgcggagtcacattcgcgccgctgcgggcatccatggtgctcccccaccgagccgtcttcgccgtggggctctgcgccacggagttcccggggacaaacgaggcgcccagttgggatctgctgccgagtaagcggatagttggcgactccgacagagtgcgggacaaccgcttcgcgttcttagaacttctgcacgcggcaaaggagcggctgatactatcctatagagcgcgcgatatgcaaaaggacgaggaacttcaaccgtccagcgtcgtgttggaattggaggaatatctaataggacagggattagttgacaatgagggaaattcgcgaaaatgctccgtgcggcgagagatcccgtgggtcgtacacgaaacgctgaacaaggcaagagaggcgggacgcaaacacgggtcgtgggataaggaacagaggatactggcggcggagagcttgaaggagagggtaaagcatcggcatgatttggccgttaatcaccgtctatcaacaaacggcaatttatccgctgatatcgattcgtccgcaaaaaccgccgatctttgggcattgaaaaaatttctctccaatccgtttgagtatcacctaagcatgacattgggaatacgggacgacgacgataccggcgacatgacggcgacggacgaaccgctcgattcggggtacatgatatcgaagctgcgaaaaaatgtgtggataaaaattttgagtgccctttttacaaccggaattgacaatatcaatactgtggcggttgacgcggccaacgatgtttacgacgatcacatagactcaggacaggctccggaggggcacatctgccgtatggagcgcgaggaactgaaagaatgggcaaaggagtgcgtcgacgcctcggccaagttactgaaaatctttccgaaccatcaattcgaagaaaagagagattcctttctctcctgcggcgattttaccgtcaacgtacgccatgaattcgccatcgtcccaaaagacgccgataaccgacacaatcaaataggagtaatcgcgtttggtaaaaaagtaaaaccgaccgataatatcaagttatggttagacgggctgacaatgtggcttgatgagatgaaagagggcggcaaacggcgcaccgtcgtccttatcggcttaagttataacgacaaacatcaagtgaaaaaattgcctaaaagcgtgaaagtgagaaaatcacttatgagcgcggacgccggaagattgaatgatgtggaaaaatggcttatcggtatgttaacacagatgcttatcgacaagcgttgcgaacatctgccttatgatgccgtagacgatatcatcaagcattctgaagaattaaccggtcgatcgctcaaagattatctcgttgccaaatacacgacttacaccgatggttttgatctaacggacgctaaaccgccggagatggacgacggagaattgcgagaactcgctggaagccgatacgcgcctatactaaatatgtggatacatactgaggaacaggagatggataatgagcaacgatag

SEQ ID NO: 69176 - protein, 633 aa, Unknown
  Obtained from environmental sample
  misc_feature (1)..(633): Xaa is any amino acid
MIEEGAQRSAELFLSLLRELSDLSAFFSGNDGSLDIGAAVETVRRAIWSWLGRIGGSSVDEAAETRVRREALSGLAQIELQHTCTDRVNISKEEFLTLAHGCVAGELTAPSAAWRGVTFAPLRASMVLPHRAVFAVGLCATEFPGTNEAPSWDLLPSKRIVGDSDRVRDNRFAFLELLHAAKERLILSYRARDMQKDEELQPSSVVLELEEYLIGQGLVDNEGNSRKCSVRREIPWVVHETLNKAREAGRKHGSWDKEQRILAAESLKERVKHRHDLAVNHRLSTNGNLSADIDSSAKTADLWALKKFLSNPFEYHLSMTLGIRDDDDTGDMTATDEPLDSGYMISKLRKNVWIKILSALFTTGIDNINTVAVDAANDVYDDHIDSGQAPEGHICRMEREELKEWAKECVDASAKLLKIFPNHQFEEKRDSFLSCGDFTVNVRHEFAIVPKDADNRHNQIGVIAFGKKVKPTDNIKLWLDGLTMWLDEMKEGGKRRTVVLIGLSYNDKHQVKKLPKSVKVRKSLMSADAGRLNDVEKWLIGMLTQMLIDKRCEHLPYDAVDDIIKHSEELTGRSLKDYLVAKYTTYTDGFDLTDAKPPEMDDGELRELAGSRYAPILNMWIHTEEQEMDNEQR

SEQ ID NO: 69177 - DNA, 492 bp, Unknown
  Obtained from environmental sample
  misc_feature (1)..(492): n is a, c, g, or t
atgagcaacgatagagtaatttcatccgccgacgacatcgacctgacccggcacggcgtaatagaggcgcacgccggaaccggaaagacgtacactatcgtcaacttggttctgcgtatgctcgagcagaccgaaagccgcggcaagggcggcggcaggtacgttcacctcagcgacgtgctcttggtcacgtacacggaaaaagccgccggagagcttaaaaagcgcatacgcgaaggagtcgccgcgcagataaacaaataccgcgacgaccgagaaaaactcggcttggccgcccatctggaagattgcctgaacaatatgcacgaggcgttcataggcaccatacactccgtatgcctgcggcttctgcaaacgtggcccttcgaaaccggcgtgcacttncacacctgcatggtcgaagacgataacgaangggcaaaagccgcgctgcgcgccctcatggcggagcgattgggaggacgcaaatag

SEQ ID NO: 69178 - protein, 163 aa, Unknown
  Obtained from environmental sample
  misc_feature (1)..(163): Xaa is any amino acid
MSNDRVISSADDIDLTRHGVIEAHAGTGKTYTIVNLVLRMLEQTESRGKGGGRYVHLSDVLLVTYTEKAAGELKKRIREGVAAQINKYRDDREKLGLAAHLEDCLNNMHEAFIGTIHSVCLRLLQTWPFETGVHXHTCMVEDDNEXAKAALRALMAERLGGRK

SEQ ID NO: 69179 - DNA, 1200 bp, Unknown
  Obtained from environmental sample
  misc_feature (1)..(1200): n is a, c, g, or t
atggaagaaaacggcatcaagcttgagaatgaaaaacacataaaacttataatccaaacggcgcttaaaatcattggcgacgacgacacaatattggacgacgcgcctgccggagggttaacacttaatgaggcgataaataagattaacaacgcggccgacgcggaatcggaagatctgaaacaaaaactgctttacgcctttatcaacagagccgcgaaaatattggccgctcgatacgacgcgtacaaacgtgaaaaagggttggtatcatacgatgatatgctgcgccttatgcgcaacgcggtccgctcccacgatgtgaagatactggagcggctacggaaaaggctacgctacggcattatcgacgagtttcaggacaccagcccggtacaatggagtatctttcaaaagatatttttggaagacgcggacggggcgaaaatatacattgtcggcgaccccaagcaatccatatactcattccaaggcgcggacataaactcctatatctccgcgaaagacgcaatcgccgcgcaaaacgggacggtctacagcctcaagaacaacttccggtcgctacctgagatgattgacggctacaacgccatcctctgcgacgatacggaaagttggttcgctcccgacggcggcgacagcgatatatcctactcgaaagccaacgccgcctgcccgccgccgcaacgcggcgcaccgccgcgcccgcttccttgtaaggcggtgcaggtcgtcaatttaaccgaaaaaaatgtggcggacaaccgaaaaatcatggccgaagcggcctgcgccgcaataaagaaactaataggcacgaccatatccataccaaagggactgaactgggaagagatcgctctcgactaccgcgattttgccgtcatcaccgaaacgaatgactttgccaacccgtttattgatgccttcaggaaacacggaatcccgtttgtcaagtacaagatggccggagtctttaaatcacagatcgctcgcgacataatagcgttgctctccgcaattcatagaagacattcgtccacacaccgcaccaaggcgctgctcacacactttttcaatcgaaaggcggaatcaatagtatcggagatcgacgacaaatactgcccaaaccgctactgctcaggcgacggcctctgtatcgcccctcggccgatctga

SEQ ID NO: 69180 - protein, 399 aa, Unknown
  Obtained from environmental sample
  DOMAIN (1)...(399): UvrD/REP helicase
  misc_feature (1)..(399): Xaa is any amino acid
MEENGIKLENEKHIKLIIQTALKIIGDDDTILDDAPAGGLTLNEAINKINNAADAESEDLKQKLLYAFINRAAKILAARYDAYKREKGLVSYDDMLRLMRNAVRSHDVKILERLRKRLRYGIIDEFQDTSPVQWSIFQKIFLEDADGAKIYIVGDPKQSIYSFQGADINSYISAKDAIAAQNGTVYSLKNNFRSLPEMIDGYNAILCDDTESWFAPDGGDSDISYSKANAACPPPQRGAPPRPLPCKAVQVVNLTEKNVADNRKIMAEAACAAIKKLIGTTISIPKGLNWEEIALDYRDFAVITETNDFANPFIDAFRKHGIPFVKYKMAGVFKSQIARDIIALLSAIHRRHSSTHRTKALLTHFFNRKAESIVSEIDDKYCPNRYCSGDGLCIAPRPI

SEQ ID NO: 69181 - DNA, 1449 bp, Unknown
  Obtained from environmental sample
  misc_feature (1)..(1449): n is a, c, g, or t
atgatgtcattattgcgcataactatagttgtttttaaaaagtatgcgcaggtctttgccgtctttcttgcttttgctctaatggtgatcttcagctattcatttacaagtaagaaagagcgcgtaaatttacaggataaagtaaaagacgctatttcccaaacagaagccaatataaaagcagagctaaaagaacctgaaaccttgcttgccggcgtctcagaaactttaagggcaatgttatttgacaacagagacgcggataccgtacagggatttatagatcacattgacaattatgttcagtcggaatccgataaacgcatgctgggggttatcggtttttacgcggtctttgatgtttttgacgggaaatttatgaccgggataaaaacatgggagaagcctgaaaattttaaccctttaaaccttccgtggtatacagaggctgttaaagcggacggggatattgctattactcagcccgaagttgatacgtctaccggaaaagtttcattgtcattttcacgcagaatttttgatgatgaaagacatccgttgggggttatagcccttggtatataccttgataaaataaagcaagaagctattaatacgcgttttacaaaagacggatacggttttttgttagatgatgaaacggaagtaatagttcatcctgaaccatggatgctgggtttattattaaatgaggtaaaaagcaatatcgccgcatattcagacgagctgcggcggaacggcagcgtttccgaggctgtaacggccgattacaggggaattcaaagcattgtatttatgcaaaggctttataacggctggtatatgggtgtagtaacgcccagagccaattattatcagagcacgaaacatcttgcggtaattctttccgcgtttggcgttgtatttgccgttcttctgggctggatgctgttaacaatttccgccggaaaagccgcgtcggacgagcgtattcagcttatgtccgacagcaaccccataggcatgtctttttgggacgggaatttacacattatagactgtaataataccactttggaaatgtttggcctgtcaagtaagaacgagtattttcaaatgtttgacgaactttcaccggggcgccagccggacggttctatttcaaatattaaatgttatgaattgttaagagaagcgatggaaacaggtttccttcgttttgaatgggttcatcaaaagccggacggagaaccgataccatgcgaaatgacgcttatccggactaaatataaaaaagattttactatcatggcgtatgtgcgggatttacgcgagcaaaagagaataatgaaaatgatggaatggcgcacacacctgctggatatggttaacagcgccgcgacaatccttttgtcaagcaataacgccgattctttgaatcctcaatga

SEQ ID NO: 69182 - protein, 482 aa, Unknown
  Obtained from environmental sample
  DOMAIN (159)...(239): Cache domain
  misc_feature (1)..(482): Xaa is any amino acid
MMSLLRITIVVFKKYAQVFAVFLAFALMVIFSYSFTSKKERVNLQDKVKDAISQTEANIKAELKEPETLLAGVSETLRAMLFDNRDADTVQGFIDHIDNYVQSESDKRMLGVIGFYAVFDVFDGKFMTGIKTWEKPENFNPLNLPWYTEAVKADGDIAITQPEVDTSTGKVSLSFSRRIFDDERHPLGVIALGIYLDKIKQEAINTRFTKDGYGFLLDDETEVIVHPEPWMLGLLLNEVKSNIAAYSDELRRNGSVSEAVTADYRGIQSIVFMQRLYNGWYMGVVTPRANYYQSTKHLAVILSAFGVVFAVLLGWMLLTISAGKAASDERIQLMSDSNPIGMSFWDGNLHIIDCNNTTLEMFGLSSKNEYFQMFDELSPGRQPDGSISNIKCYELLREAMETGFLRFEWVHQKPDGEPIPCEMTLIRTKYKKDFTIMAYVRDLREQKRIMKMMEWRTHLLDMVNSAATILLSSNNADSLNPQ

SEQ ID NO: 69183 - DNA, 1023 bp, Unknown
  Obtained from environmental sample
  misc_feature (1)..(1023): n is a, c, g, or t
atgaagaccatatttgtcgttgacgacagcgataccaacctgacgatggcagagtcggcattggaagaccaataccgcgttatgacaatgccgtcagcggcaagtatgttctcgtttttggaaaaagtaattcccgatttaatccttctggatatagaaatgccggaaatggacggctttgaagcgctcgcgaaaataaaaaccaaagaaaaatacagcgaaattcccgtcatgtttttaacaggccgcaccgacgcggacgtggaagcgcgcggttttgaaatgggcgccgtggattttgtcacaaagccgttctccgcgcctgtgctgttaaaccgtataaagacgcaccttgatattgatcaggttatccgcgagcggacggcgcagttacgccggcttcaaaacaatatagtgtctgttctcgctgacatggtggaaaaccgcgacaaggggacaggcggccatattgaacgtacgtcagtttacattaagatactgatagaagaaatgaaagagcgcggagtttatcttgatgaaatccgcgattgggacgtggataaaatagtttcttccgcgcgtatgcacgacctcgggaaaatctccattaccgatattattgtaaacaagccggataaacttaccgatgacgaatacgagcttattaaaacgcacacaatcgaaggcgagatgataattgacgagataatttccaaaacgggcgaagatgaatttttaaacagcgcgaggctgtttgccggctgtcatcatgaacggtgggacggcaaagggtatcctcggggtttaaaaggagataaaattccgctgcaggggcgcatcatggctattgtggacgtgtacgacgcccttgtttccgaacgtccgtataaaaaagcgttttccgacgaggaagcggtacagataatattggataatgccggcgttcattatgatcctaaaattgtcgaggtttttaattcggtaaaagatcagtttaaaactgtaagggcaaaattattatga

SEQ ID NO: 69184 - protein, 340 aa, Unknown
  Obtained from environmental sample
  DOMAIN (153)...(290): HD domain
  misc_feature (1)..(340): Xaa is any amino acid
MKTIFVVDDSDTNLTMAESALEDQYRVMTMPSAASMFSFLEKVIPDLILLDIEMPEMDGFEALAKIKTKEKYSEIPVMFLTGRTDADVEARGFEMGAVDFVTKPFSAPVLLNRIKTHLDIDQVIRERTAQLRRLQNNIVSVLADMVENRDKGTGGHIERTSVYIKILIEEMKERGVYLDEIRDWDVDKIVSSARMHDLGKISITDIIVNKPDKLTDDEYELIKTHTIEGEMIIDEIISKTGEDEFLNSARLFAGCHHERWDGKGYPRGLKGDKIPLQGRIMAIVDVYDALVSERPYKKAFSDEEAVQIILDNAGVHYDPKIVEVFNSVKDQFKTVRAKLL

SEQ ID NO: 69185 - DNA, 678 bp, Unknown
  Obtained from environmental sample
  misc_feature (1)..(678): n is a, c, g, or t
ttggtttcgttagctgactattttgtaaaacgttcagtgtgggcgttcggcggcgacggctgggcttacgacataggcttcggcggactggatcatgttatcgcttcaggcaagaacgtaaacctcttgtgcatggataccgaagtttattccaacaccggcggacagatgtccaaatcgacgcctgtaggcgcaatcgctaaatttgccaatgccggaaaggacattacaaagaaagacttgggcgcgatagcgatgagctacggttatgtgtatgtcgcgaaagtttcgttaggcgcaaatatgccgcaggtaatcaaagcgttccgcgaagcggaatcttacgacggcccgtcgcttataatcgcgtattcgcactgtatcaaccacggaatcgacatgagcaagggacttgagcagggcaaagcggttgtatcaagcggactttggccattgtaccgctacgatccgcggcttaaggatcagggaaaaaatcccttccagcttgactcgaaagatccgacaacaagcatagaggactttatgtacaaagaagtacgtttcaagagcttaaaagccgctaatcccggccgcgcagacgcgttgcttgcaaaagcaaaagcccatgcggaaagagtttggaaagagtacaaatatttggctgaacgtccgttctaa

SEQ ID NO: 69186 - protein, 225 aa, Unknown
  Obtained from environmental sample
  DOMAIN (1)...(123): Thiamine pyrophosphate enzyme, C-terminal TPP binding domain
  misc_feature (1)..(225): Xaa is any amino acid
MVSLADYFVKRSVWAFGGDGWAYDIGFGGLDHVIASGKNVNLLCMDTEVYSNTGGQMSKSTPVGAIAKFANAGKDITKKDLGAIAMSYGYVYVAKVSLGANMPQVIKAFREAESYDGPSLIIAYSHCINHGIDMSKGLEQGKAVVSSGLWPLYRYDPRLKDQGKNPFQLDSKDPTTSIEDFMYKEVRFKSLKAANPGRADALLAKAKAHAERVWKEYKYLAERPF

SEQ ID NO: 69187 - DNA, 2022 bp, Unknown
  Obtained from environmental sample
  misc_feature (1)..(2022): n is a, c, g, or t
ttgatggttcccatcgttaactcccgaaccaaagaagtagtgggaggcgtgggcggtcttttggttatagacggattacagactgtggttacggatactataaaagattttgacgagatctctttaattgcaatatattcgggcgacgggaccattatgggacattatattcccgaccgtataggtaaaaatatgactgaagttgatgaggaattaggcgacagaagggctgagattctaaaatcaattcaggaaggaaatgtatattcgggcgatacttatgttccatcattaaattcaagcgtatactttaagatgctgcccattcaaatcggcacttcaaacatgaactggggagtattggtaggaacccttcaatcatatgtattaaaagaagtcaacgatataaccagatttacattaattctcgcggcgatatccattatagtagcggcgggaattatttacttcatcctccacgccaccaccaacccgatagtccatgtaaccaacaatctcagagaaatatcggaaggcgaaggggatcttaccagaagattgaattttaacagtaaagacgagatcggcgatctttccaaatatttcaataatactcttaaggctataagcgcccttattaaaagaataaaaaccaaagttaacgcgctgaccaataccggccatgaactttccgagaacatggataaaacttcccgggcggtagacgatatttcgactaattttgcgggcatgaaatccaagatgagcaaacaggaagagaacgccgccggagcggaaagagcggtggaagccataaaaaacagcattgaaagcctgaataaaatgatagaaagccagtccgaaagcatcaacgcatcgtcttcagccgttgagcagatgacagctaacatccattccgtatccaaaaccctgattgaaaacagcagaaacgtcaacgaattaaccgaagcgtccgagaacggaaaaacagggcttcaaacggtggcgggagagatacaggaaatagcgagggaatccgaaggacttctggaaataaacgcggtcatggacaatatcgccagccagaccaacctgttgtcaatgaacgcggcaattgaggcggcccacgccggggaagccgggaaaggttttgccgtcgtagccgatgaaatacgcaaactcgccgaatcgtcaagcgatcagtcaaagacaaccgcgactatgctgaagaagataaaatcttccatagacagcattacggcgtcttccaacgaggttctcacgcgctttgaggttattgatgaaaaagtaaaaaccgtatcaacacatgaagaaaatatccgcaacgctatggaagagcaggaagtgggcggaagacagatactggaatccatgcagcgcttgaaagagataagcgtaactgtcagggagggagcgtcgggcatgatggaatccggcgatcttctgaaccggcagaccagtgaattaataacatcaagcaccgacgtggtaaaaggcatgaacgacattgtaaacggagccatgaaagagataaaaagcgcggtaactcttgttgaagaaatgagcaatgaaaacaccaagaacttcgacgatcttaaaacggagtcgtcaaagttcaaggttgacgcggacgacgagaagaaaaaaattatcgttgttgatgatgagcagaccattcttaccatggcaagagcctcgctggaaaaagattatgacgttaccacggcaagttccggcaaggaagctttaagcctttttttccagggttatgttcccaatttggtattattggatttaagtatgcctgagatgggcggttgggatactttcttaaggatacgcaacatcagtaaattgcaccaatctccgatagcgatatactcgacatcggatgacccgcaagacagagccaaagctaaggagcttggggcggttgatttcatacacaagcctgccaaaaaagctgaattgcttgagaaggtgtcaagattggtgaattaa

SEQ ID NO: 69188 - protein, 673 aa, Unknown
  Obtained from environmental sample
  DOMAIN (270)...(542): Methyl-accepting chemotaxis protein (MCP) signaling domain
  misc_feature (1)..(673): Xaa is any amino acid
MMVPIVNSRTKEVVGGVGGLLVIDGLQTVVTDTIKDFDEISLIAIYSGDGTIMGHYIPDRIGKNMTEVDEELGDRRAEILKSIQEGNVYSGDTYVPSLNSSVYFKMLPIQIGTSNMNWGVLVGTLQSYVLKEVNDITRFTLILAAISIIVAAGIIYFILHATTNPIVHVTNNLREISEGEGDLTRRLNFNSKDEIGDLSKYFNNTLKAISALIKRIKTKVNALTNTGHELSENMDKTSRAVDDISTNFAGMKSKMSKQEENAAGAERAVEAIKNSIESLNKMIESQSESINASSSAVEQMTANIHSVSKTLIENSRNVNELTEASENGKTGLQTVAGEIQEIARESEGLLEINAVMDNIASQTNLLSMNAAIEAAHAGEAGKGFAVVADEIRKLAESSSDQSKTTATMLKKIKSSIDSITASSNEVLTRFEVIDEKVKTVSTHEENIRNAMEEQEVGGRQILESMQRLKEISVTVREGASGMMESGDLLNRQTSELITSSTDVVKGMNDIVNGAMKEIKSAVTLVEEMSNENTKNFDDLKTESSKFKVDADDEKKKIIVVDDEQTILTMARASLEKDYDVTTASSGKEALSLFFQGYVPNLVLLDLSMPEMGGWDTFLRIRNISKLHQSPIAIYSTSDDPQDRAKAKELGAVDFIHKPAKKAELLEKVSRLVN

SEQ ID NO: 69189 - DNA, 765 bp, Unknown
  Obtained from environmental sample
  misc_feature (1)..(765): n is a, c, g, or t
atgaattacgccgtaatgacgcctactggtcaagtcaatctgttatgtgaaaatggtttaattatggatatatacaaaacattacgggaagaatcatacgaggcgaacatggaaataaagcggcacaaccttgccatttccacatggggcaacgcttccgcttttgatcccggcaagggggtgtttgccatcaagccgtccggcgtggaatacgatgaattaacccccaaaaagatggtattagtcgatcttgagggaaaggttctgggcggcaaacttaaaccatcttccgatacaaaaacccaccttgtactgttcaaggaatttaaaggcatcctcggcgtaacgcacacgcactcgccttacgcggtcgcctgggcgcaaaccggaaaaccggttcctgtttttggcactacccatgccgacaactgcgcttatgaaattccttgtaccgcatttatgaatccgcaggaagtaagaaacgattacgaactggaaacaggcaatttaattgttaatactttnaaaaacggcaatctggattattcgcagattacaatgacattggtcgccgggcacggcccttttacatggggaaacagcgcggctcaatctgtgtatcacagcgttattctggaagaaatcggcaaaatggcgctattcacagtaacgattgatccgaacgcgaaacctctgcctgaacacatcatcaaaaaacattgggaacgcaaacatggagcaaacgcgtattacgggcagaaataa

SEQ ID NO: 69190 - protein, 254 aa, Unknown
  Obtained from environmental sample
  DOMAIN (30)...(240): Class II Aldolase and Adducin N-terminal domain
  misc_feature (1)..(254): Xaa is any amino acid
MNYAVMTPTGQVNLLCENGLIMDIYKTLREESYEANMEIKRHNLAISTWGNASAFDPGKGVFAIKPSGVEYDELTPKKMVLVDLEGKVLGGKLKPSSDTKTHLVLFKEFKGILGVTHTHSPYAVAWAQTGKPVPVFGTTHADNCAYEIPCTAFMNPQEVRNDYELETGNLIVNTXKNGNLDYSQITMTLVAGHGPFTWGNSAAQSVYHSVILEEIGKMALFTVTIDPNAKPLPEHIIKKHWERKHGANAYYGQK

SEQ ID NO: 69191 - DNA, 1020 bp, Unknown
  Obtained from environmental sample
  misc_feature (1)..(1020): n is a, c, g, or t
ttggatgcgcgccgccgccgcgagaaaagacggcatggattcgaccgttatgcgtctgggagacaatatgcgggaagtggcggtaaccgaaggcgacaaagtcgaggctcaaatcaggctgggctggcaggttacacctggggcataggcgaccttgccgcccgttacgcgaaaatcagtgatgacagggccggaaaactggcggaagaatacgccgcgcgttacgagcttgcgcccgagcttaagcaggacggcaaggcaagaaccgcgatgctcgaacaggcaaaaatcgaaatcgcccttaaagaaatgcttgaagcggaacatgccggggcttttaccacaaccttccaggaccttcacggtctgccccaactgccgggccttgcctgccagcggctcatggagcagggctacggtttcggcgcggaaggggactggaaacagtccatgctgacccacgccgccaaagtcatggctgccgggctgccgggaggcatttcttttatggaagattacacctaccactttgagccgggcaaagaagccgccctgggcgcccacatgcttgaaatatgcccttccatcgcgggcggcaagccccgtatcgaagttcatccgctgggaattggcggcaaagcggatcctgcccgcatggtgtttgacgccgcccccggccccgcggtattggcaacgctcattgatcttggcgatcgtttcagaatgattgttaatgaaattgagacaattaaaatagaaaacgcaatgccgaaactgcccgttgcccgcgccctctggaagccgtatccaaacctgggcgacgccgccgaagcctggataatatcaggcggcacgcaccattcggtatacagttccgcgctgagtacggaatatttccgcgattgggcggaaatgagcggcattgagtttgtgcttatagacaaggatacaaaaccggcttgtttacaggatgaattacgccgtaatgacgcctactggtcaagtcaatctgttatgtga

SEQ ID NO: 69192 - protein, 339 aa, Unknown
  Obtained from environmental sample
  DOMAIN (1)...(337): L-arabinose isomerase
  misc_feature (1)..(339): Xaa is any amino acid
MDARRRREKRRHGFDRYASGRQYAGSGGNRRRQSRGSNQAGLAGYTWGIGDLAARYAKISDDRAGKLAEEYAARYELAPELKQDGKARTAMLEQAKIEIALKEMLEAEHAGAFTTTFQDLHGLPQLPGLACQRLMEQGYGFGAEGDWKQSMLTHAAKVMAAGLPGGISFMEDYTYHFEPGKEAALGAHMLEICPSIAGGKPRIEVHPLGIGGKADPARMVFDAAPGPAVLATLIDLGDRFRMIVNEIETIKIENAMPKLPVARALWKPYPNLGDAAEAWIISGGTHHSVYSSALSTEYFRDWAEMSGIEFVLIDKDTKPACLQDELRRNDAYWSSQSVM

SEQ ID NO: 69193 - DNA, 636 bp, Unknown
  Obtained from environmental sample
  misc_feature (1)..(636): n is a, c, g, or t
gtgattatggatctcaagaaatacgaatactggtttatcgtcggaagccaggacctttacggggatgaaacgcttaaacaagtcgctgatcatgccaaaattatggcggaagattttaacaaagatcccctgctttccggcgcggtggtattaaagcctacggcaattacgccgcgggcgatacgcggcctttttgaggaagcgaacgcctcaaacaactgcgcgggcttaattacctggatgcatacattttcgccttcaaaaatgtggatacaggggctggcgcttaaccgcaaaccgcttctgcacctccacacccagttcaaccgcgatatcccctggtcttcaatagacatggattttatgaatctgaaccagtcggcacacggcgaccgtgaacacgggtatattcatacgcggatgcggctgccccgcaaagtagtcgccgggttttggcaggataaagaactgcgccgccggatggacgtttggatgcgcgccgccgccgcgagaaaagacggcatggattcgaccgttatgcgtctgggagacaatatgcgggaagtggcggtaaccgaaggcgacaaagtcgaggctcaaatcaggctgggctggcaggttacacctggggcatag

SEQ ID NO: 69194 - protein, 211 aa, Unknown
  Obtained from environmental sample
  DOMAIN (2)...(210): L-arabinose isomerase
  misc_feature (1)..(211): Xaa is any amino acid
MIMDLKKYEYWFIVGSQDLYGDETLKQVADHAKIMAEDFNKDPLLSGAVVLKPTAITPRAIRGLFEEANASNNCAGLITWMHTFSPSKMWIQGLALNRKPLLHLHTQFNRDIPWSSIDMDFMNLNQSAHGDREHGYIHTRMRLPRKVVAGFWQDKELRRRMDVWMRAAAARKDGMDSTVMRLGDNMREVAVTEGDKVEAQIRLGWQVTPGA

SEQ ID NO: 69195 - DNA, 861 bp, Unknown
  Obtained from environmental sample
  misc_feature (1)..(861): n is a, c, g, or t
atgttgaatcagtttgacgagcttgtcgcttcccgcaattacggctggaaaatcgcggatatactcccctccgttttgagcgccggcgaggacgccggaaccctcaccggggcgaaactgcttgacccttccggatgtctgtgggacggcatacccctctgcccgccggaaggagacgccggtacgggcatggttgcgactaacagcgtggcccagcgtaccggcaatgtttcggcgggcacttccattttcgccatgatcgttatggaaagggaactgtcaaaggtataccccgaaattgatatagttactactccggcgggaaagccggtggccatggttcactgtaataactgtacttcagatattgacgcgtggataaaattgttcagggagctgctggatataagcgggtcaaaaatggataaagcggcgttttacgacgcgctgtattataaagccctggaagcggatgaggattgcggcgggcttctttcctacaattacttttccggcgagcatattaccgaaattgaggaaggccgtccgctgttcgcgcgtctgccggacagccgtttcactctggcaaattttatgcggactcttcttttttccggcataggaaccttaaagtacggcatagacatccttgccgagaaggagaaagtgcggatagacagcttgctgggccacggcggcttgttcaaaaccaaaggcgtggggcagcgttttttagccgccgcttttaacgcgccggtttcggtgatggaatccgccggagaaggcggcagttggggcattgcgcttcttgcccgcgtttatgcgcgagggggaagggactctggagaacttcctgactga

SEQ ID NO: 69196 - protein, 286 aa, Unknown
  Obtained from environmental sample
  misc_feature (1)..(286): Xaa is any amino acid
MLNQFDELVASRNYGWKIADILPSVLSAGEDAGTLTGAKLLDPSGCLWDGIPLCPPEGDAGTGMVATNSVAQRTGNVSAGTSIFAMIVMERELSKVYPEIDIVTTPAGKPVAMVHCNNCTSDIDAWIKLFRELLDISGSKMDKAAFYDALYYKALEADEDCGGLLSYNYFSGEHITEIEEGRPLFARLPDSRFTLANFMRTLLFSGIGTLKYGIDILAEKEKVRIDSLLGHGGLFKTKGVGQRFLAAAFNAPVSVMESAGEGGSWGIALLARVYARGGRDSGELPD

SEQ ID NO: 69197 - DNA, 483 bp, Unknown
  Obtained from environmental sample
  misc_feature (1)..(483): n is a, c, g, or t
atgatattttattatcaggaggacaatatgaaaaaaatatgttttatgggattgattttttacgccatgacagtaaacggatacgcgagcgaaagcgacggtatttattcaatgaaagtcggtcaatatgaagtatacgttatggtagaatccgaaagggacggaaataccggaattttagttggagcggatgaggatgtattgaaacgctacattcctgcggaaggttttaagcacactgccaatgccgttttaataaaaaccccgaaacaaattatactgatagataccggaaccggagcgggcggtattattatagaaaaaatanaaaaactgggcgtacagccggaaaatattgacgcggttcttataactcatctgcacggggatcactttggcagcctgcagaaagacggggctgctgttttcacaaagcgaaaatttacctttccgcaaagaactggaatattttacaaagagtaa

SEQ ID NO: 69198 - protein, 160 aa, Unknown
  Obtained from environmental sample
  SIGNAL (1)...(29)
  misc_feature (1)..(160): Xaa is any amino acid
MIFYYQEDNMKKICFMGLIFYAMTVNGYASESDGIYSMKVGQYEVYVMVESERDGNTGILVGADEDVLKRYIPAEGFKHTANAVLIKTPKQIILIDTGTGAGGIIIEKIXKLGVQPENIDAVLITHLHGDHFGSLQKDGAAVFTKRKFTFPQRTGIFYKE

SEQ ID NO: 69199 - DNA, 492 bp, Unknown
  Obtained from environmental sample
  misc_feature (1)..(492): n is a, c, g, or t
ttggcagcctgcagaaagacggggctgctgttttcacaaagcgaaaatttacctttccgcaaagaactggaatattttacaaagagtaatgttaatcagggagcggtcgccgcgcttaaaccttacggaacaaaagttaccacatttgaaccgggcgaacttggaaaaaaactgaaggaaatactccccggtatttctcccatcgccgcttacggacacactccggggcatatagtgtacttaatagaaaacaaaaaagaaaaactgttaattatcggagaccttctgcacatagctttggtacagtttcctgtccctgagattagcgcgacttacgacatggatcaaaaagccgcggcaacagtacgcaggcagattttggattatgccgcaaagaacaaaatccccgtagccggaatgcacatcgtgtacccgggaacaggaagtgtcagtgcagaagacagcggctttaagtttacacccggtcaatag

SEQ ID NO: 69200 - protein, 163 aa, Unknown
  Obtained from environmental sample
  misc_feature (1)..(163): Xaa is any amino acid
MAACRKTGLLFSQSENLPFRKELEYFTKSNVNQGAVAALKPYGTKVTTFEPGELGKKLKEILPGISPIAAYGHTPGHIVYLIENKKEKLLIIGDLLHIALVQFPVPEISATYDMDQKAAATVRRQILDYAAKNKIPVAGMHIVYPGTGSVSAEDSGFKFTPGQ

SEQ ID NO: 69201 - DNA, 348 bp, Unknown
  Obtained from environmental sample
  misc_feature (1)..(348): n is a, c, g, or t
gtgtcagtgcagaagacagcggctttaagtttacacccggtcaatagcggtggttatcggtctgcgatgaaatacacttataaaacacagggaacctgttcaacggaaattcactttgatataaacggaaatgtcataagcggcgtatcattcgaaaggggctgtaacggcaatctgaaagcaatatcccgccttgttgacggaatgaccgttgacgagataaagacaaagtgcaaaggaattaattgcggaggcaagaaaacttcatgcgcagaccaacttgctatagcggtagagaaagcgtacaacttgttcccttcgacaggctcagggaacactttgatataa

SEQ ID NO: 69202 - protein, 115 aa, Unknown
  Obtained from environmental sample
  misc_feature (1)..(115): Xaa is any amino acid
MSVQKTAALSLHPVNSGGYRSAMKYTYKTQGTCSTEIHFDINGNVISGVSFERGCNGNLKAISRLVDGMTVDEIKTKCKGINCGGKKTSCADQLAIAVEKAYNLFPSTGSGNTLI

SEQ ID NO: 69203 - DNA, 663 bp, Unknown
  Obtained from environmental sample
  misc_feature (1)..(663): n is a, c, g, or t
atgaaaaagggcaaacaagttgttgttgtctcttcgggtgcgcaggtggcggggctttctacaatggacaaatgggcccgaaaaaaagacattcactacaggcaggcgttgtgcgcggttgggcaagtggacctaatgggcgcgtggagcaaagcgtttgagcaaaacggcctgcacatcgcgcagatactattaacccgcgatgattttaacgacccgctcagaacattgaatatgcgcaataccctctttaccctggtagacgaaggcgttatcccaatcatcaacgaaaacgataccgtctctgtggaagaaataaaaattggggacaatgacacacttgcagcgcaatcggcaattctgtggagcgccgacctattaatccttttcagcgatattgacggcgtatacgacaaaaatcccaaagagcacaaagatgccgttcttgtcgaagaagtgcgtgacattgacgcgttgcaaaaagacatcagtattggagcgacaaatgattttggcaccggcggcatcgccaccaaacttgacgccgccaaactggctctaagctacggcatccccgcaattcttgcaaatggcggcataccccgcagccttgaaaccctagcggcaggcggacagaaaggtacagtgttccttgtctcttaa

SEQ ID NO: 69204 - protein, 220 aa, Unknown
  Obtained from environmental sample
  DOMAIN (1)...(197): Amino acid kinase family
  misc_feature (1)..(220): Xaa is any amino acid
MKKGKQVVVVSSGAQVAGLSTMDKWARKKDIHYRQALCAVGQVDLMGAWSKAFEQNGLHIAQILLTRDDFNDPLRTLNMRNTLFTLVDEGVIPIINENDTVSVEEIKIGDNDTLAAQSAILWSADLLILFSDIDGVYDKNPKEHKDAVLVEEVRDIDALQKDISIGATNDFGTGGIATKLDAAKLALSYGIPAILANGGIPRSLETLAAGGQKGTVFLVS

SEQ ID NO: 69205 - DNA, 564 bp, Unknown
  Obtained from environmental sample
  misc_feature (1)..(564): n is a, c, g, or t
atgaaaaagattgagctgataatggacgcccacgccctcgaccttgccctcacccgcatctcgcaccagattttggagcggcacggcgatttggggagcgtctgcattgtcggcatgcagtcccgcggggtgtttctggcgcagaggatcgcggctaaggtcaccgcgatggcggggcttgccgcgccgcttttgacaggcattttggataccaccctctatcgtgacgactaccgtacgcgcctccggcagccggaggttcgggtgaccgacatccccttcgacataaacgagaagagcgtcgtcctcgttgacgacgtcctctttacggggcgcaccgtgagggcggcgctcgacgcgctcatggatcacgggcggcctcgggagatacagcttgccgtgctcatagaccgcgggcaccgcgaactgcccatccgcgccgactatgtcggcaggaagatcaccacctcccctacgcaggaggtctcgctcagggtgagcgagctcgacggggaggattcgctatggcttatggagcttgataaggagggcggcggccaatga

SEQ ID NO: 69206 - protein, 187 aa, Unknown
  Obtained from environmental sample
  DOMAIN (2)...(152): Phosphoribosyl transferase domain
  misc_feature (1)..(187): Xaa is any amino acid
MKKIELIMDAHALDLALTRISHQILERHGDLGSVCIVGMQSRGVFLAQRIAAKVTAMAGLAAPLLTGILDTTLYRDDYRTRLRQPEVRVTDIPFDINEKSVVLVDDVLFTGRTVRAALDALMDHGRPREIQLAVLIDRGHRELPIRADYVGRKITTSPTQEVSLRVSELDGEDSLWLMELDKEGGGQ

SEQ ID NO: 69207 - DNA, 933 bp, Unknown
  Obtained from environmental sample
  misc_feature (1)..(933): n is a, c, g, or t
atgagcctgcagatacagcacctgctcggtttagagggggtctcccgcgaggatatcaatttgattctcgacaccgcggacggttttcgcgaggtgctccagagggaagtaaaggtggtcccgccgctgcggggaaagacggtcgtcaatttgttttacgagaacagtacgcgaacgaagatatcctttgagttagccgaaaagcggctctccgcaagccccctcaatttcagcgtgtcaaccagttccgtcaataaaggcgagagtctaagggataccatacagaacatagaggccatgaagatcgacatggtggttgtgcggcatccctgcgccggggtgccgtatttcctgacgcagtgcacgggcgcggtgattgtcaacgccggagacgggttgcacgagcatcccacgcaggcgttgcttgacatgatgaccatccgccaaaagctcggacgccttgaggggctgaaagtcgctataatcggcgacatcttccacagccgggtggcccgttccaacgcctgggggatgaagacgatgggtatgaacgtgacgctctgcggcccgccgacgctgttgccgcagcatacggattcgcttggggtgcccgtcaccgacgatattgacgaggcgctcgacggggcggacgtggtgatgctgctgcgtgtgcagttggagcgtcaatcaagcgccgtttttccgtcggtgcacgagtaccgcgagcgttacgggttcgatatggacaggctgtcgcggatgagggatgaggttgttatcatgcacccgggccctatcaataggggcgtggagttggcgtcgaacgtggcggattccggcaattcggtgatattggaccaggtgaccaacggggtcgccgttcgtatggcggtattgtacctgcttggctgcggggggggagaaaatggttaa

SEQ ID NO: 69208 - protein, 310 aa, Unknown
  Obtained from environmental sample
  DOMAIN (154)...(302): Aspartate/ornithine carbamoyltransferase, Asp/Orn binding domain
  misc_feature (1)..(310): Xaa is any amino acid
MSLQIQHLLGLEGVSREDINLILDTADGFREVLQREVKVVPPLRGKTVVNLFYENSTRTKISFELAEKRLSASPLNFSVSTSSVNKGESLRDTIQNIEAMKIDMVVVRHPCAGVPYFLTQCTGAVIVNAGDGLHEHPTQALLDMMTIRQKLGRLEGLKVAIIGDIFHSRVARSNAWGMKTMGMNVTLCGPPTLLPQHTDSLGVPVTDDIDEALDGADVVMLLRVQLERQSSAVFPSVHEYRERYGFDMDRLSRMRDEVVIMHPGPINRGVELASNVADSGNSVILDQVTNGVAVRMAVLYLLGCGGGENG

SEQ ID NO: 69209 - DNA, 420 bp, Unknown
  Obtained from environmental sample
  misc_feature (1)..(420): n is a, c, g, or t
ttgacgctccaactgcacacgcagcagcatcaccacgtccgccccgtcgagcgcctcgtcaatatcgtcggtgacgggcaccccaagcgaatccgtatgctgcggcaacagcgtcggcgggccgcagagcgtcacgttcatacccatcgtcttcatcccccaggcgttggaacgggccacccggctgtggaagatgtcgccgattatagcgactttcagcccctcaaggcgtccgagcttttggcggatggtcatcatgtcaagcaacgcctgcgtgggatgctcgtgcaacccgtctccggcgttgacaatcaccgcgcccgtgcactgcgtcaggaaatacggcaccccggcgcagggatgccgcacaaccaccatgtcgatcttcatggcctctatgttctgtatggtatcccttag

SEQ ID NO: 69210 - protein, 139 aa, Unknown
  Obtained from environmental sample
  misc_feature (1)..(139): Xaa is any amino acid
MTLQLHTQQHHHVRPVERLVNIVGDGHPKRIRMLRQQRRRAAERHVHTHRLHPPGVGTGHPAVEDVADYSDFQPLKASELLADGHHVKQRLRGMLVQPVSGVDNHRARALRQEIRHPGAGMPHNHHVDLHGLYVLYGIP

SEQ ID NO: 69211 - DNA, 1470 bp, Unknown
  Obtained from environmental sample
  misc_feature (1)..(1470): n is a, c, g, or t
ttggctgcggggggggagaaaatggttaaaaaggggatgggtagcgttgaatatccgcgtagcggcgagcaacagtcaaggccgctcattatcgcgaacggccgagtaatcgatccggtttccggcatcgacgggccgcggacggtggcgttagaaaagggcgtagtcaaggcagtcattgacagaccgttcgtcaagtcgctgtgcggcgaactctttccgagcgacggggcgaacgacgtggaggcattgttccggagcaagagaccggtaactcccggcgaactctttccagactgcgatgagaacgatgtcgacgtgattgacgccgccggtttgtgggtggttcccggtcttgtggacatgcacgtccacctacgcgaaccgggacgtgaggacaaagaaaccatagcgaccggcgctcaggcggctgccgcaggcgggttcaccgccgtggcctgtatgcccaacacaagtccggtgcttgacgaagcctcaaagatccgctacgtaatccaacgcggcgaaagctgcccttgccgcatctacccaataggcgcgataaccaaggcccttgagggcgaagaactcgcccccgtaggcgagatggtcaacgcgggtgcggttgcggtctccgacgacgggaagcccgtggccaaggcgaacgtgatgcgcaacgccctcaactactcgaagtctttcggcatccccgtgatatgccacagcgaggagcctacgctcagcgccaaaggacacatgaacgaggggcctacgtcgacgcgtctgggcgtacgcggcattccggtcgtcgccgagaccatcgcggtgtcgagagacatactgctggctgagtacacaggcgccaaagtgcacattgcgcacgtgtcaaccgccggatcggtgcgattggtgcgggaggccaagcaacgcggtgtaaacgtcacggcggagagctgcccgcactacttcacgctcacggatgaggacgtcggccactacgatactaataagaagatgaacccgccgttgcgcaccgccgccgatagagaagcggtgatagccggtcttgccgacggggctatcgacgccatagccagcgaccacgctccgcacgttcccgaggagaaggacgtggagttcgacaacgcggccttcggcgtgataggcatggagacgtcgctcggacttgtgcttacggttcttgttaataaaggattattgacgccgacgcagatggtggaaaggatgagcgtggcgcccaaccgtatattggggttgcccggcgggtcgctaaaagaaggcgcgccggcagacgttacgctgattgatcctgaggcgcggtggacggtcgatcctgcggagtttttctccaaggcgaggaattcggcgtttatagggatggagcttacgggagcggcggcagttacggttttgggggggcgggtgatttacaaaagattaaaaggttaa

SEQ ID NO: 69212 - protein, 489 aa, Unknown
  Obtained from environmental sample
  DOMAIN (114)...(441): Amidohydrolase family
  misc_feature (1)..(489): Xaa is any amino acid
MAAGGEKMVKKGMGSVEYPRSGEQQSRPLIIANGRVIDPVSGIDGPRTVALEKGVVKAVIDRPFVKSLCGELFPSDGANDVEALFRSKRPVTPGELFPDCDENDVDVIDAAGLWVVPGLVDMHVHLREPGREDKETIATGAQAAAAGGFTAVACMPNTSPVLDEASKIRYVIQRGESCPCRIYPIGAITKALEGEELAPVGEMVNAGAVAVSDDGKPVAKANVMRNALNYSKSFGIPVICHSEEPTLSAKGHMNEGPTSTRLGVRGIPVVAETIAVSRDILLAEYTGAKVHIAHVSTAGSVRLVREAKQRGVNVTAESCPHYFTLTDEDVGHYDTNKKMNPPLRTAADREAVIAGLADGAIDAIASDHAPHVPEEKDVEFDNAAFGVIGMETSLGLVLTVLVNKGLLTPTQMVERMSVAPNRILGLPGGSLKEGAPADVTLIDPEARWTVDPAEFFSKARNSAFIGMELTGAAAVTVLGGRVIYKRLKG

SEQ ID NO: 69213 - DNA, 315 bp, Unknown
  Obtained from environmental sample
  misc_feature (1)..(315): n is a, c, g, or t
atgagtgcactagttatgcgtccagttcctgctgtggctgatttcttcagcatcttcgacagggtcttcggcgacaggtcgctgaccgacgaccgcgcggactatagggtgcagccgcgcatggacgtctccgaagaggagaacaagtacgccgtcacgctcgacatccccggtctggccaaggaggacatctccataaaggtcgagaacggcacgatgaagatcgaaggcgagcgcaaagaggaacgcaccggcaagtaccacctgaccgaacgcgtctacggacgcttctataggagctctcggcnaatctga

SEQ ID NO: 69214 - protein, 104 aa, Unknown
  Obtained from environmental sample
  DOMAIN (42)...(104): Hsp20/alpha crystallin family
  misc_feature (1)..(104): Xaa is any amino acid
MSALVMRPVPAVADFFSIFDRVFGDRSLTDDRADYRVQPRMDVSEEENKYAVTLDIPGLAKEDISIKVENGTMKIEGERKEERTGKYHLTERVYGRFYRSSRXI

SEQ ID NO: 69215 - DNA, 435 bp, Unknown
  Obtained from environmental sample
  misc_feature (1)..(435): n is a, c, g, or t
atggaaagatatataatgctgcaactttcttctgagttggaaaaaaaaataagaacagacggcgagacagcctaccccaatgaatgttgcggcgtattaatcggcgacattggcaatgagggaatcaaaacagccaaaagcagcctcaccactgataacgcacgggaaaatgacgagcaatatcaccgctttcttataacgccggaagatatgatgaaagcggaacaaaccgcaagatcgatgaaactcgacgttatcggcttttatcactcgcaccccgatcatccctcagcaccgtccggttatgataaagatcacgcgctgcctttttactcgtatgtgattgtgtcggtggataaaggcaaggcgcaggttcttaccagttgggagcttacagatgatagaagtaattttgtacaagaaaagataaattga

SEQ ID NO: 69216 - protein, 144 aa, Unknown
  Obtained from environmental sample
  misc_feature (1)..(144): Xaa is any amino acid
MERYIMLQLSSELEKKIRTDGETAYPNECCGVLIGDIGNEGIKTAKSSLTTDNARENDEQYHRFLITPEDMMKAEQTARSMKLDVIGFYHSHPDHPSAPSGYDKDHALPFYSYVIVSVDKGKAQVLTSWELTDDRSNFVQEKIN

SEQ ID NO: 69217 - DNA, 1260 bp, Unknown
  Obtained from environmental sample
  misc_feature (1)..(1260): n is a, c, g, or t
ttgataaaagttcttattccttacgcgcttaggtcatttaccgagcgcaatgcggaggtggaattagaaggcggcacggcgggcgacgcgattaacgcgcttgcaagtgcctaccccgctcttaaaacccacctgttcacagaagacggtcagcttcgcgactttatcaatttgttcgtaggtggcgcaaatatcaacagcttgcagggacttaacactcccattgcggataatggggaattgatgattgttccggcaattgcgggcggcagcggcgaccatgtcggcgataatatcgacgcggagcttaccaacgaagaaatcgcgcgttacagccgccacctgcttttgccggaaatcggcgtcgatgggcaaaaaaaattaaaggccgcgaaagttcttattgtaggcacgggaggactgggcgctccgctcgccctctaccttgccgcggcaggcgtggggacaatagggcttgtggattttgatgtggtggacgaatcaaatctccagcggcagataattcacagcacccgcgatgtgggaaggcccaaagtggcttcggcaaaagacagaatcaaggggataaacccgcttatcaacgtagtaacgcataacgctatgctttcaagccaaaacgcgctggaactttttgccgattacgacatcatcgcggacggaaccgacaatttccaaacgcgctaccttgtaaacgacgcctgcgtatttttaggaaaactgaacgtttacggatcagtgttccagttcgacgggcaggcgaccgtcttcggcgcgaaggacggcccctgctaccgctgcctctacccgtccccgccgcctccgggacttgtaccctcttgcgcggaaggcggagtcatgggcgtactgcccggcattatcggaaccattcaggcggcggaaacgattaaactcatagtcggcggcgcgaaaccgcttgtcggccgtcttcttttgtttgacgcgtggcgcatgacgttccgcgaattaaaacttgataaaaatcccgaatgccccgtttgcgggaaagctccttccattcacgaacttatagactacgaacaattttgcggtttgaaaaaaaacaccgacagcaagcctatagataccataaccgccatcgatttaaaaaaacgccttgataacggagataaaattcaatttatagatataagagaaccccatgaacgcgccattgtaaaattcccggacgcgaaagttataccgcttggccagctttga

SEQ ID NO: 69218 - protein, 419 aa, Unknown
  Obtained from environmental sample
  DOMAIN (4)...(90): ThiS family
  misc_feature (1)..(419): Xaa is any amino acid
MIKVLIPYALRSFTERNAEVELEGGTAGDAINALASAYPALKTHLFTEDGQLRDFINLFVGGANINSLQGLNTPIADNGELMIVPAIAGGSGDHVGDNIDAELTNEEIARYSRHLLLPEIGVDGQKKLKAAKVLIVGTGGLGAPLALYLAAAGVGTIGLVDFDVVDESNLQRQIIHSTRDVGRPKVASAKDRIKGINPLINVVTHNAMLSSQNALELFADYDIIADGTDNFQTRYLVNDACVFLGKLNVYGSVFQFDGQATVFGAKDGPCYRCLYPSPPPPGLVPSCAEGGVMGVLPGIIGTIQAAETIKLIVGGAKPLVGRLLLFDAWRMTFRELKLDKNPECPVCGKAPSIHELIDYEQFCGLKKNTDSKPIDTITAIDLKKRLDNGDKIQFIDIREPHERAIVKFPDAKVIPLGQL

SEQ ID NO: 69219 - DNA, 1137 bp, Unknown
  Obtained from environmental sample
  misc_feature (1)..(1137): n is a, c, g, or t
atgatgagcgatggcgcactttctcaggatgaaatagacgcattattgtcaggcgcgggcgtagaatcatcgcctttgggcgggggcggcggtcatcctcaggcggctacaatggcccctccgcagatgtcgtccgcttccgatgatttcgatgtaggcgcacttaaaggttttttctcttctgtaaccgacgctctttcttcaaacctttccgctcttacaggcgctaccgttaccctttcccctccgcaggcttcatcttttaacagggacggtttcctgggccaactgccggacaaggtaaccgttatttcagcaaattatacttccggtttccccggcgagcatatatttattcttcccgaagaatcggcaaaggcaatagcaagcctgatgacaaaggaagatgacattcagcttgacgatatggcaatgtcggtactgggagaagtagtgtcccaaatggtgggaactcaaattacctcattaaccgacaagacaaagaataaatctatagccgcggcgtctccctcggcggcgaatgtgcccaaagcggcggcggccattccggccggcaattttgccgttatggattacaatcttgatttgggagacggaaaaccgcataaaatgtgggaaatattaggagcaacacccgcaactgatatttcagccggattaaacggtatacaggggggcggcatgcaaatgcccggcatgcaaatgggtggaatgcaaatgggcatgggaggcggaatgccaggaatgggaatgggtatgggaatgggtatgcagtctaaccttggacctacgaatgtacaggctgttcaattccccaatttgatgcagcctaaattcggtccgcacgaagcgggcaatatcggtttgattatggacgtctccatggagatgaccgtagagcttggccgcacccgtaaacttattaaagaaatactgggtatgggcgaaggaaccattatcgagctggacaaacttgccggcgagccggtagatattctggttaaccacaaacttattgccaagggcgaagtcgtggttatcgatgaaaacttcggcgtacgcgtaacagagattgtgtcgcccatggagcgcattaacgacatgggttacaattaa

SEQ ID NO: 69220 - protein, 378 aa, Unknown
  Obtained from environmental sample
  DOMAIN (293)...(369): Surface presentation of antigens (SPOA) protein
  misc_feature (1)..(378): Xaa is any amino acid
MMSDGALSQDEIDALLSGAGVESSPLGGGGGHPQAATMAPPQMSSASDDFDVGALKGFFSSVTDALSSNLSALTGATVTLSPPQASSFNRDGFLGQLPDKVTVISANYTSGFPGEHIFILPEESAKAIASLMTKEDDIQLDDMAMSVLGEVVSQMVGTQITSLTDKTKNKSIAAASPSAANVPKAAAAIPAGNFAVMDYNLDLGDGKPHKMWEILGATPATDISAGLNGIQGGGMQMPGMQMGGMQMGMGGGMPGMGMGMGMGMQSNLGPTNVQAVQFPNLMQPKFGPHEAGNIGLIMDVSMEMTVELGRTRKLIKEILGMGEGTIIELDKLAGEPVDILVNHKLIAKGEVVVIDENFGVRVTEIVSPMERINDMGYN

SEQ ID NO: 69221 - DNA, 858 bp, Unknown
  Obtained from environmental sample
  misc_feature (1)..(858): n is a, c, g, or t
atgcacgagacttttgcccgtttaacaacgacaagcctttccgcccagcttcggagcatggttcacgtccatgtcgcttctgtagatcagcttacttatgaggaatttatccgttctattcccacgccgacaactctcgcgattatcaatatggaccccttaaaaggaaacgccattttggaaattgaccccgcgattactttttccataatcgaccgtcttttcggaggcacgggcgaaggcacgaaatcccagcatgaattgacagatattgagcagtccgtaatggaaggaattatcgtccgtattctgggaaatatgcgcgaagcttggacgacggttatcgacctgcgcccgcgtctcgggcagattgacaccaaccctcagtttgcgcagattgttccgcctacggaaatggtcgtccttgtaactttggaaaccaaagtaggagatgtggaaggcatgatgaacttctgtattccctaccttacgatagagcccattatcagcaaattgtccgcccagttctggtattcatcggtacggcgcaacgctactacagagaacctcaatgtactaaaggagaagcttacaacagtcgatgttaatataacggccgaaatcggaaagattaatgttcctgtaagggacgttctttccttacagataggggatgtaatacggctctacaatacacgcatcggcgatccctattcattaaatatcggctcaaggaaaaagtttctgtgccgccccggcgtacttggaaagaaaatggcggtgcagataacgcagaagattgccgagcttggacaggaagaatttgaagagctcgtatctgaaggagatgaattatga

SEQ ID NO: 69222 - protein, 285 aa, Unknown
  Obtained from environmental sample
  DOMAIN (193)...(270): Surface presentation of antigens (SPOA) protein
  misc_feature (1)..(285): Xaa is any amino acid
MHETFARLTTTSLSAQLRSMVHVHVASVDQLTYEEFIRSIPTPTTLAIINMDPLKGNAILEIDPAITFSIIDRLFGGTGEGTKSQHELTDIEQSVMEGIIVRILGNMREAWTTVIDLRPRLGQIDTNPQFAQIVPPTEMVVLVTLETKVGDVEGMMNFCIPYLTIEPIISKLSAQFWYSSVRRNATTENLNVLKEKLTTVDVNITAEIGKINVPVRDVLSLQIGDVIRLYNTRIGDPYSLNIGSRKKFLCRPGVLGKKMAVQITQKIAELGQEEFEELVSEGDEL

SEQ ID NO: 69223 - DNA, 696 bp, Unknown
  Obtained from environmental sample
  misc_feature (1)..(696): n is a, c, g, or t
gtggcccccttcgcgctcggcaaccaggttcccgttcctgtcgtagtcgtagtaccggttccctatccgctccgccatgtgcgtccccgcgtagtacgcgtaatcaagattgtaattaaggttcacccctatccggttcgtgttgctcacgtactccgtgcttgtcttattggtcatgttccctattctgttaaacgaaaagtcctgccggtaatcggttttatattccacgcccgagccgtaggggtgcgagctgctcgcgcccttcgcttcaatcagctggtacaagccgtcgtacgcgtaattctgactcgtggtgtgcccgtacgccgtgttctcgtaccccagcacgttccctaccgcgtcaaacgtatactttatgtcctggaacgggtgccccatttccgggctctccgtccgtatcgtcgacagccacctgcggtacgggtcgtagctgtactttgtctttaccccgctgccgtattctatgtacaccctctgcccgtattcgtcgtaccctatgttcttcacgtacgggaactccgtccctttgcggtttcccgttactttgcttatctgcccgccccaattgtacccgtagctcaccgcctccccgtcggggtattctatcttctccgtctgccccaggtaattgctctcgtacttcatcgtagccgttttcgtcttcccgcttga

SEQ ID NO: 69224 - protein, 231 aa, Unknown
  Obtained from environmental sample
  misc_feature (1)..(231): Xaa is any amino acid
MAPFALGNQVPVPVVVVVPVPYPLRHVRPRVVRVIKIVIKVHPYPVRVAHVLRACLIGHVPYSVKRKVLPVIGFIFHARAVGVRAARALRFNQLVQAVVRVILTRGVPVRRVLVPQHVPYRVKRILYVLERVPHFRALRPYRRQPPAVRVVAVLCLYPAAVFYVHPLPVFVVPYVLHVRELRPFAVSRYFAYLPAPIVPVAHRLPVGVFYLLRLPQVIALVLHRSRFRLPA

SEQ ID NO: 69225 - DNA, 3237 bp, Unknown
  Obtained from environmental sample
  misc_feature (1)..(3237): n is a, c, g, or t
atgcacccggtgaacggggaaggcggggtaacggtattggcgccggaaacgggcgccgacgggaagcggaggtacgcgctgcggagcgtaacgaacaggcggacggaatggaagagcggggaagattattcgggggaagggagggagccgctttcgtacacggaagagagaaacaccgcggaagccgcggaaggcatggaagacatagaggggctgacaggcggcgtaaagatagaaatacccgaaatgaaatacacggcggaaatcaggccggaaaggatagagctgctgtacgggggggtgaaccggtggtattacgcgatatggataggcgaccaggggcgggacgggcattccttcagccgggaaaaactgtaccggcaaaaaaatgagggcgccgcgggaaacatggaggagcacagagaaaaagcaaatagaatagcgggggaaattaaaaacggcgaagccggccaggaaaatgtgcccgtagtgtattaccagggggtaacggcggcgggccgggcgcaggaggcagccggcaggccgggggagaagctgacggagcgggaatacgggcgggaaataccgggggacgcgcttgtcgggacggtgtcgcggaaggtaaaaaacgaaatagacggggagtcggtaacgacgagggaagagacgtattttcccgcggtgtacgggaaccggatacacgcgacgcgcacggggggcccgagctattacgaaataccggggatgcgccctgcggcgaccggcggagggatggttatgcccgacatccgcagaagccggagcgcgaacaccgacaggtcggtgaacctgtcgaccggctacgacttcggcaggaaaatcctgaacgagcaaatgaccggagacatcaacatcagcagcagcctcaatttcaactccggcacgaacaccggcgattcgtggatgtaccagtcggtgcagggcatgggggggaacgggctggcggacatcctggttgccgagggaaacgggataagggtaacggagggaagccggcaggggtttaacgggagttaccggatagagggaattaaggagatcagccataattccgactatactgaagtgaaagggggaaccgtcggggccaacggagccgtgagcatcgaccataacggatccggcaaggtaacgaggacgattccgaacgggggggcaggggtcaccagcgcgaaaggctccgccaatcagaccgcgggttttgcggacgtgaacggngacggcctccccgattacgtcagcggcggggcggtcaggctgaatttgggcagggacagatgggataccaatcatgaaaacaactttagcgctctggcattacacagcgggagttcggaggcgacggccgtttcgctgtcgctcgggaccggcggcggcccgcccaagcatgacaaagaaacgagcaattcctcgggattcagcgcgggcataggcggcggggtgaactactcggtgtcgatgatggaaacggacgcgatgctgacggacataaacggggacgggctggcggacatggtcagggcggagaacgggatcatgtatgtcaggtacaacctgggcgaccgctttgacggcgaggcgcagttcgccatgcccgactggagccttgacccctggacggagaaaagcagatttgcggcggcaaccgacggcaacatgcaggcgggggtttttaaaaacctgccgctggtgggggacatactgggatggacggggttaggcgacatgctgtccaaaagcggcctgacgataaacccgtacggggttgacattgacaggcacctcaagaagctggaggcgacgtcaaacatatcggcgaacgtaagcctgagcgtgaacatcggcgccggcgccaagatttatattccccctgcgtttagcctgaacctctcggcgggtgccggcgggggcttcagcgtgggggcgaacgtcagcggggtgaacatgcggctgacggacatggacggggacgggctgcccgaccgggtgctgcgggtgcccgcaaccggctatatatacgtgcagcgcaacctgtcgggcagggtggggctgttgcggaagatacgcctgccccagggcggggaatacgcgctggattacagctgggagcggagcacgaaagagatgccgcaaagccgctacgtgctgtcggaagttgtcacgcgcgacaacagcggcaggaacgggctgagaaacccggcgtttcaaagcgcccatgagtacgttatgcgctatacgtacgcggacgggtattacgaccggtgggaaaaagagttctacggttttaagcgggtaacggcgaggccggcggacgggcgggggcaaacgctgggggagacggtgacggagtattacaccgacgcctaccacctgcggggcatggtttccggcgtcacggtaaaagacgagaggggcggaatgctgcggcgggcggaatacgcggcggacgcggcgcctttcgcgcgcgtcgtgagggaaagcgcggaagtacatgaattgcagcaggaagggccgccggttgtaacgagcgccgggtatgagtatgacgcgtacgggaacgtgacgcggctggagcaaagggcaaacgggagcgaaacaataaccgcgcagatacggtactgggacagcgaggcgctgtacctgcacgcgcacccgcgggaaataacggtgcggggatctgattcggggcttttgcgcaaacgtgtcggggaatacgacagcgccaccggggcgcttatatcgctgacccagatgaacggggaaacgtacagcgcgcaggacgggacgagcaggattgaatgggacgcgtgcgggaatatagcgaaaataaccgacccgggcggggctttcgcggagtaccggtacgacgaactgaagcagtatgcggaagagataacggcgggcggcaggggcataccaacgccgtaccgctcgcggatagaatgggacaaagcgctcgggaaaaagacgaaggaaacggacgagaaccggcaggacatagactacgtgtacgacgggtacgggcggcttgccgaagtatggagcccgtacgacagatacgggaagggggggaagacgcccgcggtaagctaccgctacctgacgccggaaacggggaactggagcgcggtgacggaaaacaaggtgaagtttgacagcaacaacgaggacaacgctggccaccgtaataacggttga

SEQ ID NO: 69226 - protein, 1078 aa, Unknown
  Obtained from environmental sample
  misc_feature (1)..(1078): Xaa is any amino acid
MHPVNGEGGVTVLAPETGADGKRRYALRSVTNRRTEWKSGEDYSGEGREPLSYTEERNTAEAAEGMEDIEGLTGGVKIEIPEMKYTAEIRPERIELLYGGVNRWYYAIWIGDQGRDGHSFSREKLYRQKNEGAAGNMEEHREKANRIAGEIKNGEAGQENVPVVYYQGVTAAGRAQEAAGRPGEKLTEREYGREIPGDALVGTVSRKVKNEIDGESVTTREETYFPAVYGNRIHATRTGGPSYYEIPGMRPAATGGGMVMPDIRRSRSANTDRSVNLSTGYDFGRKILNEQMTGDINISSSLNFNSGTNTGDSWMYQSVQGMGGNGLADILVAEGNGIRVTEGSRQGFNGSYRIEGIKEISHNSDYTEVKGGTVGANGAVSIDHNGSGKVTRTIPNGGAGVTSAKGSANQTAGFADVNGDGLPDYVSGGAVRLNLGRDRWDTNHENNFSALALHSGSSEATAVSLSLGTGGGPPKHDKETSNSSGFSAGIGGGVNYSVSMMETDAMLTDINGDGLADMVRAENGIMYVRYNLGDRFDGEAQFAMPDWSLDPWTEKSRFAAATDGNMQAGVFKNLPLVGDILGWTGLGDMLSKSGLTINPYGVDIDRHLKKLEATSNISANVSLSVNIGAGAKIYIPPAFSLNLSAGAGGGFSVGANVSGVNMRLTDMDGDGLPDRVLRVPATGYIYVQRNLSGRVGLLRKIRLPQGGEYALDYSWERSTKEMPQSRYVLSEVVTRDNSGRNGLRNPAFQSAHEYVMRYTYADGYYDRWEKEFYGFKRVTARPADGRGQTLGETVTEYYTDAYHLRGMVSGVTVKDERGGMLRRAEYAADAAPFARVVRESAEVHELQQEGPPVVTSAGYEYDAYGNVTRLEQRANGSETITAQIRYWDSEALYLHAHPREITVRGSDSGLLRKRVGEYDSATGALISLTQMNGETYSAQDGTSRIEWDACGNIAKITDPGGAFAEYRYDELKQYAEEITAGGRGIPTPYRSRIEWDKALGKKTKETDENRQDIDYVYDGYGRLAEVWSPYDRYGKGGKTPAVSYRYLTPETGNWSAVTENKVKFDSNNEDNAGHRNNG

SEQ ID NO: 69227 - DNA, 603 bp, Unknown
  Obtained from environmental sample
  misc_feature (1)..(603): n is a, c, g, or t
atgaaattctggtttgccacaaataacgcccataaaaaacaggaacttgaagctgtcttaaaaacaaaactttttatcccttgcgaagaagggataaagtttaaccccgatgaaacaggaaaaaccttttacgaaaattcacttcttaaagcgcgtgagttaaaaaaattgctttccggcaatgacaatcttgtaatcgccgatgattccggtctttgcgtagacgctcttgacggcagacccggcgtattttcggcgcgttacggagaggcaaacggcaagaaattgacaagcgctcagcaaaacattttgcttcttgatgaattaggcgaaacagaaaacagaagcgcgcgttttgtctgcgccatgactcttttaggagaaaccgaaaatttttacattgttcaggaaactcttgagggggagatagtaaggaagagcggaatgaagggggacggcggcttcggttacgaccctattttttggctgccgtcctttggccgcactctggcggaactttccgcggaagagaaaaatgacattagccatcgcggaaaagcggggaaacttattgctgatatattgttacattttaacaaatag

SEQ ID NO: 69228 - protein, 200 aa, Unknown
  Obtained from environmental sample
  DOMAIN (3)...(195): Ham1 family
  misc_feature (1)..(200): Xaa is any amino acid
MKFWFATNNAHKKQELEAVLKTKLFIPCEEGIKFNPDETGKTFYENSLLKARELKKLLSGNDNLVIADDSGLCVDALDGRPGVFSARYGEANGKKLTSAQQNILLLDELGETENRSARFVCAMTLLGETENFYIVQETLEGEIVRKSGMKGDGGFGYDPIFWLPSFGRTLAELSAEEKNDISHRGKAGKLIADILLHFNK

SEQ ID NO: 69229 - DNA, 2049 bp, Unknown
  Obtained from environmental sample
  misc_feature (1)..(2049): n is a, c, g, or t
ttgtctaagatcagcgttgaaacgcagcttaacgagccgcagacgcaggcagtacatactgtcgaggggccggtacttatcattgcgggagcgggttcggggaagacgcgggttattacttaccgtatcgcttatatgcttgagaagggaattccgcagtcgtcaatattggcgctcacctttacaaataaagctgcgcgcgagatggaaacgcggataaaacaattaacgcataaaaaactgcaaagcttgagtataagcacctttcacgcgtttggcttgaaaataatcagggacgaagcggaattgcttggttacagaaagaatttttccgtttacgacgagaccgacaagatttccctgattaaggaatctttgagggaatgccgtatgttttcagttaaagttgacctttacgccttaagccagtttttttcgaggataaaaacggggcttgcgctatggaacgaaaacgccgacatgaaacctgtttatgaggaatacaaccaggcgttaaaaatttacaacgctgttgattttgacgatctgttaactgttcctctggaactgcttaataaaaactcggatgttcttttaaaatacaaaaaaaaatacagttatattttaattgacgagtttcaggatacaagtttaatacaatataaattgatgaggcttcttgcttcggaaaaaaacgcgaatatttgcgcagtcggcgacgatgaccagtcaatttattcctggcggggcgcgaattacgaaaacatactgttgtttgaaaaagattttcccgacagaacggaaatcaagctggagcaaaattaccgctccactacaacaattcttgacgcggcaaacggcgttatctcgcacaataagggcagaaaagggaaaaacctgtggtcgcgggataagtcgggaaaaccaatagaacttttttacccggaaaatgagactgccgaagctgattttatcgcggaacggataaaacatttgactataacagaagattacaaataccacgattttggagttttaacaaggacaaactcccttatgcgaaatatagaagaatcttttcttgcggataacattccctaccgtgtttcgggagggacaagtttttttcagcgcaaggaaataaaggacataatctcctatttgcgcgtaatttccaacacttacgacgatgtaagccttttgcggatcatcaatactccgcgcaggggcataggcaaaacaactgtcgcctcgttaaacgaacttgcgaaaaaaaaccatatatgcatttgggacgcccttgcccgcaggatttacgcccattcacagggacagcaaaatctttttgacgacaataaagcgcttaccgaattggaagaattttccgcaatgatagaaaattttcagactctcatgcttgaacgccaacctataaacggaaaaccgtggaaactatcccaatgtgtgcgcacattagttgataatatcgactactggagctaccttgttcttgaacacggaaaagacgaaaagaaagcccgctggaaattcgccaacatagaatattttataaggatgattgaaaactgggaaaacgaccccgacaatcttgacgcgggcatttacccgtggcttaaccggataagccttatcacgagggacgacggagaggacgacaatgaaggcaaagtaaacctttccacaattcacgccgccaaggggcttgagtttcccgttgtttttatcgcgggcgtggaaaagggattaattccccacgagaaaagcgttattgaggacgaagacgaagccggaagcgtagaagaagaaaggcgtcttttttatgttgcgattacaagggcgagggaaaaattgtacataacatgctgccgaaaacgccggcaccttcaaaccgcggatgaatgtgagccttcgccgtttctcgcggaaattccgcctgagctggttaaataccacgaaaaagagcctgatgttattgacgatgcgaaagcggatgagtacatggcgaagattagggcgatgatgaagtaa

SEQ ID NO: 69230 - protein, 682 aa, Unknown
  Obtained from environmental sample
  DOMAIN (10)...(478): UvrD/REP helicase
  misc_feature (1)..(682): Xaa is any amino acid
MSKISVETQLNEPQTQAVHTVEGPVLIIAGAGSGKTRVITYRIAYMLEKGIPQSSILALTFTNKAAREMETRIKQLTHKKLQSLSISTFHAFGLKIIRDEAELLGYRKNFSVYDETDKISLIKESLRECRMFSVKVDLYALSQFFSRIKTGLALWNENADMKPVYEEYNQALKIYNAVDFDDLLTVPLELLNKNSDVLLKYKKKYSYILIDEFQDTSLIQYKLMRLLASEKNANICAVGDDDQSIYSWRGANYENILLFEKDFPDRTEIKLEQNYRSTTTILDAANGVISHNKGRKGKNLWSRDKSGKPIELFYPENETAEADFIAERIKHLTITEDYKYHDFGVLTRTNSLMRNIEESFLADNIPYRVSGGTSFFQRKEIKDIISYLRVISNTYDDVSLLRIINTPRRGIGKTTVASLNELAKKNHICIWDALARRIYAHSQGQQNLFDDNKALTELEEFSAMIENFQTLMLERQPINGKPWKLSQCVRTLVDNIDYWSYLVLEHGKDEKKARWKFANIEYFIRMIENWENDPDNLDAGIYPWLNRISLITRDDGEDDNEGKVNLSTIHAAKGLEFPVVFIAGVEKGLIPHEKSVIEDEDEAGSVEEERRLFYVAITRAREKLYITCCRKRRHLQTADECEPSPFLAEIPPELVKYHEKEPDVIDDAKADEYMAKIRAMMK

SEQ ID NO: 69231 - DNA, 1965 bp, Unknown
  Obtained from environmental sample
  misc_feature (1)..(1965): n is a, c, g, or t
ttggttgagaaaaacataaaatatgtggatcgggttttgcctacggggaaggacaaagagcccaggcattacagaattaatatcgcgccgatgctgaacgccaaagaagtgcttgaaggcataatcctcctgttctatgatcttacggaaatcatggcggccaaagaacaggcggaacaggccagcagggcaaaatcggtttttctcgcccagaccagccatgaaatccgcactcccatgaacaccgtgattggcatgagcgaactggcccttcgcgcggataccctgccccaggcccaggagtatcttgggagcatcaagcaggccggccttaatcttctggctatcatcaatgacatccttgacatttcaaagatcgaagccggcacaatggaaatagaaaacgccccttattcgctttccacccttattaacgatgtggttaccatgatccagataaaagtcgcggagaagcccatcatctttcttgttgatgtggacgcttctcttcccaatatgcttaaaggtgacgaagcgaggatacggcaggttctggtaaacctgctttccaacgcggttaaatacacccataaagggtttatccggctgacattgacataccatgtcgatccgtttgacagcaatgtgattaggcttgtttatgaagtttcagattcgggcgttggcatacataaagatgatctgcgtaatctgttccgctcgtttacacgcctggacatgaaaaaaaaccagggcgtggaaggagccggccttgggctcgcgattagcaaaagcatctgcatggcaatgggcggcgatgtaagcgccgacagcaagtacggcgaaggttctatctttacggcggttcttccccagattatcgacggaaaagaacctatcgcgctggtggaaaacccgaatgaaaaatccgttctttactatgaaaaacaaccgctttacgccaaatcaatggtttttgccctgggaaacatgggcgtacccgtgacgcttaaaacaaatgcggaagaatttttgcaggctctttccggcgggaattatcactttgcctttatcagcgccgatattgccgaaaaagcaagagaagccaaaaaaaacaaatcgcttgccactacccttgttctgcttgccaataccatggaaaccataacgttcaggaatatgcccgtattattcaggccggcatatgccattccgctggccaatgtgcttaaccaccagacgggaacagtgtcgaaatcacaggggctgcattttatcgcgccggacgcgcgaatccttgtggtggatgatattcaaaccaacctggtcgtcacttcggggcttttggctatatacaagagccatgtcgatacctgtaccagcggggccgccgctatttcaatagtgcagaacaaacgctatgatatagttttcatggatcacatgatgccggaaatggacggcattgaaacgacaaagatactgcgcgagctgggatataacaatcccatcatcgcgctgacagccaacgccctggtggggcaggctgaaatgtttatgcaaaacggattcgacggctttatttccaaacctatagacgtgcgccaactgaacgccacgctgaacaaaattatacgggacagacagccgtttgaagtgattgacgccgcgcgctggcaaaaggcggccaggcaggccgctgaaacagcgccgccgaccgatgcgccgctgacggatgaggatcaggcgtttctgcgtgaaaaactgctaatgatccggacggcatgcgaggcgcgcgacaaacagaccgcgaaaaacacgcttatagagctaaagcgcaaaacctggcctcgtctgaccaaagacctgctgaataccattgttgaacatgtgctaaagggcaattttgacgaggcggcgagccttgcgggggattataccggcgggcagacgacaaacgcataa

SEQ ID NO: 69232 - protein, 654 aa, Unknown
  Obtained from environmental sample
  DOMAIN (64)...(129): His Kinase A (phosphoacceptor) domain
  misc_feature (1)..(654): Xaa is any amino acid
MVEKNIKYVDRVLPTGKDKEPRHYRINIAPMLNAKEVLEGIILLFYDLTEIMAAKEQAEQASRAKSVFLAQTSHEIRTPMNTVIGMSELALRADTLPQAQEYLGSIKQAGLNLLAIINDILDISKIEAGTMEIENAPYSLSTLINDVVTMIQIKVAEKPIIFLVDVDASLPNMLKGDEARIRQVLVNLLSNAVKYTHKGFIRLTLTYHVDPFDSNVIRLVYEVSDSGVGIHKDDLRNLFRSFTRLDMKKNQGVEGAGLGLAISKSICMAMGGDVSADSKYGEGSIFTAVLPQIIDGKEPIALVENPNEKSVLYYEKQPLYAKSMVFALGNMGVPVTLKTNAEEFLQALSGGNYHFAFISADIAEKAREAKKNKSLATTLVLLANTMETITFRNMPVLFRPAYAIPLANVLNHQTGTVSKSQGLHFIAPDARILVVDDIQTNLVVTSGLLAIYKSHVDTCTSGAAAISIVQNKRYDIVFMDHMMPEMDGIETTKILRELGYNNPIIALTANALVGQAEMFMQNGFDGFISKPIDVRQLNATLNKIIRDRQPFEVIDAARWQKAARQAAETAPPTDAPLTDEDQAFLREKLLMIRTACEARDKQTAKNTLIELKRKTWPRLTKDLLNTIVEHVLKGNFDEAASLAGDYTGGQTTNA

SEQ ID NO: 69233 - DNA, 1557 bp, Unknown
  Obtained from environmental sample
  misc_feature (1)..(1557): n is a, c, g, or t
ttgcgccctaatacatgtatggatgtatatgtgcggaaaacagatcccctttggcatgctgtcagcagtctgtttgggctttcataccttttcccctatcagcggctggtagtggcgaatatacttgaggcggctgaagcggcagggcttactttgaactggccccaacaaagcggcttgtcaaaccaggtcaataatgatatgaccttgcaaaatgatgagcccacgcaccggggctgcctgggacggcagatagttattctgccgacgggcgcgggaaaatccctctgcttccaactgcctgcaatgttgatagaagggctgactcttgtcatctatccgattttatcgctgatggcggatcaacagaggcgtttaagcgagcgcggtttttccccggtaacgattaggggcggacaaagcaaggaagagcgcgatgagatttggcaaaaattggaaagcgggcaaagccggtttataatagcaaacccggaagtgctgcttacagcgcaggtaaaagaaaaactggaaaaaataaaagttgttcacgttgtgattgacgaggcgcactgtgtcagcgaatggggagaaagtttccgtccaagttacctggaaatcggctccatcataaattctcttaatccgccgcttgttaccgcttttaccgccacagcaagcgcccccgtacttgaaaaaataaaaagatacattttcggcagctgcgatgttaatcaaatcgcgggcaaccccgacagacctaatatttattacaccgcaaaaggctgcataataagaaaccttgccgtgcgggatctgctggtacaaaacgcccgccccgcgattgtgttctgctcatccaggccgggcacggagaaccttgcccgttatctcagaatcagcctgggggaaatgggcatggactggcataacgagatacgtttttatcacgccggtttaagcagggaagaaaaatccaacgtggaaaaatggttcatgggaaacagccgggccgtgttatgcgcaacatgcgcctacgggatgggggtggacaaagccgacatacgcacggtcatacacagggactgcgccccttccgtggaggcgtatctgcaggaatcgggaagggcgggccgcgacggctcccaatcaaaggctatcctcctgtggggcccggacgacaaaatgagcctgcagcgcgctaaaacggacgcggaccgcataaggctttccggccttttggattacgcgcgcgacacaactcaatgcagaaggcaggcccttttaaaaatgctcaactacgacagcgatggcgccgataacggcggcgaaagcccggaaacccaatgctgtgacgtgtgcgaacatgaggcaagcgccgcgttacgcgaagaagcaagcgtcctggattttttccacagaaacaaacgctgttattcgataaatgaggcggtgggtaaattggcgcaatcggaaagccattactggtcagagggagaggcgaagcagacgattaatcatttgcttgccgtggcaagatcaagactcgtgccgatctga

SEQ ID NO: 69234 - protein, 518 aa, Unknown
  Obtained from environmental sample
  DOMAIN (27)...(227): Type III restriction enzyme, res subunit
  misc_feature (1)..(518): Xaa is any amino acid
MRPNTCMDVYVRKTDPLWHAVSSLFGLSYLFPYQRLVVANILEAAEAAGLTLNWPQQSGLSNQVNNDMTLQNDEPTHRGCLGRQIVILPTGAGKSLCFQLPAMLIEGLTLVIYPILSLMADQQRRLSERGFSPVTIRGGQSKEERDEIWQKLESGQSRFIIANPEVLLTAQVKEKLEKIKVVHVVIDEAHCVSEWGESFRPSYLEIGSIINSLNPPLVTAFTATASAPVLEKIKRYIFGSCDVNQIAGNPDRPNIYYTAKGCIIRNLAVRDLLVQNARPAIVFCSSRPGTENLARYLRISLGEMGMDWHNEIRFYHAGLSREEKSNVEKWFMGNSRAVLCATCAYGMGVDKADIRTVIHRDCAPSVEAYLQESGRAGRDGSQSKAILLWGPDDKMSLQRAKTDADRIRLSGLLDYARDTTQCRRQALLKMLNYDSDGADNGGESPETQCCDVCEHEASAALREEASVLDFFHRNKRCYSINEAVGKLAQSESHYWSEGEAKQTINHLLAVARSRLVPI

SEQ ID NO: 69235 - DNA, 1995 bp, Unknown
  Obtained from environmental sample
  misc_feature (1)..(1995): n is a, c, g, or t
gtgcttacccctacgctggataatttttcctgcgatcttagcgcgcttgcgaaagccggcaaactggatccggtaatcggcagggaaaaagagatgaaccgcattgtgcgaatactcgccagacgggcaaaaaacaatcccatactggtgggggagcccggtgtcggcaagactgccatagtagagggcctggcccagcttcttgtttccaaagacgcgcctgaagctctttcgggcaaacgcatactttccctggacatgggctcaatagtcgccggaaccaagtaccggggcgaatttgaagaaaggataaaaaaaatcaccagggaaattacacaggccggaaatgttattctgttcatcgacgaaatacataccataatcggggcgggaggagctgaaggaacaattgacgcttccaatatgcttaaaccgggcctttcccgcggcgacatacagtgcataggggctactacgctttcggaataccgcaagcattttgaaaaagatccggcccttgagcgccgtttccaggccattctagttgaggaaaccagcgtggatgaaaccctgcaaatacttcacggcatccggaaaaaatacgaagaccaccataaagtgtcatacaccgacgcggccgtcgaactgacggtaaaactcgcgaagcgttatgttaccggccgtttcatgcctgacaaggcaatcgacatccttgacgaagccggggctatgcggaaactggaatacaacgacagcgatgaaccgcctgaaatagcgggcattgagacggaaatcaacaacctgaccgaggaaaaaagcgttctggtgaacgcccaggattacgaacacgcggcagtggtcagggacaaggtccgggtcttaaggtcccgccttgagtccgcccgtatcgcatgggaacacgcgtacaacaaggaacagttaaaggttgacgaagacgatatccgccgcgtggtctcacaggctaccggcattcccctgatgcaccttgccgaacaaaaatcaaaaaaactgctccatatggaagcggaaatccacaagcgggtaatcggccaggacgacgctgtacagcggatctgttcggcaatacgccgctcccacgcgggcgtctcatccccccgccgccctatgggttcattcatctttttggggcctaccggcgtagggaaaaccctgcttgccaaacgccttgcggaatacctgttcggaaccgaggaatcgctggtacgcattgatatgtccgattacatggaaaaacacaatacctcaaggcttacgggcgccccgcccggctatatcggctacgaagaaggcggaatgcttaccgagaaaatcaggcgcaacccgtaccgggtaatactttttgacgaaatggaaaaagcccaccaggatgttttcaacctgctcttgcaggtgatggaagaaggggaactgcgcgacaacctgggtcatacggtaagtttccgcaataccgttatcataatgaccagcaacgcgggcgtcagggagatttcccgcgaatccaggcttggtttcggagcaggttcaggtttgttaagccagagcgagattgaatcccaggcgaccggcgagttaaaacgcctgttcccccctgaattcctgaaccgcgtggacgacgtagttgttttccaccccctgagcattgatcagatagataatattctggagattgaactggccgacctgtccgaccggcttgcggaacagaattacagtattgacttatcgccgcaggccaggggtttgcttgtcgagaaaggctgggatcccaaattcggcggaaggcccctgcgccgtaccttgcagaaagaacttgaagatccccttgcccgcctcctcatggaacatgactggcccaaagggactgtttttaccgcaaacatctgcgacggcaagatagagcttacaggcaatatttcttacgttgatgaatggaaatcaaggacgaagaattaa

SEQ ID NO: 69236 - protein, 664 aa, Unknown
  Obtained from environmental sample
  DOMAIN (333)...(572): Torsin
  misc_feature (1)..(664): Xaa is any amino acid
MLTPTLDNFSCDLSALAKAGKLDPVIGREKEMNRIVRILARRAKNNPILVGEPGVGKTAIVEGLAQLLVSKDAPEALSGKRILSLDMGSIVAGTKYRGEFEERIKKITREITQAGNVILFIDEIHTIIGAGGAEGTIDASNMLKPGLSRGDIQCIGATTLSEYRKHFEKDPALERRFQAILVEETSVDETLQILHGIRKKYEDHHKVSYTDAAVELTVKLAKRYVTGRFMPDKAIDILDEAGAMRKLEYNDSDEPPEIAGIETEINNLTEEKSVLVNAQDYEHAAVVRDKVRVLRSRLESARIAWEHAYNKEQLKVDEDDIRRVVSQATGIPLMHLAEQKSKKLLHMEAEIHKRVIGQDDAVQRICSAIRRSHAGVSSPRRPMGSFIFLGPTGVGKTLLAKRLAEYLFGTEESLVRIDMSDYMEKHNTSRLTGAPPGYIGYEEGGMLTEKIRRNPYRVILFDEMEKAHQDVFNLLLQVMEEGELRDNLGHTVSFRNTVIIMTSNAGVREISRESRLGFGAGSGLLSQSEIESQATGELKRLFPPEFLNRVDDVVVFHPLSIDQIDNILEIELADLSDRLAEQNYSIDLSPQARGLLVEKGWDPKFGGRPLRRTLQKELEDPLARLLMEHDWPKGTVFTANICDGKIELTGNISYVDEWKSRTKN

SEQ ID NO: 69237 - DNA, 546 bp, Unknown
  Obtained from environmental sample
  misc_feature (1)..(546): n is a, c, g, or t
atggcctggaaacggcgctcaagggccggatctttttcaaaatgcttgcggtattccgaaagcgtagtagcccctatgcactgtatgtcgccgcgggaaaggcccggtttaagcatattggaagcgtcaattgttccttcagctcctcccgccccgattatggtatgtatttcgtcgatgaacagaataacatttccggcctgtgtaatttccctggtgattttttttatcctttcttcaaattcgccccggtacttggttccggcgactattgagcccatgtccagggaaagtatgcgtttgcccgaaagagcttcaggcgcgtctttggaaacaagaagctgggccaggccctctactatggcagtcttgccgacaccgggctcccccaccagtatgggattgttttttgcccgtctggcgagtattcgcacaatgcggttcatctctttttccctgccgattaccggatccagtttgccggctttcgcaagcgcgctaagatcgcaggaaaaattatccagcgtaggggtaagcacggggtaa

SEQ ID NO: 69238 - protein, 181 aa, Unknown
  Obtained from environmental sample
  misc_feature (1)..(181): Xaa is any amino acid
MAWKRRSRAGSFSKCLRYSESVVAPMHCMSPRERPGLSILEASIVPSAPPAPIMVCISSMNRITFPACVISLVIFFILSSNSPRYLVPATIEPMSRESMRLPERASGASLETRSWARPSTMAVLPTPGSPTSMGLFFARLASIRTMRFISFSLPITGSSLPAFASALRSQEKLSSVGVSTG

SEQ ID NO: 69239 - DNA, 645 bp, Unknown
  Obtained from environmental sample
  misc_feature (1)..(645): n is a, c, g, or t
atgagtaaatcctgggttacattctcgcgttatatttttaatacggtatttattacagttgtcggaactgtcggcttgattattgtcgcgtctatgggcgcgtttgttgtttcaaaatacaaatttcccggttcaaaaattttctttaacggcgtaattataacccttatgttctcaggctatgtaacggctattcccaactaccttgttatggcgcgcctcggctgggtggatacttacctttcagtaattgttcccgcgtgggcaatgcctatgggattcttcttattaaagcaatttattgacacaatacctgatactttgctggaggcggcaaaggtagacggcgcgaaagagtttcgtatttttatatggatagttctgccgatgattaaaccggcatggcttaccgtaatgattttctccgttcaaaacctttggaacgcaagagcgtccaattatatttattcggaacaattaaaaacgctgccgtactctctcggtcaaattatcacaggcggtattgcgcgcgccggcgtaggagccgccgtaacgctttttgtaatgattgttccgcttgtgatgtttatatttgcccagagcaatgttttacagacaatggcaaattcaggaataaaggaataa

SEQ ID NO: 69240 - protein, 214 aa, Unknown
  Obtained from environmental sample
  DOMAIN (8)...(214): Binding-protein-dependent transport system inner membrane component
  misc_feature (1)..(214): Xaa is any amino acid
MSKSWVTFSRYIFNTVFITVVGTVGLIIVASMGAFVVSKYKFPGSKIFFNGVIITLMFSGYVTAIPNYLVMARLGWVDTYLSVIVPAWAMPMGFFLLKQFIDTIPDTLLEAAKVDGAKEFRIFIWIVLPMIKPAWLTVMIFSVQNLWNARASNYIYSEQLKTLPYSLGQIITGGIARAGVGAAVTLFVMIVPLVMFIFAQSNVLQTMANSGIKE

SEQ ID NO: 69241 - DNA, 1758 bp, Unknown
  Obtained from environmental sample
  misc_feature (1)..(1758): n is a, c, g, or t
atggcttaccgtaatgattttctccgttcaaaacctttggaacgcaagagcgtccaattatatttattcggaacaattaaaaacgctgccgtactctctcggtcaaattatcacaggcggtattgcgcgcgccggcgtaggagccgccgtaacgctttttgtaatgattgttccgcttgtgatgtttatatttgcccagagcaatgttttacagacaatggcaaattcaggaataaaggaataaatatgaaaaaattaaaattattttttaaatataagcaatgttttacatatccctcattgctcattgctcattgctcattacttctcttccttctctccgttatgttatttaccaccgcgttttcgctccacgccgagcctaccaactacacctacaattacgatttttggtgggaacaagtcgcttcgcccgacgcgtaccgcgtgagtaattatatacttggaacttctttgggaatagggcactttagggatcctcaagggttatttatccgcgaaaaccgtatttacgtctgcgattccggaaataaccggataataaaaatcgaagttgatgaaaacggcaaacataccgttaaagaaaatgtttcttccgtggtaattaacggagtggtatcgccctttaattatcctatggatatttttgaaaacagagacggtaatctttttattacggacactaataacaaccgtgtgcttatacttgataataattggaaatatattagtgcaatcgaaaaacctgatgatgagagccttgacgaatttacggattttattcccgtaaaaattgttgttgattttgcaaaccgtgtttttattcaagcgcaaaacatcaacaaaggacttatggagtttgacagccggtgggaattttccggttatatgggcgcgaataaagtagttgttagtcccgttgattatatatggaaacttctttctactcaggcgcaaaaagaacgcatggaccttttcattccgacagagtacagcaatgttgccatggataaagagggatttgtttatgttaccaactctacagggcagacgaagcctgtcaggcggcttaacgcgatggggcaggatattttgattcgtaacggttatgaggaaccggtaggcgatttagctgaaggtaacgcggcgggcatacgaggacgttcccgttttattgatgtggtagcttttgataacgattcttatgcttgttttgacagggcgcgcggacgcatttttatgtacgattttcaaggaaatatgttatacgctttcggcggagtcggtaaccgcgaaggttctttcattcagccgaccgcgcttgacagaatgggatactctttatacgcgcttgattcaagagccgctactcttacgcgttttgatcttactaagtatggcgagttaattaacgatgcgttagatgaatacaaagccggtcgttatgaaacttcggcggtactttgggaagaagttttaaaaatgaacggaaattatgacttggcatacatcggaataggacgcgccgctcttaggcagaaagaatttcaaaaagccatgaaatactataagttaaaacattaccgcgaaggttacggaaaagctttccagttgtatcgtaagcaatggacggaagaaaacctctggtggatacttttaattatcgggttggctgttgttctgccgtttgctattccatttacaattaaaaccatcaaggagattaaggaagcatga

SEQ ID NO: 69242 - protein, 585 aa, Unknown
  Obtained from environmental sample
  DOMAIN (216)...(243): NHL repeat
  misc_feature (1)..(585): Xaa is any amino acid
MAYRNDFLRSKPLERKSVQLYLFGTIKNAAVLSRSNYHRRYCARRRRSRRNAFCNDCSACDVYICPEQCFTDNGKFRNKGINMKKLKLFFKYKQCFTYPSLLIAHCSLLLFLLSVMLFTTAFSLHAEPTNYTYNYDFWWEQVASPDAYRVSNYILGTSLGIGHFRDPQGLFIRENRIYVCDSGNNRIIKIEVDENGKHTVKENVSSVVINGVVSPFNYPMDIFENRDGNLFITDTNNNRVLILDNNWKYISAIEKPDDESLDEFTDFIPVKIVVDFANRVFIQAQNINKGLMEFDSRWEFSGYMGANKVVVSPVDYIWKLLSTQAQKERMDLFIPTEYSNVAMDKEGFVYVTNSTGQTKPVRRLNAMGQDILIRNGYEEPVGDLAEGNAAGIRGRSRFIDVVAFDNDSYACFDRARGRIFMYDFQGNMLYAFGGVGNREGSFIQPTALDRMGYSLYALDSRAATLTRFDLTKYGELINDALDEYKAGRYETSAVLWEEVLKMNGNYDLAYIGIGRAALRQKEFQKAMKYYKLKHYREGYGKAFQLYRKQWTEENLWWILLIIGLAVVLPFAIPFTIKTIKEIKEA

SEQ ID NO: 69243 - DNA, 657 bp, Unknown
  Obtained from environmental sample
  misc_feature (1)..(657): n is a, c, g, or t
atgaaataccttaataataaagaatggtggaaacacctagggaaaacgcttaaatactcgctgtatgtttgcacgcatccgcttgatggtttttgggatttaacgcatgaaaaacgcggttctatcggcgcggcaaatgttattatcggttttgccgttatagtggaagttcttcgcctaacattaacaaattttcaatttgttacaataaacatggaatattttaattctgttattgtcgccctgcgaattcttttgccggtaggtttgtggactgtggcaaactggagtcttacaactcttatggacggcaaaggacgaatgtttgaaatttatatgtctgtttgttacgcgctcacgccgtatgtaatcatcaatgcgattatgatactgttaagccagtttatcactttcgatgaaggcgcgatttactgggtgcttgcgagttttgccgctatatggacgggtatacttatacttgccggtatgatgatggttcacgattacagtcttgtaaaaacagtattttccagcctgcttacggtagtgggaatgggcgtaatggtgtttatatttgtaatatttttcagccttataagcgatgcagtttcttattttgtatcgctgtataaagaaatattgttcaggttgatatag

SEQ ID NO: 69244 - protein, 218 aa, Unknown
  Obtained from environmental sample
  misc_feature (1)..(218): Xaa is any amino acid
MKYLNNKEWWKHLGKTLKYSLYVCTHPLDGFWDLTHEKRGSIGAANVIIGFAVIVEVLRLTLTNFQFVTINMEYFNSVIVALRILLPVGLWTVANWSLTTLMDGKGRMFEIYMSVCYALTPYVIINAIMILLSQFITFDEGAIYWVLASFAAIWTGILILAGMMMVHDYSLVKTVFSSLLTVVGMGVMVFIFVIFFSLISDAVSYFVSLYKEILFRLI

SEQ ID NO: 69245 - DNA, 846 bp, Unknown
  Obtained from environmental sample
  misc_feature (1)..(846): n is a, c, g, or t
atgaaaccttcgtattgtgcctcctcgtcgctggggcctttgccgccccctctgcaaagcccaggttccgcctggggtctcaacaagatcgttggtggcactgatgcctcacctggagagctgccttaccaactcagcttccaggacatgtccttcggctctggcttccacttctgtggtgcttccatctacaatgagaactgggccatctgtgccggccactgcgtccagggagaggacttcaacaaccctgactacctccaggtcgtggctggtgagctggacatggatgtagatgaaggtaatgaacaggctgtagtcctgtcccagatcatccaacatgaggactacaacggcttcaccatcagcaacgacatttctctgttgaagctctcccggccactcactttcacctcctttgtagcccccatcgctattcctgcccaaggccaggttgccactggtgactgtatcgtgtctggttggggttcactgactgagggaggcagcagcccatctgttctgcagaaggttactgttcctattgtgtcagatgaagagtgccgcgctgcttatggagagagtgatgtcgaagactctatgatctgtgctggtgtacctgagggaggcaaggactcttgccaagtgactctggtggccccttcgcttgcagcgatactggctccacctacctggctggtatcgtgtcctggggttatggctgtgcccaccctggctatcctggcatgtactgcgaagtctcttacttcgttgactggatcctggccaacgctgtctaagttacaaactgttattctcagggtacctggataccccataaactaa

SEQ ID NO: 69246 - protein, 281 aa, Unknown
  Obtained from environmental sample
  DOMAIN (30)...(256): Trypsin
  misc_feature (1)..(281): Xaa is any amino acid
MKPSYCASSSLGPLPPPLQSPGSAWGLNKIVGGTDASPGELPYQLSFQDMSFGSGFHFCGASIYNENWAICAGHCVQGEDFNNPDYLQVVAGELDMDVDEGNEQAVVLSQIIQHEDYNGFTISNDISLLKLSRPLTFTSFVAPIAIPAQGQVATGDCIVSGWGSLTEGGSSPSVLQKVTVPIVSDEECRAAYGESDVEDSMICAGVPEGGKDSCQVTLVAPSLAAILAPPTWLVSCPGVMAVPTLAILACTAKSLTSLTGSWPTLSKLQTVILRVPGYPIN

SEQ ID NO: 69247 - DNA, 957 bp, Unknown
  Obtained from environmental sample
  misc_feature (1)..(957): n is a, c, g, or t
atgagtaaatcacacccgcgctggcgcttagcaaagaagatcctcacctggctgttttttatcgcggtgattgtgttgctggtggtctacgccaaaaaagtggactgggaagaggtctggaaggtcatccgcgactacaatcgcgttgcgctgcttagtgcggtcgggctggtggtcgtcagctatctgatttacggctgctatgacctgctcgcccgcttttactgcggtcacaaactggcgaagcgccaggtgatgctggtgtcgtttatctgctacgccttcaacctgacgctcagtacctgggtcggcggcattggtatgcgctatcgtttgtactctcgtctggggttgcccggtagcactattacgcggattttctcgctcagtattaccaccaactggctgggctacattttactggcagggattatctttaccgcaggcgtggtggagttgccggatcactggtatgtcgatcaaactacgctgcgtattctcggcattggcttactgatgattatcgcggtttatttgtggttttgcgctttcgcgaagcaccgccatatgaccatcaaagggcaaaagctggtgctgccttcatggaaattcgccctcgctcagatgctgatttccagcgttaactggatggtaatgggggcgattatctggctgttacttggtcaaagcgtgaactatttctttgtactgggcgtgttactggttagtagtattgctggcgtcatcgtgcatattccggcggggatcggtgtgctggaagcggtgtttatcgcactactggctggggagcatacctccaaaggtacaattatcgccgccctactcgcttaccgtgtgctgtattactttatcccactgctgctggcgctgatctgttacctgttgctggaaagccaggcgaagaagctacgggcgaaaaatgaagcggcgatgtga

SEQ ID NO: 69248 - protein, 318 aa, Unknown
  Obtained from environmental sample
  misc_feature (1)..(318): Xaa is any amino acid
MSKSHPRWRLAKKILTWLFFIAVIVLLVVYAKKVDWEEVWKVIRDYNRVALLSAVGLVVVSYLIYGCYDLLARFYCGHKLAKRQVMLVSFICYAFNLTLSTWVGGIGMRYRLYSRLGLPGSTITRIFSLSITTNWLGYILLAGIIFTAGVVELPDHWYVDQTTLRILGIGLLMIIAVYLWFCAFAKHRHMTIKGQKLVLPSWKFALAQMLISSVNWMVMGAIIWLLLGQSVNYFFVLGVLLVSSIAGVIVHIPAGIGVLEAVFIALLAGEHTSKGTIIAALLAYRVLYYFIPLLLALICYLLLESQAKKLRAKNEAAM

SEQ ID NO: 69249 - DNA, 714 bp, Unknown
  Obtained from environmental sample
  misc_feature (1)..(714): n is a, c, g, or t
atggaatcatactcgcaaaacagcaataaattagattttcagcacgaggccaggatattaaacggtatatggctcattaccgctttaggtttggtggcaaccgcaggactagcctggggagctaagtatatcgaaattacggcaaccaaatatgattcaccaccaatgtatgtcgccatagggttattattactttgtatgtatggcttaagtaaggatatcaacaagataaatgccgccatcgcgggcgtaatatatctgtttttactctctttggtggcgattgtcgttgcaagtttagttcctgtatatgccattatcatcgtgttcagcactgcgggcgcgatgtttttaatcagtatgctggccggtttattatttaatgttgatcctggttctcaccgttttatcattatgatgacgttgacagggttggccctggtaatcatcgtgaatgcggcattaatgagtgaacggcccatttggataataagttgcttaatgattgtgttatggtcaggcattatctcgcatggacgaaataagctccttgaattggcggggaaatgccatagtgaagagttgtggagtccggttcgttgcgcttttacaggtgcattaacactctattactattttatcggcttctttgggatacttgccgcgatagctataacgcttgtctggcaaaggcatacgcgtttttttcattag

SEQ ID NO: 69250 - protein, 237 aa, Unknown
  Obtained from environmental sample
  DOMAIN (9)...(228): Uncharacterised protein family UPF0005
  misc_feature (1)..(237): Xaa is any amino acid
MESYSQNSNKLDFQHEARILNGIWLITALGLVATAGLAWGAKYIEITATKYDSPPMYVAIGLLLLCMYGLSKDINKINAAIAGVIYLFLLSLVAIVVASLVPVYAIIIVFSTAGAMFLISMLAGLLFNVDPGSHRFIIMMTLTGLALVIIVNAALMSERPIWIISCLMIVLWSGIISHGRNKLLELAGKCHSEELWSPVRCAFTGALTLYYYFIGFFGILAAIAITLVWQRHTRFFH

SEQ ID NO: 69251 - DNA, 369 bp, Unknown
  Obtained from environmental sample
  misc_feature (1)..(369): n is a, c, g, or t
gtgccagcccggaattgttgggataagcatagcgaggtttgtttttccgcaagcggatgggaatgcggctgcaaaatatttagcttttttgtccgattcgcgaaccattttcaaaatgagcatgtgttccgcgagccagccttcgtcccttgcctgagtggaagcgatgcgaagcgcaaggcattttttgccgagcagagcgttgccaccgtaaccggaaccgtagctccaaattgttctctcttctgggaaatgcgcgatatatttcttatcaagaggtgcacagggccatttgccgttgtctttttcacctgcggcaaggggtttgcctatggagtgcaagcatgggatgaattcgccatcgcctaa

SEQ ID NO: 69252 - protein, 122 aa, Unknown
  Obtained from environmental sample
  misc_feature (1)..(122): Xaa is any amino acid
MPARNCWDKHSEVCFSASGWECGCKIFSFFVRFANHFQNEHVFREPAFVPCLSGSDAKRKAFFAEQSVATVTGTVAPNCSLFWEMRDIFLIKRCTGPFAVVFFTCGKGFAYGVQAWDEFAIA

SEQ ID NO: 69253 - DNA, 858 bp, Unknown
  Obtained from environmental sample
  misc_feature (1)..(858): n is a, c, g, or t
atgtccaaaaaactgccgaagtttgctccgctcactttggattctacttcaaaaaaagccttgnctaacgagcaatgcacggaactgcttttgtcctttctcaacactttccttgccgagaagctgaaaagccctatcaaagaggttatcaacattaaccacgaattgtttggaaaaacgaggttcaatagagatgctgtttttgatgtttattgcaaggatgccgcaggcactaggttcgcggtggaagttcaagttgataaacaggaacatttcataaaacggactttcttttacctttgcataattgtatgcggtcttgcggtgaaagggaaagagtatgatttcaatatcccgaagctctattcaattagcttcttggagtttgagcttgattttggggagggctgcacggaggtgatccagtatttgtccctgaggaacgacaagcaccccgaaatcagctacgatattctgcaaatgatatatgtaatcttgcccaggttcaagaaaaaagagagcgagtgcaaaacgattatggataagattattttttctctcagaaacggacataagctcaaaggggttcccgaaagttttaaagagaaagagcttagggacattttcaacatagcggaaatttctaattttaccgaaagagaaatcaagcagtatagggcagctatgatgaacagatatgattaccaagctacaattgattatgccgagaaaaagggcaaaaaaaagggtattttgcaaaccgctaaatctatgctcaaagaagggcttaaccctacccttgtagctcgcattaccaagctgtctaaagagcagattcttacgttgggcaaggggtaa

SEQ ID NO: 69254 - protein, 285 aa, Unknown
  Obtained from environmental sample
  misc_feature (1)..(285): Xaa is any amino acid
MSKKLPKFAPLTLDSTSKKALXNEQCTELLLSFLNTFLAEKLKSPIKEVININHELFGKTRFNRDAVFDVYCKDAAGTRFAVEVQVDKQEHFIKRTFFYLCIIVCGLAVKGKEYDFNIPKLYSISFLEFELDFGEGCTEVIQYLSLRNDKHPEISYDILQMIYVILPRFKKKESECKTIMDKIIFSLRNGHKLKGVPESFKEKELRDIFNIAEISNFTEREIKQYRAAMMNRYDYQATIDYAEKKGKKKGILQTAKSMLKEGLNPTLVARITKLSKEQILTLGKG

SEQ ID NO: 69255 - DNA, 1272 bp, Unknown
  Obtained from environmental sample
  misc_feature (1)..(1272): n is a, c, g, or t
atgaaaaatcgcaagtttgaaacgcttcaacttcacgctgggcaggaaaaaccggacccaaccacagattcaagggcagtgcccatttacgcaacaacctcttatgtattcaaggattgcgcacaggcagccgggagatttgcccttactgagggtggcaacatttacacgcgcttgatgaacccaacctcggatgtgtttgagcagcgaatagcggctcttgaaggcggtgtaggtgctttagcaacctcttcgggggcagcggcggtaacttatgctatacagaacattgccacagcggggcacaatatagtatccgataaacgcatttatggcggaacatataaccttttcgcccacaccttgcccgacttaggtataaccacaacattcgtagatggtagcgaccctaagaattttgaaaaggcgattaatgaaaaaaccagagcgttgtttgtggaatcacttggaaatccacattctaccatcgttgatttagatgcgcttgcagctattgcacacaagaacggcattccgcttattgtggacaataccttttctccaccaaatttgtttcgccccattgagtacggtgcagatgtggttgtgcattccgccaccaaattcataggcggtcacggaacggttataggtggcgtgatagtggattcgggaaaattcaactgggcggcaaacgataaattcccaggtttgtctaaaccaaatcccagctatcacggcgtagttttcaccgaagcggtggggaatctcgcatatatcataaaaattcgggtcaccttgatgagagatacgggagcggctataagccctttccattctttccttttccttcaaggattggaaactctgtctttgcgtgtggaacgtcacgtggagaatgcgctcaaagtggtggaatatctgcgcaagcatccgcaagtggaatccatcagtcacccttctttgccagaacatcctgataatgctttgtataaaaaatatttcccaaatggtgcaggttcaattttcacttttgaaataaaaggcggtgcggaacaggcaaagaaattcattgacaagctggagttattctcccttctagccaatgtagcagattccaaatcgctggttatacatccggcaagcacaacacattcccagctcaccggagatgaacttttggaacagggtgtaaagccaaataccattcggctttccattggcactgagcatattgacgatattatcgccgacttggagcaggcgttttag

SEQ ID NO: 69256 - protein, 423 aa, Unknown
  Obtained from environmental sample
  DOMAIN (46)...(338): Beta-eliminating lyase
  misc_feature (1)..(423): Xaa is any amino acid
MKNRKFETLQLHAGQEKPDPTTDSRAVPIYATTSYVFKDCAQAAGRFALTEGGNIYTRLMNPTSDVFEQRIAALEGGVGALATSSGAAAVTYAIQNIATAGHNIVSDKRIYGGTYNLFAHTLPDLGITTTFVDGSDPKNFEKAINEKTRALFVESLGNPHSTIVDLDALAAIAHKNGIPLIVDNTFSPPNLFRPIEYGADVVVHSATKFIGGHGTVIGGVIVDSGKFNWAANDKFPGLSKPNPSYHGVVFTEAVGNLAYIIKIRVTLMRDTGAAISPFHSFLFLQGLETLSLRVERHVENALKVVEYLRKHPQVESISHPSLPEHPDNALYKKYFPNGAGSIFTFEIKGGAEQAKKFIDKLELFSLLANVADSKSLVIHPASTTHSQLTGDELLEQGVKPNTIRLSIGTEHIDDIIADLEQAF

SEQ ID NO: 69257 - DNA, 348 bp, Unknown
  Obtained from environmental sample
  misc_feature (1)..(348): n is a, c, g, or t
ttggcggaaatcccattgcttgcgctgcgggtcttgctgtcttggaaattatttcaaagccnaagactatctcaatgtaaaggaacgttctttgcagttgaaacaggcttggaagcccttgcaaaaaaacattcttgcctaggcaaggttcgtggctgtggcttgttgcttggaattgaatgcaaaaagcctgttgcagacgtaatttccgcttgcagggaacaaagtttgctcattttacgtgccggaacagatgttttgcggtttttgcccccacttatcataacaaaagcacaggtaaatgaggctttgaggaaattggacaagagtattttttctatattatag

SEQ ID NO: 69258 - protein, 115 aa, Unknown
  Obtained from environmental sample
  misc_feature (1)..(115): Xaa is any amino acid
MAEIPLLALRVLLSWKLFQSXRLSQCKGTFFAVETGLEALAKKHSCLGKVRGCGLLLGIECKKPVADVISACREQSLLILRAGTDVLRFLPPLIITKAQVNEALRKLDKSIFSIL

SEQ ID NO: 69259 - DNA, 933 bp, Unknown
  Obtained from environmental sample
  misc_feature (1)..(933): n is a, c, g, or t
atgaaaacaaattttcacgaacaggattccaaaatcatagcctcaacttatgcaaaggcaaatgtggatttcacgcacggaaagggtgctttgctttttgatagcaaagggaaggaatatttggattttgcaagcggaatatccgtcaatgcgcttgggcactctcacccagccataaaaaaagccataaaggagcagagcgaaaatttttcgcatatttcaaacttattcccaaactcaccgcaaataaaactcgctcagaaaatgctctcgctgaccaaattcggcaaagaaaaaggcaaagcctttttttgcaactccggcacagaagcaaacgaagccgccataaaattcgcgagaaaatattttcacagcaaaggcgaaaaaaaacgtgttgaaataataacatttgaaaacagttttcacgggcgcacctatggcgcgcttgccgcaacagggcaagaaaaactgaaagagggttttggttcaatgcctgccggattcaagcacgtggaatggaacaatgcagaggaattgcaaaaggcagttggcaaaaacacggcggctataatgcttgagcctgtggttgcggaaggtggaattttgatgccttcaaaaaaattcatagagacgataaaccaaatcaaaaaacaaagcggctgcctagttatagcagacgaaattcaaattggatttgggcgttgcggagcaatttcctgctcggagctttttggcataaacgcagatattacaacttgggcaaaatctttgggtggcggcttgccgcttggcttggtgcttatgaacgcaaaaattgccgagtgcctaaaaccaggcgaccacggaaccacctttggcggaaatcccattgcttgcgctgcgggtcttgctgtcttggaaattatttcaaagccnaagactatctcaatgtaa

SEQ ID NO: 69260 - protein, 310 aa, Unknown
  Obtained from environmental sample
  DOMAIN (23)...(310): Aminotransferase class-III
  misc_feature (1)..(310): Xaa is any amino acid
MKTNFHEQDSKIIASTYAKANVDFTHGKGALLFDSKGKEYLDFASGISVNALGHSHPAIKKAIKEQSENFSHISNLFPNSPQIKLAQKMLSLTKFGKEKGKAFFCNSGTEANEAAIKFARKYFHSKGEKKRVEIITFENSFHGRTYGALAATGQEKLKEGFGSMPAGFKHVEWNNAEELQKAVGKNTAAIMLEPVVAEGGILMPSKKFIETINQIKKQSGCLVIADEIQIGFGRCGAISCSELFGINADITTWAKSLGGGLPLGLVLMNAKIAECLKPGDHGTTFGGNPIACAAGLAVLEIISKPKTISM

SEQ ID NO: 69261 - DNA, 2526 bp, Unknown
  Obtained from environmental sample
  misc_feature (1)..(2526): n is a, c, g, or t
atgtttcgtttatttcttatagattcatctgcgcttgcttttcgtatgttttatgcttatgccagaaacccgcttaggaacagcaaagggcagcttgtgtcggttttgcacgggtactggggggcaatacttcgcattgtgaaaagccacaagccagactatttcgctattgtgcgcgatgtgtctaggaaaacttttagaaacgagctttattccgaatacaaagcaacccgtgccccaatgcctccagagatggtagagcaaatgccatatctcaacgaatctcttgaaaaatgcggaataccaattctcggttgcgagggttttgaagcagacgatgtaatggcatcggtggcaaaacttgcagcaaaaaaaaattacttcgtatatctggttaccaaagacaaagatatggcgcaaattgtgaattcccaaattcacatctatcaaattgaaagtggtgcaaagggaatagatattggtattcagcaggttaaagataagtttggagttagtccagagcaaattgtggattaccttgcccttgttggagattcttccgacaacatacccggagttgcaaaaataggtccaaagagtgcggtagagcttttgacgaaatttgggaatttggaaaacatatataataatcttgcggaacttccaaaagcaaaacaggaacttttaatcgcaggcaaggaaaaagcttttttgagcaaggaattagtaaccttgaaaagcgaccacgattttggctacaaacccgaagatttacgctacaaaggcttagacaaagatgcgttatataaattattcatagattatgaaataccaagcctcattccattgttgccaagcgttagcgaatatccatccatatttttcgatttgcaaccaaaatcagaaagaaccattgttgatagcacagaagccttgcaaaaaatggatgcagatttaagctctgcaaaaactttggctttttcacttgaaaacgaaactattaccataagcaaaaacgaaaataaatattacgagctatccaaagacaaaacgctttttgaagaatggctaaatgagattttagcgaaacaagatgtggaacttgttttttacaatgcgaagaagttttttcattttttgaatgaatttaaagaatggtccaatggcaaaataatagatattctttttgcccagtggcttttgaaacctggtacgtataacaagagcgaaccggaaaatgcggctttgctttttccaaaatgggaacagaacaagggagaactcaaaaaaagaaatctctttgaactttttgaaaacaagggaatgcctttgataaagtgcctttatgaaatggaaaaccttggcatttcaatagacaatgaggcacttgccgctctcaatgcggaatttcaaaaaaagatagcagaacttgaaaatcaaatttttgaaatagcgggtgaaaattttaatttagcctcgcacaagcaactggctaatattttatatgagaaactaaagctccctgtgctcaaaaaaaatgcgagcggtccaagcacagatgccgaaactttggagatgctcgccgaaagcacggagtctaatgcgattttgggttgcattatgagctggcgcgagcttcaaaaattgcaaggcggctacacagaagccttgcccaaattggtatcgcccataacaaaccgcatacacaccacatttttgccttggggcacagccacgggcaggctttccagcgtgaacccaaatttgcagaatattccagtgagaagcgaagagggcaaaaaaataagggcggcatttgttccaagccaaaaaaactggaaaataatttctgttgattattcgcaaatagaactgagaatgttagctcatttgagcggagacccagagttaaaaaacgcattcttaaaaggagaagatgttcacagcataacggctgcgaaaatttttgggacaagcgaagttagccacgaaatgagggctaccgcaaaggttgtgaattttgggataatttatggaatgagcgcattcaggcttgcaaaagatttgcacatagcccgttccaaagctgtggaattcataaatgggtatttcagtttttacagcaaagtgaaagaatattttgaggaagttgtgaaatctgcaaaagaaaacggctttgtggaaacaatggcaaaaaggcggcgttacttgcccgaactgaacgcgagcgaccatcaggagcgagcggcagcggagcgcgtagccatgaacacgccaattcagggcagcgcggcagatttgattatggaggcaatgcttcgtttgcagagcaaaataaaaactgaaaacttgccgcttagaatgcttttgcaagttcacgatgaacttgtttttgaatgccctgcggaaaaggcagttgaattttctcaaatgattaagagcgaaatggaaaacgctttgcctttggatgttcccattgttgccaatgctggggtggggaataactggctggaagcggggaaataa

SEQ ID NO: 69262 - protein, 841 aa, Unknown
  Obtained from environmental sample
  SIGNAL (1)...(21)
  DOMAIN (171)...(270): 5'-3' exonuclease, C-terminal SAM fold
  misc_feature (1)..(841): Xaa is any amino acid
MFRLFLIDSSALAFRMFYAYARNPLRNSKGQLVSVLHGYWGAILRIVKSHKPDYFAIVRDVSRKTFRNELYSEYKATRAPMPPEMVEQMPYLNESLEKCGIPILGCEGFEADDVMASVAKLAAKKNYFVYLVTKDKDMAQIVNSQIHIYQIESGAKGIDIGIQQVKDKFGVSPEQIVDYLALVGDSSDNIPGVAKIGPKSAVELLTKFGNLENIYNNLAELPKAKQELLIAGKEKAFLSKELVTLKSDHDFGYKPEDLRYKGLDKDALYKLFIDYEIPSLIPLLPSVSEYPSIFFDLQPKSERTIVDSTEALQKMDADLSSAKTLAFSLENETITISKNENKYYELSKDKTLFEEWLNEILAKQDVELVFYNAKKFFHFLNEFKEWSNGKIIDILFAQWLLKPGTYNKSEPENAALLFPKWEQNKGELKKRNLFELFENKGMPLIKCLYEMENLGISIDNEALAALNAEFQKKIAELENQIFEIAGENFNLASHKQLANILYEKLKLPVLKKNASGPSTDAETLEMLAESTESNAILGCIMSWRELQKLQGGYTEALPKLVSPITNRIHTTFLPWGTATGRLSSVNPNLQNIPVRSEEGKKIRAAFVPSQKNWKIISVDYSQIELRMLAHLSGDPELKNAFLKGEDVHSITAAKIFGTSEVSHEMRATAKVVNFGIIYGMSAFRLAKDLHIARSKAVEFINGYFSFYSKVKEYFEEVVKSAKENGFVETMAKRRRYLPELNASDHQERAAAERVAMNTPIQGSAADLIMEAMLRLQSKIKTENLPLRMLLQVHDELVFECPAEKAVEFSQMIKSEMENALPLDVPIVANAGVGNNWLEAGK

SEQ ID NO: 69263 - DNA, 306 bp, Unknown
  Obtained from environmental sample
  misc_feature (1)..(306): n is a, c, g, or t
ttgcagttaatgaccgaaacggccaacgacgacgcttggcacgtgagcaacgccgccgcgatcttcataggggtggaaacgcccgttgcgctgggcgactacttcataggcacaaaccacgtcctgccgaccggcggcacggcgcgcttcgcctcgccgctcggcgtggaaagcttccaaaaacgcatatcgatggccaaagtgtcgctaaaggggctaaaggccgcgatggaggtcgtaccgacgttcgcgcgggcggaggcgttccaccaccacgcggttagcgttgaagctaggatggagtag

SEQ ID NO: 69264 - protein, 101 aa, Unknown
  Obtained from environmental sample
  misc_feature (1)..(101): Xaa is any amino acid
MQLMTETANDDAWHVSNAAAIFIGVETPVALGDYFIGTNHVLPTGGTARFASPLGVESFQKRISMAKVSLKGLKAAMEVVPTFARAEAFHHHAVSVEARME

SEQ ID NO: 69265 - DNA, 1554 bp, Unknown
  Obtained from environmental sample
  misc_feature (1)..(1554): n is a, c, g, or t
gtggcttttgccgacgaatcaaacgttacgaccacgtttaccatgcctgaaaacgatgtgacggtgatggcgaattttgctatgacgttcgtggataatagagataataaaatatacgggatggtgaacataggcaggcaaagatggatggctcagaatctgaattatgaaacgcaggagtctttgtgttacgagaataatccagatagttgcgctaaatacggaagtatatacaataattggtcagcggtgatggctatagatacatcttataataataaaaaatggcaaggtgatgattttaaccatcgtggaatttgtcctgttggctggcatttaccggatacttcggagatcgtaacattgatagaggcggcgggaggttcgggaagttatgattattcttatttggttggtggaaggctgaaagcgacaagcggatggacgggtttgggctacaatcgtaatggtacggatgattttgggtttgcggcgttgcctgttcctgtttatctggcaggggattggaggttggcggaaggattctatatttggtcagttgaggacgtagaaaaagacccaataaaaagttattatttaggcatatatggacttggtaatgatacttatgatgctggtccttatagggatatagtattgtttagatcagtcggaaaaaacgacaatacaggagttggggtgcgctgtatcgccgacaaacaagtagtagtcaagcccacagtaaccaacaccgccctagtctacaacggccacgagcagtgggccggtataccgtcgtcgccggagtttgtaccggtaacgccgatctgggagtatacggttacaggagataacgctatagacgccggagactacatcgcgaaggtcgtcttagacacggcaaactttatgtgggccgacggcgacaacagccgcgtcctgaatttgccgtggaaaatatcccccgcccccggccatttcgtcccgttggtgaaagacacaacctattcccccacgttaaaactcaccgatttcacgctgcccaaaggctacgcgtgggccgcctcaaccgactcgaccgcgcatttgaacgcgggcaacggccaaaccttcgccgcgacattcaccgacaccagcggcaactacaagacggtttccggaacgatcaccgtaaacgttgccaaagcgaccggcctaaccgagatagccccgaccactatatcgatttcaagcgacgataccggccccaacgtttttgacttgtccggcattgttctggagccgaccgaccacggcaaattgagttacgctctcggcgccgagaccgacggaggcccggaggggaagattttacaacgctccccgaccattactaaagatacgttgctgaactatcagggcaacggcaaaaaagagggtgaggcgacgcaggttataaagattacaagccaaaacttcgaagacttcactgtcaccgtcacctttatcgcgacgcccgaagccgtttacgaagtaaccggtaaacagcggcaccggcagcggcagctacactaa

SEQ ID NO: 69266 - protein, 517 aa, Unknown
  Obtained from environmental sample
  misc_feature (1)..(517): Xaa is any amino acid
MAFADESNVTTTFTMPENDVTVMANFAMTFVDNRDNKIYGMVNIGRQRWMAQNLNYETQESLCYENNPDSCAKYGSIYNNWSAVMAIDTSYNNKKWQGDDFNHRGICPVGWHLPDTSEIVTLIEAAGGSGSYDYSYLVGGRLKATSGWTGLGYNRNGTDDFGFAALPVPVYLAGDWRLAEGFYIWSVEDVEKDPIKSYYLGIYGLGNDTYDAGPYRDIVLFRSVGKNDNTGVGVRCIADKQVVVKPTVTNTALVYNGHEQWAGIPSSPEFVPVTPIWEYTVTGDNAIDAGDYIAKVVLDTANFMWADGDNSRVLNLPWKISPAPGHFVPLVKDTTYSPTLKLTDFTLPKGYAWAASTDSTAHLNAGNGQTFAATFTDTSGNYKTVSGTITVNVAKATGLTEIAPTTISISSDDTGPNVFDLSGIVLEPTDHGKLSYALGAETDGGPEGKILQRSPTITKDTLLNYQGNGKKEGEATQVIKITSQNFEDFTVTVTFIATPEAVYEVTGKQRHRQRQLH

SEQ ID NO: 69267 - DNA, 1566 bp, Unknown
  Obtained from environmental sample
  misc_feature (1)..(1566): n is a, c, g, or t
atggctgaacgtccagaagtcagcagaggccatagtaccgctaaggggaatgtcccgtgtagagggagtacgaacggagcgggaagggccgaacaatgggagtctcacgaacgagaggagtgtaagacagtgcagagagggcagaaaacggagaagtccggctgccctgcggcggatagggtggaacccaaagaaccgcagggagcgcatagtgctggaatacgcaaagccgaaaacggggacagtgcaaacgggcgggagcccgaacggaacctgcttgaagcgatattgagcttgaacaatgtatgggaagcgcaggggcgggtaatagcgaacagggggtcagcgggaatagacgggatggcagtcgaggaattgaacgactatctcatcaatcactatctggaattgtgtgaaagcatacggggcggatggtacaaacccaagcctgtcaaacgggtggagataccgaaacctgacggcgggaaacggctgttgggagtgccgacggtaatagaccggatggtacagcaggcgatggtacaagtcctgcagccgatatttgagcagacgttttcaaattcaagttttggctttagaccgggacggaacgcgcatcaggccatgcagcgtgcaaagagatactatgaggaagggtacaagtatgttgttgaccttgacttggaaaagtattttgacactgtgaaccatgacctactgataaagatggtgagggaagtaataaaggacgaagcagtcataggcttgatacgcaagttcttaaagagcggcgtgatggtcgaagggctggtgagccaaacggagcaggggacgccgcaaggcggaaacctgtcgccgttgttaagcaacatatatctgacgaagtttgaccggatgctggaagagcgaggccacaagtttgtgaggtatgcggacgactgtaacatctatgtcaaaagccccagagccgccgaacgcgtgatggctggttgcataaaatttcttgaaggaaagctgaaattaaaagtgaaccggaagaaaagcacagccggaagtccgacaaagcttaagtttctgggatttagtttgtacgagtggaaaggggaaatcaggatacgggcacatgagaaaccgcttaaacggctcaaagaacggcttaaggccatgacaagccggaaacgaggcggaaccatagagcaaatattgacagagataatcaggctgatgaatggctggttaggatactatcgcttggcggatatgaaaaaatatctacaagagataagtaaatggctaaggaggcggatgcgccagctctattggaaacgctggaaacgagtgcgaacgcgatatgagaacctgattacattaggtgcaagccgagacaaggcatggcaatgggcaaacacccggaaaggctactggtgtacagccgggagctggatactggcgacaacaatggacaacctttattttgaaacgcttggatttccgaacatactcaagcggtatgaggaactgcgagagcgagccaagcggttagagattttgcatggaacctgttga

SEQ ID NO: 69268 - protein, 521 aa, Unknown
  Obtained from environmental sample
  DOMAIN (379)...(465): Group II intron, maturase-specific domain
  misc_feature (1)..(521): Xaa is any amino acid
MAERPEVSRGHSTAKGNVPCRGSTNGAGRAEQWESHEREECKTVQRGQKTEKSGCPAADRVEPKEPQGAHSAGIRKAENGDSANGREPERNLLEAILSLNNVWEAQGRVIANRGSAGIDGMAVEELNDYLINHYLELCESIRGGWYKPKPVKRVEIPKPDGGKRLLGVPTVIDRMVQQAMVQVLQPIFEQTFSNSSFGFRPGRNAHQAMQRAKRYYEEGYKYVVDLDLEKYFDTVNHDLLIKMVREVIKDEAVIGLIRKFLKSGVMVEGLVSQTEQGTPQGGNLSPLLSNIYLTKFDRMLEERGHKFVRYADDCNIYVKSPRAAERVMAGCIKFLEGKLKLKVNRKKSTAGSPTKLKFLGFSLYEWKGEIRIRAHEKPLKRLKERLKAMTSRKRGGTIEQILTEIIRLMNGWLGYYRLADMKKYLQEISKWLRRRMRQLYWKRWKRVRTRYENLITLGASRDKAWQWANTRKGYWCTAGSWILATTMDNLYFETLGFPNILKRYEELRERAKRLEILHGTC

SEQ ID NO: 69269 - DNA, 1209 bp, Unknown
  Obtained from environmental sample
  misc_feature (1)..(1209): n is a, c, g, or t
atgaaaagattttatgtttatttattgataatttttcttggcatgacggttttttacgcctcgtgcaatagagataaaataggttctgtagaaagggaagacctttttaaacttgaaatcggtcctatggaagatcagatagcgctgtataaattggacggaacaaggggtataagacgcaccgcttttacaatgcgggacggattgttttttatatcggacggtaacagcggaaaaatagtgcgctataactcctacggcaatttactgtttatgatttataacgatgaaaccaatccagcgccaatcacccttaaaaccaatattcaggaagacgaacaggcgacgcgctgggcttttacatatccgcttgaggagcccggctggataacggtagattcgcgcaaacatatatttgtggaagacagattggcacagcaggatcaccgcatagaccccgaaaccaaggcggtgctggacggaataatcctacattttgatcaaaacggacgctttattaattatctcggcaaagagggaatcgggggaagtccgttccccagaataatcggactgagcacatcaaatagggatgagatcgttgtaatctgccgtattcccgacggttgggatattttctggtttaattcggcggggacgcttctttatcttgtaaaaatttcagcaagcgtaattcccacattaccgaactggactgacgctcattctgtaattgacagtattactccggttcccgacgcaaggaagctctatataaaagttgattattcgcatgatatttatgatcagtcaacaaataccagaacgggaagcgagcctgtaagttcttatttatggatacttaacgttgaagacggaacttatataggctccgtggaaatccctctttatgaagtaatagaaaacgggcggtcttccggcattaaagttttttattcagtcctcggcgcggcgcgaaacgggcaggcgcttttttactttcccgttgaaaccgggtactcattgctttttgttaataccatanccaaggacanncgagggggatatattcaattttcaatggatgaactgaggtacaatgacttttacctgtcaacggagggaattctttcggcgatgctggcggataattttaacgttaaatttgtatggtggcgtaccgataaactctttggagaatctccgtga

SEQ ID NO: 69270 - protein, 402 aa, Unknown
  Obtained from environmental sample
  SIGNAL (1)...(20)
  misc_feature (1)..(402): Xaa is any amino acid
MKRFYVYLLIIFLGMTVFYASCNRDKIGSVEREDLFKLEIGPMEDQIALYKLDGTRGIRRTAFTMRDGLFFISDGNSGKIVRYNSYGNLLFMIYNDETNPAPITLKTNIQEDEQATRWAFTYPLEEPGWITVDSRKHIFVEDRLAQQDHRIDPETKAVLDGIILHFDQNGRFINYLGKEGIGGSPFPRIIGLSTSNRDEIVVICRIPDGWDIFWFNSAGTLLYLVKISASVIPTLPNWTDAHSVIDSITPVPDARKLYIKVDYSHDIYDQSTNTRTGSEPVSSYLWILNVEDGTYIGSVEIPLYEVIENGRSSGIKVFYSVLGAARNGQALFYFPVETGYSLLFVNTIXKDXRGGYIQFSMDELRYNDFYLSTEGILSAMLADNFNVKFVWWRTDKLFGESP

SEQ ID NO: 69271 - DNA, 1053 bp, Unknown
  Obtained from environmental sample
  misc_feature (1)..(1053): n is a, c, g, or t
atggataaggtaatcataaaagccgacgaattagacgaccacttaacagccgatgacaagtcataccttcaaaatatgaatacccttttcagcaaggctcttgatattttcccggacgtgcaggcggggggaaaagacgcacaagagagccttattgccgtatacaacgatatgggcggtttattacaggaaatatgccgaaaaaacccaaggattcacgtttattcatttgtttcccccaaggaagatcaatcggaagcttcccgcgttatcgcgaaattgcgcgatgtaaatacgaacaaaaatgaatttatttattatattcagcgcgcatacgagatgctttttaaacttgcgtggataagctcaagcgctaaaaaaaatcatttgattataaaaactccggtaaacattccggcgcaaaattatgcggttcataaattagccgatatcgacgataaaatttgcaataccgtaatgtgcgtaatgctcaggggagcgctcctgccttccatgattatgagcaaggaaattgaggcgtattcatcaaacggatatataactcctttcgctttatttaggatttaccgtaacgacaaaaaacatgagaacgatatggaatacactcttgatcttgacaaatctttttttaactccgactctcttaacggtaaagacctgatatttgccgaccctatgaacgctacgagcggaagccttattacgatagtaaagtatttgctgaaaatcggagtaaagccgcgctcgattatattcctaaacgtaatagcggcgttaaaaggcgttcttagagtcataagagctattgataattgcaatatctatacattatggatggacggcgtattaaacgataaggcgtatattatgcccggtcttggagacgccggagacagaataaacgggcatgatataggcgcaaacccaagaaatattattcagcttcttgcggattacggaaccggaatagcaaatctttaccgctcccaattccacgagattgagaagatagttttaaacaggtcggtatga

SEQ ID NO: 69272 - protein, 350 aa, Unknown
  Obtained from environmental sample
  misc_feature (1)..(350): Xaa is any amino acid
MDKVIIKADELDDHLTADDKSYLQNMNTLFSKALDIFPDVQAGGKDAQESLIAVYNDMGGLLQEICRKNPRIHVYSFVSPKEDQSEASRVIAKLRDVNTNKNEFIYYIQRAYEMLFKLAWISSSAKKNHLIIKTPVNIPAQNYAVHKLADIDDKICNTVMCVMLRGALLPSMIMSKEIEAYSSNGYITPFALFRIYRNDKKHENDMEYTLDLDKSFFNSDSLNGKDLIFADPMNATSGSLITIVKYLLKIGVKPRSIIFLNVIAALKGVLRVIRAIDNCNIYTLWMDGVLNDKAYIMPGLGDAGDRINGHDIGANPRNIIQLLADYGTGIANLYRSQFHEIEKIVLNRSV

SEQ ID NO: 69273 - DNA, 993 bp, Unknown
  Obtained from environmental sample
  misc_feature (1)..(993): n is a, c, g, or t
atgagaaagaaaagttttatttgtttattatcaatttttgttatttcatttttatccgttattacaaacggatgcgcgtcaaaaacatcagcgcaggaatattttgcgctcggcatggcttattatgatcttggaaaattcgacgaagcagaaatatggctgaaccgcgcaaaaagtgcggacagaacaatgacagcctctacatataacttgggacgaatcgcgtatgaaatgaaaagatatgaagacgccgcaaaacattttgagagtattttaaaaaaagacaaagataatgtacttgctctcaaagccgcggcttactcaagaataaaaacaggcgacattgaaattgccgaaaaacattacgcaagactgctttcacttgttcccgaaagcgcggacgacggatacaaccacgctttagtattattcgcgttagaacgctatgccaaggcgttggaagtattggaaaaataccccgccggtctgctggaaaacaaagacactatgctgctttacgcgcgcgctcaggcaaaattaaaaaaagtggaggcgattgacagtttttccaactatctgagcgtcaattcagacgggaaagcaagatatgaatacgcgcaagttctggaagataatgttttatacgcgagagcgattgaagaataccgcaaggcattaacggaaatcagcgccacagccgttaatcccaaaaaatgcgaagtacgttttgcgctcgcaagagcgatgatagtcgccgacggcgacaatacggaaggctttacagagcttcaaagcgccgttggcgaggggtttagcgatattcccgccgttgaaaaaatacttaccttaaaaataagcgccgtaaataaaaccagcgtccagaatataatcggcaatatgagaaaagcagaacaggaaaaacagaaggaagcctcaaccgattcatcaaaaactgactcgcaaagcggttccaaaaacgatgtcaaaaaataa

SEQ ID NO: 69274 - protein, 330 aa, Unknown
  Obtained from environmental sample
  SIGNAL (1)...(24)
  DOMAIN (65)...(98): Tetratricopeptide repeat
  misc_feature (1)..(330): Xaa is any amino acid
MRKKSFICLLSIFVISFLSVITNGCASKTSAQEYFALGMAYYDLGKFDEAEIWLNRAKSADRTMTASTYNLGRIAYEMKRYEDAAKHFESILKKDKDNVLALKAAAYSRIKTGDIEIAEKHYARLLSLVPESADDGYNHALVLFALERYAKALEVLEKYPAGLLENKDTMLLYARAQAKLKKVEAIDSFSNYLSVNSDGKARYEYAQVLEDNVLYARAIEEYRKALTEISATAVNPKKCEVRFALARAMIVADGDNTEGFTELQSAVGEGFSDIPAVEKILTLKISAVNKTSVQNIIGNMRKAEQEKQKEASTDSSKTDSQSGSKNDVKK

SEQ ID NO: 69275 - DNA, 402 bp, Unknown
  Obtained from environmental sample
  misc_feature (1)..(402): n is a, c, g, or t
atggtcttcgtggaagctaaacagggtacaccgcaggtcaagaaggagccgtaccctaggtacgacatatcgggcatcatcgggctttcgggcggggcgcaggggtctatctcgctctgcttcccgatgcagtccgcactagacatcgtgtcgaagatgatcggagccccgatcaccgaacccggcaccgaccttgccgacgccgttggcgaaatcgcgaacatcatcgccggcttcgccaaacgcgacctggtcggcctgaatctctcgatctcgctaccgaacgtcattatcagcagccacgtgctctccggtatgtccggagtggggacaatcattgtcccgtttacgtgccccttgggcccgtttgccatggaagtatcactgaaaacaccttcttaa

SEQ ID NO: 69276 - protein, 133 aa, Unknown
  Obtained from environmental sample
  misc_feature (1)..(133): Xaa is any amino acid
MVFVEAKQGTPQVKKEPYPRYDISGIIGLSGGAQGSISLCFPMQSALDIVSKMIGAPITEPGTDLADAVGEIANIIAGFAKRDLVGLNLSISLPNVIISSHVLSGMSGVGTIIVPFTCPLGPFAMEVSLKTPS

SEQ ID NO: 69277 - DNA, 357 bp, Unknown
  Obtained from environmental sample
  misc_feature (1)..(357): n is a, c, g, or t
atgagaatgcttttagtagacgactcagtaacaatgcgccgaatccagaaaactcagatcaacggactgggtataacggatatcatagaagccggcgacggccaagaggcgctaggcaagctcaagagcaacatgcccatagacatggtgctcttagactggaacatgcccgtaatggacggcatggccttcctgaagaccgtccgcgctgacgcagccttcaaagacgtgaaggttatcatgtgtacctccgagtctgaaaagtcgaaggttgtggaggcgctgaaatccggggctaacaattatattgttaagccgttcacgccggaagccttgaaggagaagattggaatgtga

SEQ ID NO: 69278 - protein, 118 aa, Unknown
  Obtained from environmental sample
  DOMAIN (1)...(117): Response regulator receiver domain
  misc_feature (1)..(118): Xaa is any amino acid
MRMLLVDDSVTMRRIQKTQINGLGITDIIEAGDGQEALGKLKSNMPIDMVLLDWNMPVMDGMAFLKTVRADAAFKDVKVIMCTSESEKSKVVEALKSGANNYIVKPFTPEALKEKIGM

SEQ ID NO: 69279 - DNA, 1266 bp, Unknown
  Obtained from environmental sample
  misc_feature (1)..(1266): n is a, c, g, or t
gtggagggcaaactcgacgacgcggcggatttggaaatactcaaggagatgaacgaggtggtcggcgcggtggaaaaccaccgccagatgaacctccgcctgtggcaaaacaccctgacgaatttcagagccaaggtcggcataaagacgcacggcttggatgctgtcgtgagcatagaagacttctttcacaagatgcgtatgctgctccttgaaacctacttcaaaaatgactcaaggcgctggagcatctacataaacgatattgttgggctgcgtgacgtgctgagccagctgatacgcgacgtcaacaacccaaccgaggcgttgcgctccatagtccccaatatccgcgacatgggcatatccgacatttacatattcctgcactacacgctggagaggcacagcataaacaccgattggactttcgccggcgaactctgcctagcggtgaccgacgacaagcgccgtccggagtccgccgagcttcgcgggcagagcatgcccgtggcgtctatactcgaccgcgaactataccccaaagaccggcgctacaccttcgtcgtatcgacgctcttctacatggacgaacacctcggtttcgtggtctgcgaacccgacttcgtggatatccacctcatagagtcgctgatggtggagataagctgttcgctgaagctcataaacttgatacaggccagacgcaccatagagaggcagctgcaagacgcgcttacggagctggagaagtacaacgaacagctttccaatatatccgagaccgacgagatgacgaagctcctgaaccgccgcggcttcatggcccacgcccgcgatatgctgggcatggcgcgccgtatgaagaaggacggcntgctcttcttcgccgatctcgacggtctgaaggggataaacgacacctacggtcacgaggagggcgacaacgcgatcaccgtggtggccgtcatactcaagaaggccttccgcgacatggacataatagccaggcttggcggcgacgagttcaccgtcttcgccatgaacgccggcgtcggcatgatagagaccttcgagaagcgcatagcagggtacgtggacgattacaacagggactcggagaagccgtacaaggtgtctataagcatagggggcgtgccgtttttgcatacggataatgttaacattgagacgcttatgaataaggcggacgtgttgctgtatcagcagaagaaagagaagaaggcgaaagctttaaaaggataa

SEQ ID NO: 69280 - protein, 421 aa, Unknown
  Obtained from environmental sample
  DOMAIN (256)...(417): GGDEF domain
  misc_feature (1)..(421): Xaa is any amino acid
MEGKLDDAADLEILKEMNEVVGAVENHRQMNLRLWQNTLTNFRAKVGIKTHGLDAVVSIEDFFHKMRMLLLETYFKNDSRRWSIYINDIVGLRDVLSQLIRDVNNPTEALRSIVPNIRDMGISDIYIFLHYTLERHSINTDWTFAGELCLAVTDDKRRPESAELRGQSMPVASILDRELYPKDRRYTFVVSTLFYMDEHLGFVVCEPDFVDIHLIESLMVEISCSLKLINLIQARRTIERQLQDALTELEKYNEQLSNISETDEMTKLLNRRGFMAHARDMLGMARRMKKDGXLFFADLDGLKGINDTYGHEEGDNAITVVAVILKKAFRDMDIIARLGGDEFTVFAMNAGVGMIETFEKRIAGYVDDYNRDSEKPYKVSISIGGVPFLHTDNVNIETLMNKADVLLYQQKKEKKAKALKG

SEQ ID NO: 69281 - DNA, 756 bp, Unknown
  Obtained from environmental sample
  misc_feature (1)..(756): n is a, c, g, or t
ttggactttcgccggcgaactctgcctagcggtgaccgacgacaagcgccgtccggagtccgccgagcttcgcgggcagagcatgcccgtggcgtctatactcgaccgcgaactataccccaaagaccggcgctacaccttcgtcgtatcgacgctcttctacatggacgaacacctcggtttcgtggtctgcgaacccgacttcgtggatatccacctcatagagtcgctgatggtggagataagctgttcgctgaagctcataaacttgatacaggccagacgcaccatagagaggcagctgcaagacgcgcttacggagctggagaagtacaacgaacagctttccaatatatccgagaccgacgagatgacgaagctcctgaaccgccgcggcttcatggcccacgcccgcgatatgctgggcatggcgcgccgtatgaagaaggacggcntgctcttcttcgccgatctcgacggtctgaaggggataaacgacacctacggtcacgaggagggcgacaacgcgatcaccgtggtggccgtcatactcaagaaggccttccgcgacatggacataatagccaggcttggcggcgacgagttcaccgtcttcgccatgaacgccggcgtcggcatgatagagaccttcgagaagcgcatagcagggtacgtggacgattacaacagggactcggagaagccgtacaaggtgtctataagcatagggggcgtgccgtttttgcatacggataa

SEQ ID NO: 69282 - protein, 251 aa, Unknown
  Obtained from environmental sample
  misc_feature (1)..(251): Xaa is any amino acid
MDFRRRTLPSGDRRQAPSGVRRASRAEHARGVYTRPRTIPQRPALHLRRIDALLHGRTPRFRGLRTRLRGYPPHRVADGGDKLFAEAHKLDTGQTHHREAAARRAYGAGEVQRTAFQYIRDRRDDEAPEPPRLHGPRPRYAGHGAPYEEGRXALLRRSRRSEGDKRHLRSRGGRQRDHRGGRHTQEGLPRHGHNSQAWRRRVHRLRHERRRRHDRDLREAHSRVRGRLQQGLGEAVQGVYKHRGRAVFAYG

SEQ ID NO: 69283 - DNA, 1065 bp, Unknown
  Obtained from environmental sample
  misc_feature (1)..(1065): n is a, c, g, or t
ttgacaagggtaaaatcaatgtccgacaattccgaaaaaaaacgtctaacaataggctttttcgtctccgagctcgagaacgcctacgcccagacgctttgccggggcatcatggacgccgccgccgccgccgacgccaacgttttgatcttcccgggcaagtcgcccaaggttccgtacgactaccgctaccagtacaactccatttacagactggccaacaaaaataccgtggacgcgctgatccttgccacggggacgatggtcaattttctgagcgacgaggagttccgggagttttacaggcgctacaaggatattccgctcgtcagcatttccatacctatagagggcgtgtccagcgtgctcatagacaatacggtggggcttaggggcgttctggagcacttggctaaggatcacggctacaagcgtatcgcctttatcggtgggccggagagcaacgttgaggccaaggagcgctacaacgtttacctggacgtgcttaaagagtgcgggttgccgttcgaccccggtctcacggcggtcggcgatttcaccaagtactccggcgtgcgcgcggtgggggattttctggacgtgcgcggcgtgaagtttcaggcgctggccgccgcgaacgacgagatggcccttagcgctatggaggagctgcagaggcgcgggtacaggattccggacgacatcgccgtcgtggggttcgacaacgtggagagcacgcacttctcctcgcccacgctcaccacggtcgcgcagcccatctacgagcaggcttacaaggcggtggagctcgccctcggtcttataaacggcgatccgcccaagatcgtgtctctgcctacgagtatggtgctgcgcgaaagctgcggatgcttctcccggtcggtcacctcggtctcgtcccaagacgacgccggctcggctaccgtcgcgatgggcgacgacaaggacacggctaagatagaggccctgctgaaaaaggcgctcggtacgccgtggagggcaaactcgacgacgcggcggatttggaaatactcaaggagatga

SEQ ID NO: 69284 - protein, 354 aa, Unknown
  Obtained from environmental sample
  DOMAIN (15)...(293): Periplasmic binding proteins and sugar binding domain of the LacI family
  misc_feature (1)..(354): Xaa is any amino acid
MTRVKSMSDNSEKKRLTIGFFVSELENAYAQTLCRGIMDAAAAADANVLIFPGKSPKVPYDYRYQYNSIYRLANKNTVDALILATGTMVNFLSDEEFREFYRRYKDIPLVSISIPIEGVSSVLIDNTVGLRGVLEHLAKDHGYKRIAFIGGPESNVEAKERYNVYLDVLKECGLPFDPGLTAVGDFTKYSGVRAVGDFLDVRGVKFQALAAANDEMALSAMEELQRRGYRIPDDIAVVGFDNVESTHFSSPTLTTVAQPIYEQAYKAVELALGLINGDPPKIVSLPTSMVLRESCGCFSRSVTSVSSQDDAGSATVAMGDDKDTAKIEALLKKALGTPWRANSTTRRIWKYSRR

SEQ ID NO: 69285 - DNA, 447 bp, Unknown
  Obtained from environmental sample
  misc_feature (1)..(447): n is a, c, g, or t
gtgatcgcgaggcgtgccttgggcattggtgatggggccccgctgtcggtggccgcgttcatcggaatcataatattaatcggcatagtagtcaacaacggcatcgtgatgataacattcataaaccaactgcgggcggaagggcacagcatgaaggagtcgcttatcaaggcctccgggatacgcctgcgccctatcttgataacgtcgctgacgacgatcttcggcatattgccgatggcgttggccaaaggacaaggctcggagatgcaaagcccgctcggaaccgccgtggctttcgggctggcgtcctccacattgctgacgctattcgtagttccggtcttctatagtatcgtggacggcatcgcgcactggatcaccggtattttgaagcgggtgtttttaggagagacgcatacggcgcgggagaggctgaacgcgtag

SEQ ID NO: 69286 - protein, 148 aa, Unknown
  Obtained from environmental sample
  misc_feature (1)..(148): Xaa is any amino acid
MIARRALGIGDGAPLSVAAFIGIIILIGIVVNNGIVMITFINQLRAEGHSMKESLIKASGIRLRPILITSLTTIFGILPMALAKGQGSEMQSPLGTAVAFGLASSTLLTLFVVPVFYSIVDGIAHWITGILKRVFLGETHTARERLNA

SEQ ID NO: 69287 - DNA, 861 bp, Unknown
  Obtained from environmental sample
  misc_feature (1)..(861): n is a, c, g, or t
ttggtttgtaatgtgctgacggacgcccattgccaccccttcgacctttccccccttttcccgcaaatggaacatgaacgccgccgtttggggatccaagcggcggcaagttcttttaacattaaagaatttacgcataacgaaaatttatcgcataacgccgccgccgagaacgccgcgcctttgttgctctgcttcggcgttcacccccaactgcccgccgtaatgaaagaaaacggtgatttgttcacggactgtgaattaaccgatagccttgaaaccttgcgtaatctcgcggcggcgggcagaatagccgcattaggtgaattcggttttgacctttacaatgcggcgtttaaggaaactgaaaaaacgcaagacgtactgtttgaggcgcatttggaaattgcccttaattacggtctgcccatagttcttcatgtacgccgcgcaacgcacaaaatatttgccgccgcaaagaaattatcaaaatgtaagacggtaattttccattcatggtccggcgttcttgaagaagccctctctattttgcgccacggtattaacgcgtacttttcattcggcaatgttattatgctcaaccacaaacagtcaattcaatgctgttcttcacttccggtggaaagactgctgacagaaaccgacgccccatttcagccaaggagaggcgaaaaattttcaacgtgggcggacttgcctttgatactcatggcggcggcggaatttcgcgataaaggtggggaaaaaattgaagtgagtgagttggaaaggcagattgaagagaattttaggaatgcttttgctataaaccacaataaaataattttaaatagtatataa

SEQ ID NO: 69288 - protein, 286 aa, Unknown
  Obtained from environmental sample
  DOMAIN (5)...(275): TatD related DNase
  misc_feature (1)..(286): Xaa is any amino acid
MVCNVLTDAHCHPFDLSPLFPQMEHERRRLGIQAAASSFNIKEFTHNENLSHNAAAENAAPLLLCFGVHPQLPAVMKENGDLFTDCELTDSLETLRNLAAAGRIAALGEFGFDLYNAAFKETEKTQDVLFEAHLEIALNYGLPIVLHVRRATHKIFAAAKKLSKCKTVIFHSWSGVLEEALSILRHGINAYFSFGNVIMLNHKQSIQCCSSLPVERLLTETDAPFQPRRGEKFSTWADLPLILMAAAEFRDKGGEKIEVSELERQIEENFRNAFAINHNKIILNSI

SEQ ID NO: 69289 - DNA, 663 bp, Unknown
  Obtained from environmental sample
  misc_feature (1)..(663): n is a, c, g, or t
atgaaaccgcaactaattttatttgatttagacgacacactaatggcattcgaccttgtaacggaagaagcatgggataaaaccgtagatatattcatccaaaataatgatattaatcttgataaatctcttattttggaaaaaatacatacgacaagaaaatggtattggtcagactccgaaagacataaaataggaagggcaaatttagttaacgcaagaagggatatcgtaaaattggcgttaaaagattatttgagtttggaaatttctaaattggaagaaatggctgatactttttccaagatacatgaaaatttatggtatttattagacggcgttgaagaaaccttacagaaaataaataagaaaaatataaaattgggagttatgacaaacggaacttccgaaggtcaacggaaaaaattaaaacgttttgacatagaaaaatattttgattatatatttattgaaggcgagacaggatatggtaaaccagatataaaaatgtatgaatatatgttacaaaaaacaaaaacggaaaacgacaaaattataatgataggcgacaatttaatttgggacatagagcccgcgcaaaaatgggaatattcacaatatggattaatacaaaaaaagcttcattggaagattacaatataa

SEQ ID NO: 69290 - protein, 220 aa, Unknown
  Obtained from environmental sample
  DOMAIN (3)...(210): haloacid dehalogenase-like hydrolase
  misc_feature (1)..(220): Xaa is any amino acid
MKPQLILFDLDDTLMAFDLVTEEAWDKTVDIFIQNNDINLDKSLILEKIHTTRKWYWSDSERHKIGRANLVNARRDIVKLALKDYLSLEISKLEEMADTFSKIHENLWYLLDGVEETLQKINKKNIKLGVMTNGTSEGQRKKLKRFDIEKYFDYIFIEGETGYGKPDIKMYEYMLQKTKTENDKIIMIGDNLIWDIEPAQKWEYSQYGLIQKKLHWKITI

SEQ ID NO: 69291 - DNA, 627 bp, Unknown
  Obtained from environmental sample
  misc_feature (1)..(627): n is a, c, g, or t
atgattaataaatttataaaatttgtcggaaataattttggtaatccgagcggaattgtcggaaaattatttacaaaactaatgaatataatgaatcaaaaacaatacaaggcagtattggaaaatttaaatttagaacctaatgatactttattggatataggatttggcaatggatatttaataaacaaattactaaaaaataatattccgataaaaatattcggcatagaaatatcaaatgacatgataaataatgtatcaaagaaatacaagcaatttattgaaaacgggtatttaaaattatgtttagaaaatattgaaaatacgtcatttaacaacgaaacatttgataaaatatacacaataaatacaatatatttttggaatgatttagaaaaatgtttttcagaaataaaaagaatattaaaaccaaacggaatatttttaaacgcaatatacacaaaagaatatttagataaaataatttatacaaaatacggatttaataaattttcactggaagatattataaaagtttcagagaagaatggaatgaagattattaaagtggtagaaataaaaaagaagaaggcgtattgtgtgattgcgggaattggagagtga

SEQ ID NO: 69292 - protein, 208 aa, Unknown
  Obtained from environmental sample
  DOMAIN (32)...(196): Putative methyltransferase
  misc_feature (1)..(208): Xaa is any amino acid
MINKFIKFVGNNFGNPSGIVGKLFTKLMNIMNQKQYKAVLENLNLEPNDTLLDIGFGNGYLINKLLKNNIPIKIFGIEISNDMINNVSKKYKQFIENGYLKLCLENIENTSFNNETFDKIYTINTIYFWNDLEKCFSEIKRILKPNGIFLNAIYTKEYLDKIIYTKYGFNKFSLEDIIKVSEKNGMKIIKVVEIKKKKAYCVIAGIGE

SEQ ID NO: 69293 - DNA, 1323 bp, Unknown
  Obtained from environmental sample
  misc_feature (1)..(1323): n is a, c, g, or t
atgaaaataattgaaagcgtaaatttcgattcctattggaagaacgaaacaaaacgctccgaagatacaaagacggaaaaagccgtcaaaaatataatagcggaagtacgagcgaaaggagacgccgctgtcagaaaattcgcgtccaaattcgacaaatcttctccgcagaaacttgaagtacccctctccgaagcaaaacacgctcttgaacagttacgcgcaaatgaaccgtctcttgccctagcgcttgaactttccgcaaagcacataaaacgcttttcggaaaaacagcgggaacaattcgccgattttgaatttgaaatggagcaggggcttattacaggacagcggatacttcccgttgaaagagcggcggtttatgttcccggcggacgcttccccctgttttcatcagtccttatgtgcatgatccccgcattttgcgcaggcgtggaagaagtgatactatcatctccgccgacgcaagacggtctccccgataaaaaaatactagccgccgccatgatagcatcagaagttgtaaataacaacaacattcgtattttcgctatcggcggcgcacaggcaatagccgctctcgcgcttggcacggaaacagttcctcacgttgacgttatagccggacccggcaacaaatttgtcgctgccgccaagcggatattattcggcgaagtagggatcgattttatcgccggtcccaccgatgtattggttatcgctgacaacaaggacggtaatattgaaaaaacagccgatcttatcgccgcggatatgctagggcaggcggaacatgatccggacgcacgcgcaagggcgttggttccaaacaaagagcttgccgaaaaaattcttgcggcaattgagcggcgtataaaatcattgccgacagaaaaaaccgcgcgagcttctttgaacgcaggcggcttaattattgtctatgaaacacaagaagaggcacttcgtatcgctaacacaatagcgcccgaacatcttgagcttcaaaccgcaaacgcggaaagttggattcccaagttaaaaaattacggctcgctatttatcggcagtctttgcgccgaagttctcggcgattattcggcaggaataaatcacaccctgccaacatcgacaagcgcccgttttacaggcggcttatctgtccgccacttcctaaaaacagttaccactctgcgctgcgcccaaagcgaaggctttgaaaaagcgcgtaacgccgcggaaatacttgcgagagccgaaggattggaaggtcacgcacagagcgctgcggtgaggaaagcttaa

SEQ ID NO: 69294 - protein, 440 aa, Unknown
  Obtained from environmental sample
  DOMAIN (13)...(440): Histidinol dehydrogenase
  misc_feature (1)..(440): Xaa is any amino acid
MKIIESVNFDSYWKNETKRSEDTKTEKAVKNIIAEVRAKGDAAVRKFASKFDKSSPQKLEVPLSEAKHALEQLRANEPSLALALELSAKHIKRFSEKQREQFADFEFEMEQGLITGQRILPVERAAVYVPGGRFPLFSSVLMCMIPAFCAGVEEVILSSPPTQDGLPDKKILAAAMIASEVVNNNNIRIFAIGGAQAIAALALGTETVPHVDVIAGPGNKFVAAAKRILFGEVGIDFIAGPTDVLVIADNKDGNIEKTADLIAADMLGQAEHDPDARARALVPNKELAEKILAAIERRIKSLPTEKTARASLNAGGLIIVYETQEEALRIANTIAPEHLELQTANAESWIPKLKNYGSLFIGSLCAEVLGDYSAGINHTLPTSTSARFTGGLSVRHFLKTVTTLRCAQSEGFEKARNAAEILARAEGLEGHAQSAAVRKA

SEQ ID NO: 69295 - DNA, 936 bp, Unknown
  Obtained from environmental sample
  misc_feature (1)..(936): n is a, c, g, or t
ttgcggctgtatcccgatcctgagtgcgcgatattccgcgaagccgccgccgcccgttatggtgtaaagccgcaggaagtttttgcggggaacggttcagacgaaatactggcattcgcctttggggccttttttgaaagcggtgaaaaagccgcgcagatactctttcccgacatcacctacagtttttatcctgtttatgccaatttgtgggaaatcccgtatcgcactatcgcgctcgcgcaggatttttcaattaacataaacgattatcaagttccttcaggcggtgtaatatttcccaatcctaacgcgcccaccgccgttgcgcttgcgttagatgatattttatcccttgcggaatatcttgagaaacagggaaaagtccttattgttgatgaagcctatatcgcgttttccggctcaagtgacgcgcaatcggcggttcgctccattaatagccatcccaatctgctgactgtgcatacgctttcaaaatcagcgtctctggcgggcttgcgctttggtttcgccatcggtgatgaaaaattaatcgaaggactttgcagaatacgcgattcgtttaattcctatacccttgaccttcttgccctgtcaggtgcggcggcggcagtctccgatgcggcgtattacgaagaaattaaccgccgtgttattgccacacgggaacggacagcggaagctttgcgcaatcttggatttacagttctgccgtcgtcggctaatttcctatttgtaaaacctcccaatatcggcggcgctgaatttttcgccgcgttaagaaataggggtattctggtacggcatttcaacaaagaaagaattgcggactttttgcgtatcagtatcggaacagacgccgacatggataaagttcttgaagcggcaaaagatatattaaaaggtggaaaatga

SEQ ID NO: 69296 - protein, 311 aa, Unknown
  Obtained from environmental sample
  DOMAIN (2)...(303): Aminotransferase class I and II
  misc_feature (1)..(311): Xaa is any amino acid
MRLYPDPECAIFREAAAARYGVKPQEVFAGNGSDEILAFAFGAFFESGEKAAQILFPDITYSFYPVYANLWEIPYRTIALAQDFSININDYQVPSGGVIFPNPNAPTAVALALDDILSLAEYLEKQGKVLIVDEAYIAFSGSSDAQSAVRSINSHPNLLTVHTLSKSASLAGLRFGFAIGDEKLIEGLCRIRDSFNSYTLDLLALSGAAAAVSDAAYYEEINRRVIATRERTAEALRNLGFTVLPSSANFLFVKPPNIGGAEFFAALRNRGILVRHFNKERIADFLRISIGTDADMDKVLEAAKDILKGGK

SEQ ID NO: 69297 - DNA, 717 bp, Unknown
  Obtained from environmental sample
  misc_feature (1)..(717): n is a, c, g, or t
atgcagaggggaactttggtagttagcagggcggttaataaccactcgtactacaaaaagagatttgaagctcttgggtttcctgacgtaacggttacggctcttgaaaaggacgctctttcttcgcttatccgtaaacaaaaaccaaaacaattatttatgggggcaagattttatcaatgctgtacgccgtttttaatggggcaattacataaagattttcctaaaataaatatgactgctgtttgtatcggcgaataccctgccgaacttggtatgtattttattgtaaacggaattaaatcatactttacaagttttgagggccttgaccaattctataccggaattgacgaggtaagaaaaggcaatggttatatttcccctgcggcaatggctcgtatggatatgaggcaaactttcataatgcctgccggggatataactggcagggaaagggaagtgatacggcttatatgctgcggctataaggatttggaaattggcgataccctgcatatttcgagaaggactgtagatactcataaaacaaatatatttaccttgttaaatgtccgtaatgctgtcgaactggttattgccgccctgacgcttaaaattgtcaatctcgatgagctttatttccacccaaaagattatacgttaaatcctttaccggatacaaaaattaagaggagaagaaaaaatgattattag

SEQ ID NO: 69298 - protein, 238 aa, Unknown
  Obtained from environmental sample
  DOMAIN (145)...(202): Bacterial regulatory proteins, luxR family
  misc_feature (1)..(238): Xaa is any amino acid
MQRGTLVVSRAVNNHSYYKKRFEALGFPDVTVTALEKDALSSLIRKQKPKQLFMGARFYQCCTPFLMGQLHKDFPKINMTAVCIGEYPAELGMYFIVNGIKSYFTSFEGLDQFYTGIDEVRKGNGYISPAAMARMDMRQTFIMPAGDITGREREVIRLICCGYKDLEIGDTLHISRRTVDTHKTNIFTLLNVRNAVELVIAALTLKIVNLDELYFHPKDYTLNPLPDTKIKRRRKNDY

SEQ ID NO: 69299 - DNA, 702 bp, Unknown
  Obtained from environmental sample
  misc_feature (1)..(702): n is a, c, g, or t
atgattattagaacgaaatgcggggaatttcacgaggctaattcatcggttctgttggattttcttggcgtgaaaaaaacggcggcgggaattcaaaaagtttccgctgacgtggtgctggtttcgggcgtaccctttcacctgacggcagaaaatgaaaatgagaaaggttatccgtggacgttatcaacctatgaccttgaccgtttcggggaaaggatagatccgcagggttgggatttttcgcagtatgtaaaaaatcctattgtggagtgggcgcataggttcgacattccggcaatcggcaaaattgaggggctggcgattgatgacaaggggcttcatggctctgttgtcttcaatgataaagaatatgacgctttcgggtggggtatcggggagcgcgtaaaggccggtgttatccgcgccggttcggtgggctttcgtgttttggagattgaaattccgtcaaaagatgacagcacggacggtacaacgctcattttccgtaaacaggaattgcttaaattttccatctgcaacgttccggctaatccgtgggctttagtaaagcccaatgctttggcaaaggcaaagagcaatgaacaagcaccaacagagtcggcgataacaatgaacaatgaagacggctctaatgctgccccattttgggggggcttaatcaataattttgaggggtga

SEQ ID NO: 69300 - protein, 233 aa, Unknown
  Obtained from environmental sample
  DOMAIN (44)...(201): Caudovirus prohead protease
  misc_feature (1)..(233): Xaa is any amino acid
MIIRTKCGEFHEANSSVLLDFLGVKKTAAGIQKVSADVVLVSGVPFHLTAENENEKGYPWTLSTYDLDRFGERIDPQGWDFSQYVKNPIVEWAHRFDIPAIGKIEGLAIDDKGLHGSVVFNDKEYDAFGWGIGERVKAGVIRAGSVGFRVLEIEIPSKDDSTDGTTLIFRKQELLKFSICNVPANPWALVKPNALAKAKSNEQAPTESAITMNNEDGSNAAPFWGGLINNFEG

SEQ ID NO: 69301 - DNA, 1317 bp, Unknown
  Obtained from environmental sample
  misc_feature (1)..(1317): n is a, c, g, or t
ttgaggggtgaagttatggacgaaatagtattggctatgaaacaaaagttagccgcaatgaaaaaaatcgagaataccgggtttactgatctggcgaaggctaccgcctactttcaggaaaaagagatgatccttgaagaaatggcaaagacgcttngaactgttacatctaaccagtcagtacaaattgcgagtcttgaggggactataaagagtctgcgggacgaactgaaaacgcagacgaagtaccccaaagaacttacccgccgtgaactgttgtacaacctgggcaaggggattgtcgcggcgtggacaagaaatcagaaggttttgggtgaattggcttttacgcctaacctgaaatcggataactggactaatccgagcgacatttcctggggggagaagggctggattgatacaaaagccgccattggcgatccgatgggaaatatggcgacacctgaacaataccttataaacccgatttatgaaacggaaattatgagcgacgttgcgaaaaaatcggtgatgatgaacctcgtcagccaccgcccgatgaaagggtcttcaataatgcttcctacgagagagaggggcggggtaaagctgaactggttaaccgctttcggggaaaaaatcgaaggcagcaagccgcatggcgcggaaagggttgagttaaaagcctatactcttgcgggcttcatcccgtggtttgacgaatatgccgaggacgttttcattgatcttggggctttgtttattgatgaattccttgagacctatgggcaggaatttgacaggcagtgtttgattgcggataacgatccgtttaccggggcgatgatggtcaacgatgtaacggaggtaacgatagcccaaaacacaatagacaaattgacgtggaaggatttccgcgacagcgtttacaaagtccccgccgaggagcgcaaagattgcgcgtggttcctcaatgaaacggtactcaaccacatagccaacattgaagacacgacaggccgcccgatatggcggcgtccgagtgaagcaatgcccggcaaacttgacctgtatccttatcacgaagtctcatttttgccgcagattgcngacattaaggccggtgaaatttttgcaatttttatgaacccgaaacggattattcacggcaaccgtaaaggtattgaactcaagcggtatgaccagacaactgaagcgatggaatacggagaattgtttctccgcttcaggaagagggacgggttcctcgttaccagaccgaaaaacaacatggttgtattgaagactaaagcgtaa

SEQ ID NO: 69302 - protein, 438 aa, Unknown
  Obtained from environmental sample
  DOMAIN (156)...(436): Phage capsid family
  misc_feature (1)..(438): Xaa is any amino acid
MRGEVMDEIVLAMKQKLAAMKKIENTGFTDLAKATAYFQEKEMILEEMAKTLXTVTSNQSVQIASLEGTIKSLRDELKTQTKYPKELTRRELLYNLGKGIVAAWTRNQKVLGELAFTPNLKSDNWTNPSDISWGEKGWIDTKAAIGDPMGNMATPEQYLINPIYETEIMSDVAKKSVMMNLVSHRPMKGSSIMLPTRERGGVKLNWLTAFGEKIEGSKPHGAERVELKAYTLAGFIPWFDEYAEDVFIDLGALFIDEFLETYGQEFDRQCLIADNDPFTGAMMVNDVTEVTIAQNTIDKLTWKDFRDSVYKVPAEERKDCAWFLNETVLNHIANIEDTTGRPIWRRPSEAMPGKLDLYPYHEVSFLPQIADIKAGEIFAIFMNPKRIIHGNRKGIELKRYDQTTEAMEYGELFLRFRKRDGFLVTRPKNNMVVLKTKA

SEQ ID NO: 69303 - DNA, 1362 bp, Unknown
  Obtained from environmental sample
  misc_feature (1)..(1362): n is a, c, g, or t
ttgttacttgttatctgttatttgatattggtaattgatatgaagttgggaagtctgtttgacggtatcgggggtttttcattggcggcttccagggcgggaataatgcctgtatgggctagtgaaattgtgccggattgtatcagcattactaaaagacattttcctgttatgcgtcatttaggcgatataaccaaaataaacggcggggacattgagcctgtggacgttatttctttcggttcgccttgtcaggatttgagtatatcgggaaaacgtgcggggcttgacggcgaaaaatcggggctgttcttacaggctgttcgtgtcattaaggaaatgaggggtgctacaaacggaacctatccaactacaattatttgggaaaatgtcccaggtgcgtttagctcaaacaaaggcagggacttcctcaaagttattcaggagattgccggcattgccgaggcgggaatttcaattcctagaccttcgaggaaatccggctggctggctgctggagccgtcctgggagattgctggtcgctggcctggcgtgtcttcaacgctcaatactggggagtgccccaacgccgccgccgtatctacattgtcgcaaattttacagaccaatgtgccggggaaatactttttaagtcggaaagcctgtcagggaatattaaagagggcgaaaaagagagaaaaggaattgccggaaatattgaaaaaggcattaggacagcgggtttcaacgggtggcgaagcgtaacaggaacattggaatataaagaagaccgcgctccttgtatcaatgctgttatgccgccgaatatcgtaactcaatacactgtagacattggctattcaactgacagaattcagatgaaccctcaatcatcggtaacgcttcgggcaaacggcggggggaacggcgcgaataccggcttgtattgtcttcctgttagttattgcattatcgggaatacgattgacagggctgatgaaacaggcgggaacggtacgggggtcatcgaggaaacctgttatacattgaatacggttgaccgtcatgcggtttttactggttttcaagagactgtaggctgtttgtgcgctagagactataaaggggttggcaatcaatttgtaagcgaaaataaatgtgtatttaacaataaatatgaaataagaagattaacgcctttggagtgtgaacgattgcagggctttcccgatggctggacggaatacggacatgacggaaaaaaaatctccgacaatcagcggtataaggcgatagggaatagtgtcgctataccatgcgtagaattcatactaaaacagataacaggtaacagtgaatag

SEQ ID NO: 69304 - protein, 453 aa, Unknown
  Obtained from environmental sample
  DOMAIN (14)...(450): C-5 cytosine-specific DNA methylase
  misc_feature (1)..(453): Xaa is any amino acid
MLLVICYLILVIDMKLGSLFDGIGGFSLAASRAGIMPVWASEIVPDCISITKRHFPVMRHLGDITKINGGDIEPVDVISFGSPCQDLSISGKRAGLDGEKSGLFLQAVRVIKEMRGATNGTYPTTIIWENVPGAFSSNKGRDFLKVIQEIAGIAEAGISIPRPSRKSGWLAAGAVLGDCWSLAWRVFNAQYWGVPQRRRRIYIVANFTDQCAGEILFKSESLSGNIKEGEKERKGIAGNIEKGIRTAGFNGWRSVTGTLEYKEDRAPCINAVMPPNIVTQYTVDIGYSTDRIQMNPQSSVTLRANGGGNGANTGLYCLPVSYCIIGNTIDRADETGGNGTGVIEETCYTLNTVDRHAVFTGFQETVGCLCARDYKGVGNQFVSENKCVFNNKYEIRRLTPLECERLQGFPDGWTEYGHDGKKISDNQRYKAIGNSVAIPCVEFILKQITGNSE

SEQ ID NO: 69305 - DNA, 741 bp, Unknown
  Obtained from environmental sample
  misc_feature (1)..(741): n is a, c, g, or t
ttgatcagatcggccgagtcgcttgccatcaaaactgacggcagcttttgggcttggggaaggaatctcaacggccagctgggtcttggtgacgcaacaggccgcaacgtcccgacccgtgttggcgctgccaatgactgggcagcggtgtcggcgggcaatgttcatacgcttgccattaagacagatggcagcctttgggcatggggagcgaatttctacggccagttgggccttggcgacacgacaagccgcctcgccccgacccgcgtgggcactgccaatgactgggcggcagtatcggctgatgataatcacacgcttgccatcaagacagacggcagtctttgggtttggggatggaataatagcggacaactaggcattggtgacacgacaaaccgcaacgtcccaacccgcgtgggcactgccaatgactgggcggcagcatcgggtggcgcttattgtacgcttgccatcaagaaagacggcagcctctgggcttggggaagaaatgaagacggccagctgggccttggcgacgcgacaagccgcaacgtcccgacccgcgttggcacagacaatgattgggcggcagtgtcgcctggcgtcttctgctctttcgcgctaaagacggacggcacgctttgggcctggggctggaatgccaacggcgggctaggccttggcggcacgacaagccgcaacgtcccgacccgcgttggcacagacaatgactga

SEQ ID NO: 69306 - protein, 246 aa, Unknown
  Obtained from environmental sample
  DOMAIN (163)...(210): Regulator of chromosome condensation (RCC1)
  misc_feature (1)..(246): Xaa is any amino acid
MIRSAESLAIKTDGSFWAWGRNLNGQLGLGDATGRNVPTRVGAANDWAAVSAGNVHTLAIKTDGSLWAWGANFYGQLGLGDTTSRLAPTRVGTANDWAAVSADDNHTLAIKTDGSLWVWGWNNSGQLGIGDTTNRNVPTRVGTANDWAAASGGAYCTLAIKKDGSLWAWGRNEDGQLGLGDATSRNVPTRVGTDNDWAAVSPGVFCSFALKTDGTLWAWGWNANGGLGLGGTTSRNVPTRVGTDND

SEQ ID NO: 69307 - DNA, 384 bp, Unknown
  Obtained from environmental sample
  misc_feature (1)..(384): n is a, c, g, or t
gtggaggcgagggaagagtggcagtcaggccaaagcgcggtggacgcggcaagaacgtactggctcgatgagaccggcgtgaactgcggcatgacgcggctgtatggtagggccatggctggcgagagggtgtatgagtacgtgccggacgtcaggttcgagaggacgtcgcttgtgggggcccttgggctgggcggggtggtcgccccgctggcgtacaaaggctcgctggacggcgagtttttcgcggcctacgtcaagaagcgcctcgcgcccgcaatgagaaggggggacacgttgatcctggacaacctgtcggcccacaaagtgaagggcgccctgcggccgcttgccgacaagggggtcaatagacttctttcgtaa

SEQ ID NO: 69308 - protein, 127 aa, Unknown
  Obtained from environmental sample
  misc_feature (1)..(127): Xaa is any amino acid
MEAREEWQSGQSAVDAARTYWLDETGVNCGMTRLYGRAMAGERVYEYVPDVRFERTSLVGALGLGGVVAPLAYKGSLDGEFFAAYVKKRLAPAMRRGDTLILDNLSAHKVKGALRPLADKGVNRLLS

SEQ ID NO: 69309 - DNA, 378 bp, Unknown
  Obtained from environmental sample
  misc_feature (1)..(378): n is a, c, g, or t
gtggttgacaggggcaccggcgcggtcgcctgcaccgcctttgcggccggcaggcggcacgatttcaggcttttcaaggagtcgcgggtgaggttcggggcaggcgtggaagccagggcggacacgggctaccaagggatccagaggctgcacggcaattcggtcctgccgcgcaagaggccaaagaagagggccctgaccagggaagacaaggcgttcaaccacagcgtgtcaagcgggcgcgtattgaacgagcacgtgatcgggcgcatcaagcgcttcaggatcgtctccgaccgctacaggaaccgcaggaaaaggtttgccctccgcttcaacctgatctctggaatctgcaattatgaattgcaaaattaa

SEQ ID NO: 69310 - protein, 125 aa, Unknown
  Obtained from environmental sample
  misc_feature (1)..(125): Xaa is any amino acid
MVDRGTGAVACTAFAAGRRHDFRLFKESRVRFGAGVEARADTGYQGIQRLHGNSVLPRKRPKKRALTREDKAFNHSVSSGRVLNEHVIGRIKRFRIVSDRYRNRRKRFALRFNLISGICNYELQN

SEQ ID NO: 69311 - DNA, 477 bp, Unknown
  Obtained from environmental sample
  misc_feature (1)..(477): n is a, c, g, or t
ttgcagggggttaggggcatggggcattacgagcgaacaaaaagccttaaagagggcgatttcaagaggctgaccggagtgaagccagggacttttgagaagatggcggaaatcctcagggcggcgttcgcgggaaagaagcggctggtgggccgcccaaacaagctgtgcatcgaagacatgctgctgatggccctggagcatctgcgcgagcgccggacatatttccacgtgggcaagagctatggcctgtccgagtcaaacgcgtacaaggggataaagtgggtggagtacacgctggtcaaggacgggacgttttcgctccccgggcgcaaggccctgctggccggcggttcggaatatggggccgtcttggtggacgcgacggagaccccgatagagcgcccaaaaaaaacaaagggattggtactcgggcaaaaagaagcgccacaccgtaaaaacccaggtcgtggttga

SEQ ID NO: 69312 - protein, 158 aa, Unknown
  Obtained from environmental sample
  misc_feature (1)..(158): Xaa is any amino acid
MQGVRGMGHYERTKSLKEGDFKRLTGVKPGTFEKMAEILRAAFAGKKRLVGRPNKLCIEDMLLMALEHLRERRTYFHVGKSYGLSESNAYKGIKWVEYTLVKDGTFSLPGRKALLAGGSEYGAVLVDATETPIERPKKTKGLVLGQKEAPHRKNPGRG

SEQ ID NO: 69313 - DNA, 729 bp, Unknown
  Obtained from environmental sample
  misc_feature (1)..(729): n is a, c, g, or t
gtggaaatatgtccggcgctcgcgcagatgctccagggccatcagcagcatgtcttcgatgcacagcttgtttgggcggcccaccagccgcttctttcccgcgaacgccgccctgaggatttccgccatcttctcaaaagtccctggcttcactccggtcagcctcttgaaatcgccctctttaaggctttttgttcgctcgtaatgccccatgcccctaaccccctgcaaattactttaaactggattgaagggttacgaaagaggtctaatgaaaacgtggcacaatgtgccaatgaacataacatcagagcaattcgagcgcatagcgccatacctgccgcgcctgaccgcgcggctgtagctttttctctgtctggcggcaacaggcacgacgcgccggaaggcgagcttctgcttgatggcttcaggaggctgccggagcagcttttcattttgatggacagggcctgcgagggcgacaggatgcgtgggaaggcagcgggcatggggttcgtgccagtcgtcccgccaaagaagagccgcagggagccttgggagtacgacaaagagcgctacaaaaagcgaaacgagattgaacgttttttcctgcgcctgaagcggttccgcaaggtttttgccagatatgacaagctggacgtagtctttgctgggttcatctactttgcgatggttgccgatgcaattattagtgtgaacagactctaa

SEQ ID NO: 69314 - protein, 242 aa, Unknown
  Obtained from environmental sample
  misc_feature (1)..(242): Xaa is any amino acid
MEICPALAQMLQGHQQHVFDAQLVWAAHQPLLSRERRPEDFRHLLKSPWLHSGQPLEIALFKAFCSLVMPHAPNPLQITLNWIEGLRKRSNENVAQCANEHNIRAIRAHSAIPAAPDRAAVAFSLSGGNRHDAPEGELLLDGFRRLPEQLFILMDRACEGDRMRGKAAGMGFVPVVPPKKSRREPWEYDKERYKKRNEIERFFLRLKRFRKVFARYDKLDVVFAGFIYFAMVADAIISVNRL

SEQ ID NO: 69315 - DNA, 690 bp, Unknown
  Obtained from environmental sample
  misc_feature (1)..(690): n is a, c, g, or t
atgaagattgcaaaaaaagcgttggcggcgcttaccgtcataaccatcgtggcgcttatcggatgcgcttcaaaaccgaaagtcaaagttgttgaaatggaaaacaagggaacgtcgatgaacattaaaacgccggactggatcaaaaactacaccgccaacggcatttcggcggtacaggcgcagtacaaagacaaatactgcatcatcggcgaggaaagcggcgtgaacaaacaattcgttatgacatgggcggacaacttcagcgcacagcagagaatcggcgcgatgttacgcacaaacattgaaagcgaatatcaggcgcgggtaaagggcatggcgacatcgacaggcggcgcaaatgcgacagcatcgcaagcggcaagcacaggcgaacttaacaatcagattaacagcgtaattaacgcggttgtgaacgtgagctactcaggagcgcagagagaagcggactggtggagccttcgcagacgctatgatcccgatcagaaaaaagaatttacagatgaatacacggcttatgttctttacacaatccccaaaaaggaactgaacacgcaggtggcgaatgcgatgacaaccgcaatcaaaaaagattcggcgttatacgacatcaccattcagatagcgcaggatatgcttcaaaaaggcataatgaactggggcgaataa

SEQ ID NO: 69316 - protein, 229 aa, Unknown
  Obtained from environmental sample
  SIGNAL (1)...(23)
  misc_feature (1)..(229): Xaa is any amino acid
MKIAKKALAALTVITIVALIGCASKPKVKVVEMENKGTSMNIKTPDWIKNYTANGISAVQAQYKDKYCIIGEESGVNKQFVMTWADNFSAQQRIGAMLRTNIESEYQARVKGMATSTGGANATASQAASTGELNNQINSVINAVVNVSYSGAQREADWWSLRRRYDPDQKKEFTDEYTAYVLYTIPKKELNTQVANAMTTAIKKDSALYDITIQIAQDMLQKGIMNWGE

SEQ ID NO: 69317 - DNA, 966 bp, Unknown
  Obtained from environmental sample
  misc_feature (1)..(966): n is a, c, g, or t
ttgctccgcagaccctttgtttcctcagtctgcggagctttttttaatatgaggaaacaacgacaaatgaaaaaagaaaaaagaaaaggtaaaaaaggaagaatgagtgagcttgtctttccttttttcattcttcatttttattttttcttttgtaatggaggaaacaaaatgaataagatgaaattaacggcggctatcattgccgcttttgtaataataataggttgcgcaagcactcccaaaacttccaaagctgacgaacttgatctagcgatccgtgacgcgacggattatttgaatgaaaatatccccaaagggagtaaaattgtcattctcaatatccagtccgactccgccgccctttcggattacatcattgacgaactaatcgccaatgcggtaaacgaccatatttttcaggtggtagaccgccagcagttggacttgatccgtaaggagcagaactttcaatggtcgggagaagtggacgacaaacacgctttggaaatcggtaaatttttcggagcgcagacaatcgtgtcgggcaaggtgagtcaggtggcggaacgctaccgctttacaatccgcgccctaaatgtgcagaccgcgcaagtgcagggacaaaataatttcaatatcgccgcaggtaaaacaataaccgcattgatgaactcaaagggcggcgcgtctaaatcttcaacctcaggcggttcaggaacgcaaacaggaacaagcggctctggtggaaaggcggcgcaaccggcggctgcggcagggcctaaaattgggacatatactttctatccgcgcattagcccgacacgagccgggatagcggttaaggatgtttttattccgcagattgacgttaccaaagattttgttgtgatacatttttgcaggaatgcgacagcctcttggaagacgaaaaatcggatactggaattagcggatttattatga

SEQ ID NO: 69318 - protein, 321 aa, Unknown
  Obtained from environmental sample
  misc_feature (1)..(321): Xaa is any amino acid
MLRRPFVSSVCGAFFNMRKQRQMKKEKRKGKKGRMSELVFPFFILHFYFFFCNGGNKMNKMKLTAAIIAAFVIIIGCASTPKTSKADELDLAIRDATDYLNENIPKGSKIVILNIQSDSAALSDYIIDELIANAVNDHIFQVVDRQQLDLIRKEQNFQWSGEVDDKHALEIGKFFGAQTIVSGKVSQVAERYRFTIRALNVQTAQVQGQNNFNIAAGKTITALMNSKGGASKSSTSGGSGTQTGTSGSGGKAAQPAAAAGPKIGTYTFYPRISPTRAGIAVKDVFIPQIDVTKDFVVIHFCRNATASWKTKNRILELADLL

SEQ ID NO: 69319 - DNA, 999 bp, Unknown
  Obtained from environmental sample
  misc_feature (1)..(999): n is a, c, g, or t
atgaacaatgaaattggaggaaacaaaatgaaattgaaaacaatgaaactggcggcaataattgccgcgctctttctggcaatcggatgtgccggaagcccaaaggcaggatcgggtaatgacggactcgatgccggaatgagaaaaatatcggactatctgaatgagagaataccgaaaggcaacaaggtggtatttcttaacgtcaagagcgactggcccgatctttccgagtacattctttcagggctttctgagaacgccgtaaacgacagagtattttccgtagtagaccgccaacagcttgactcaatacgcgctgaactcaacttccagtggtctggggaagtaagcgacaaatcggcgcaggaaatcgggcagatgctcggagcgcaaataatcgtgtcgggagtagtaaccaagatcggcgacgaataccgcatacaggtacgggcgataacggtaaagaccgcggaagtacagggacaaacaactcagatgatagacggcaaaggcaagcgtgttgtcgcattgacaaaaaaagttgtccccgcaggttcgggcggtacgtcaacagcaagcccatcctccgcaggaggtcagggtacacggacgcaaacaggaacaacaagtggtactggcggacaggcggctcaacctgcgcaaacggcaaaggtaaaagcgggaacatacacatttttcccaagaccacaggcaacggttggtggacagccggtagaacactggttagataaagtttttgttagcggtaattttttcattgtttttattaaagatgtaccaagaggagatggcagttataataaaagaccaagttggacaggtcacgtatcaggagaaccgacaaggctggatagccaaaacacacccaaatcatggaaaatagtacgctatatcaatgaggatcgtactggaaattattcttttacttttgagaatgtaactggaacgagcttattcttnatcagattacgataa

SEQ ID NO: 69320 - protein, 332 aa, Unknown
  Obtained from environmental sample
  misc_feature (1)..(332): Xaa is any amino acid
MNNEIGGNKMKLKTMKLAAIIAALFLAIGCAGSPKAGSGNDGLDAGMRKISDYLNERIPKGNKVVFLNVKSDWPDLSEYILSGLSENAVNDRVFSVVDRQQLDSIRAELNFQWSGEVSDKSAQEIGQMLGAQIIVSGVVTKIGDEYRIQVRAITVKTAEVQGQTTQMIDGKGKRVVALTKKVVPAGSGGTSTASPSSAGGQGTRTQTGTTSGTGGQAAQPAQTAKVKAGTYTFFPRPQATVGGQPVEHWLDKVFVSGNFFIVFIKDVPRGDGSYNKRPSWTGHVSGEPTRLDSQNTPKSWKIVRYINEDRTGNYSFTFENVTGTSLFXIRLR

SEQ ID NO: 69321 - DNA, 378 bp, Unknown
  Obtained from environmental sample
  misc_feature (1)..(378): n is a, c, g, or t
atgcgtaccagccataataactttgggcttatggtagacctttcccacattcccatgacccatgagacgccggaatttgtagtccgcaccctcaagccctatatagtccatttccatgtaggaaacactgtgtgcagggatcccaaagcggaaggctacggagacgagcaccagcgttttggtttccccaacggttcaaacgacacagcccaggtacttgaatacttgcgcgtgcttaaaaacgaaggcttcttcaatgcggaaaatccctatgtgttttcctttgaggtaaaacctttcaaggatgaagatccggacacagtggtcgcgaatgccaaaagggtactcaaccgcgcctgggcattgctggaggactaa

SEQ ID NO: 69322 - protein, 125 aa, Unknown
  Obtained from environmental sample
  misc_feature (1)..(125): Xaa is any amino acid
MRTSHNNFGLMVDLSHIPMTHETPEFVVRTLKPYIVHFHVGNTVCRDPKAEGYGDEHQRFGFPNGSNDTAQVLEYLRVLKNEGFFNAENPYVFSFEVKPFKDEDPDTVVANAKRVLNRAWALLED

SEQ ID NO: 69323 - DNA, 1041 bp, Unknown
  Obtained from environmental sample
  misc_feature (1)..(1041): n is a, c, g, or t
atgaagatccggacacagtggtcgcgaatgccaaaagggtactcaaccgcgcctgggcattgctggaggactaagatgaagatcgtcatattggatggctatcctgaaaaccccggcgatttaagctgggcagagttcgaaaaattcggcgagcttaaagtctatgaccggacatctttaacagaccccaaagaatctatcgcaagaatcggagacgctgagatagtgtatgtaaataaaactccgctaacggcggaagtgttcaacgcttgcccctcgataaaattcgtcggcgtgcttgcaacaggttacaatgtagtggatgtgaatgtcgccaaggcaaagggcgtccctgtctgcaatattcccacctatggaactgcggctgtgggtcagttcgccatcgccctgcttctggaaatttgccaccacatcgggcatcacgaccaggcagtccacgagggcaggtgggaaaacaacgtggactggtgtttctgggatttcccccttattgaacttgccggcaaaactattggcatcatcggctttggacgcatcgggcagacaacgggcacgatagcaaaggccctgggcatgaaggtcattgcctttgacagtgttaccacagacagcggcaaacagatcgcggagtatgtcagcctcgacaagctgctcgccgagtccgatgtagtagcgctccactgccccctgttcccagaaacccagggcatcatcaacaaggccaacatcgccaagatgaaagacggcgtaatcatcctgaacaattcacgcgggcccctggtggtggagcaggatctggccgatgcccttaacagcggcaaggtatatgcggcaggcctcgatgtcgtttcctcggaaccaatcaagggaaacaatcctttgctcaaagcgaagaactgttttataacccctcacatttcatgggcgtcaaaggaaagccgccagagacttatggatatagccgtaggtaatttggccgccttcgttaagggcagcccaataaatgtagtgaacaagtaa

SEQ ID NO: 69324 - protein, 346 aa, Unknown
  Obtained from environmental sample
  DOMAIN (28)...(345): D-isomer specific 2-hydroxyacid dehydrogenase, catalytic domain
  misc_feature (1)..(346): Xaa is any amino acid
MKIRTQWSRMPKGYSTAPGHCWRTKMKIVILDGYPENPGDLSWAEFEKFGELKVYDRTSLTDPKESIARIGDAEIVYVNKTPLTAEVFNACPSIKFVGVLATGYNVVDVNVAKAKGVPVCNIPTYGTAAVGQFAIALLLEICHHIGHHDQAVHEGRWENNVDWCFWDFPLIELAGKTIGIIGFGRIGQTTGTIAKALGMKVIAFDSVTTDSGKQIAEYVSLDKLLAESDVVALHCPLFPETQGIINKANIAKMKDGVIILNNSRGPLVVEQDLADALNSGKVYAAGLDVVSSEPIKGNNPLLKAKNCFITPHISWASKESRQRLMDIAVGNLAAFVKGSPINVVNK

SEQ ID NO: 69325 - DNA, 1089 bp, Unknown
  Obtained from environmental sample
  misc_feature (1)..(1089): n is a, c, g, or t
atgctggatagaatggttattgatgaagccggaacagaagttcggtttgggacaacgatctgcgatgtaattggcaacaaccgcaagatagaatacgtgatcatcgacagcatcaatgggtttgaggcggtaaaagcggattactttgccgattgtaccggagatggccagttgagttttaaggccggggcttcttacatgctcggcaacgacgagggtttcggctcgtctccctccctcctgttccgcgttgccaatgtagacatagaaaaactcatctctgatatggaagcccatccggatacttatgcttcggaacgcaacacctattccaaccataaattaagccctcgccaaaacagggaaaatattgccaatgataaatacgcccattttgccgactttgttgcccttattcggcagaaggtaaaggaaaacccaggttttctgacagaatgggaacttgagaagatccttcagcgtggaatcattttcatgaaccagcccaagggaactcacgtgctggtaaactcaaccaggattccatattttaagggcaatgacaaaaaagagctttctgatgcaatggtatcgggaagaaaacagattgaggcgacgttccgttttatgaaagcgtttattccagggtttgaaaaagcctttatcatggataccgcgagtatgctgggcatccgcgagtcaaggcggattacaggcgactatgtttttaccgacgaggatgtgaacaattgccgcaaatttgatgatggggtggtgagcaattttggcggcgtagaaattcacgcggccaacgggcagggcacaaagattagcgagctgggaaagggtgatttttatcacgttccttaccggagcatcatcgcgaaagattttgacaacctgtatgtggctggtcgctgtttcagtgccaatcacgccgccctctcggcggcccggaacatcgcctattgcatggcgttgggacaggctgtgggaagtgccgccgcgcagcttacacacagcgggaaaaagaacgttcgggaaatagagataaaatctttacagaaagaactggcttcgattatgtga

SEQ ID NO: 69326 - protein, 362 aa, Unknown
  Obtained from environmental sample
  misc_feature (1)..(362): Xaa is any amino acid
MLDRMVIDEAGTEVRFGTTICDVIGNNRKIEYVIIDSINGFEAVKADYFADCTGDGQLSFKAGASYMLGNDEGFGSSPSLLFRVANVDIEKLISDMEAHPDTYASERNTYSNHKLSPRQNRENIANDKYAHFADFVALIRQKVKENPGFLTEWELEKILQRGIIFMNQPKGTHVLVNSTRIPYFKGNDKKELSDAMVSGRKQIEATFRFMKAFIPGFEKAFIMDTASMLGIRESRRITGDYVFTDEDVNNCRKFDDGVVSNFGGVEIHAANGQGTKISELGKGDFYHVPYRSIIAKDFDNLYVAGRCFSANHAALSAARNIAYCMALGQAVGSAAAQLTHSGKKNVREIEIKSLQKELASIM

SEQ ID NO: 69327 - DNA, 750 bp, Unknown
  Obtained from environmental sample
  misc_feature (1)..(750): n is a, c, g, or t
atgagatataaatttacgccgctgattgtgtttcttgcgctgtttctcgcttcatgtatgagtataaatcacagcagggaggagcttaatattcctccttccatagtttacttaagctttgacgacggacctaacactcaagacgatacaaccgcccgattgcttgatgtgcttaaaaaatatcaaattaaagcggttttttgtctgttaggtgaaaatgcagaacgcgctccggatacggttaaacgaatgtatgacgagggacattgtattgtcaatcatgggtattccgacaaatgggcaagcaagatgaaacccgatgaattccgtaataatctgctcctaggggaagcggcgatttctaaagctttggggcgcgatatgtatcccaaattgtaccgtcctcagggaggcttttacaattcaacgcaagaaaaaatccttcgcaatgaaggttacatattggttccaagcaatatcagggtctatgacgcggttcttgacggaacaaaacggaataagattgtaaagcaggttatagaaaaagttgaaaaacagggcggggggattattttactgcatgatgccagggattcttatgttcaggcggaagcgcagattgctaaagcgcctcacggtgtttttaaccgctcatggattcccgatactgtagaagaaataataactatccttttgaagaaggggtttattttgaataatcccgatattttaacgattatcggtaattga

SEQ ID NO: 69328 - protein, 249 aa, Unknown
  Obtained from environmental sample
  SIGNAL (1)...(25)
  DOMAIN (29)...(156): Polysaccharide deacetylase
  misc_feature (1)..(249): Xaa is any amino acid
MRYKFTPLIVFLALFLASCMSINHSREELNIPPSIVYLSFDDGPNTQDDTTARLLDVLKKYQIKAVFCLLGENAERAPDTVKRMYDEGHCIVNHGYSDKWASKMKPDEFRNNLLLGEAAISKALGRDMYPKLYRPQGGFYNSTQEKILRNEGYILVPSNIRVYDAVLDGTKRNKIVKQVIEKVEKQGGGIILLHDARDSYVQAEAQIAKAPHGVFNRSWIPDTVEEIITILLKKGFILNNPDILTIIGN

SEQ ID NO: 69329 - DNA, 1275 bp, Unknown
  Obtained from environmental sample
  misc_feature (1)..(1275): n is a, c, g, or t
ttgcctgcgctaatgaaactaaaactaatttatccaaagtggaacaaacttcccggacaaactacttttaatctgccgccgcacggacctgtggtatttgccgccgcccttcccgattatgttgacgtaacttttaccgatgaaaatgttcagccccttaactttgatgaagactgcgatcttgtcgcaatctcaatgatgctcagcacacaggtaaaacgcggctgggctattgcggacgaataccgcaaacgaggcaagcaagtaatcttcggcggtatttcaactatgctgcacgccgaggaaaccattcagcatgctgactcggtgtttctaggcgaagcggaaacacccatggaacaggttatcgccgactggaaagaaggtaaattacaaaaggtgtacaactttatgccccaacagccgccgattggctcaataggacccgcaagacgagatttgtaccaaaaagaattgtacaaccacaaaggcgttcagatggtagacctctttcacgcctcccgcggctgccgctttagctgttacccctgcgctgtttcctatctcggcggacgatcattccgtccccgtcctttggacaaagttgtcgaagaattggcaagcatagaaaataatcggctctttgtcgtagacaactctttggcgcaagacaaagaatgggaaatggagctattccgtgaaatgataccgcttaaaaagaaatggatcagccacaccatcgaagacgatccaaaagtactggaacttgccgcgcaagccggcgcgtggtatgtatatcaagctgtttatgacacatcggattatataaaagaacgtgttaaacgctatcacgactacggtatcggcgtagagggtactattcttttgggactggataatcaaacggaagacgattgcaaacggcttatcgacttcctgctggaaataaatcttgaccttgcggaatttaccgtaatgactcctttcccccataccaaagcttgggacgatttggcgcggcagggacgcatttttgatcacgactgggatcattttaacgcggggcaggtggtttttactccgaaacatatgagcgccgaacgcctgcaagagctttacgattacgcttgggaaactttttataaagatgaaactcaggaagaaaaaatgtttcatcttctttactccgtagtaaaccgcgaaatggaagacggaacttaccgtccgcgcaacaggcggctgattcataaatcattcggcaaggatgtacgttag

SEQ ID NO: 69330 - protein, 424 aa, Unknown
  Obtained from environmental sample
  DOMAIN (171)...(313): Radical SAM superfamily
  misc_feature (1)..(424): Xaa is any amino acid
MPALMKLKLIYPKWNKLPGQTTFNLPPHGPVVFAAALPDYVDVTFTDENVQPLNFDEDCDLVAISMMLSTQVKRGWAIADEYRKRGKQVIFGGISTMLHAEETIQHADSVFLGEAETPMEQVIADWKEGKLQKVYNFMPQQPPIGSIGPARRDLYQKELYNHKGVQMVDLFHASRGCRFSCYPCAVSYLGGRSFRPRPLDKVVEELASIENNRLFVVDNSLAQDKEWEMELFREMIPLKKKWISHTIEDDPKVLELAAQAGAWYVYQAVYDTSDYIKERVKRYHDYGIGVEGTILLGLDNQTEDDCKRLIDFLLEINLDLAEFTVMTPFPHTKAWDDLARQGRIFDHDWDHFNAGQVVFTPKHMSAERLQELYDYAWETFYKDETQEEKMFHLLYSVVNREMEDGTYRPRNRRLIHKSFGKDVR

SEQ ID NO: 69331 - DNA, 1539 bp, Unknown
  Obtained from environmental sample
  misc_feature (1)..(1539): n is a, c, g, or t
atgaatcaggaaataattgagatcggcaaagatcggctgacaattgaagcccttgtctctgcggcaaaaaaacaaataaagacacggctttgccgcagcgccgaatttgaagcgaagattgagaaaggagcagcgcttcttgattcgatgctggcaaaacacggcggaatctacggcgttaccacaggttacggcgattcctgtaccgagaccgtaaaagccgaacaataccgcgaactgccgattaatttaacccgcttccacggctgcggcatgggagattattttgacgatgaaacagtcagggcattgatgatcgtaagactcaataccttggcaatgggatattcaggcgtcagcatggaattactgcgctatatcgaattttttatcgaacatgacattctgccgcttgttccgcaggaaggttctgtcggagcgtcaggcgacctcactcccctttcgtatcttgcaggcgcgctcatcggggaaagacaagtccgctatcagggcaaggttcgccctgccgtcgaagcgcttgcggaattaggcaagctcccctatcaattccgtcccaaagaggccatagccgtaatgaacggaaccgcggtaatgaacgcagccgccgctatggctttatacgacgcggaatatcttgccgagcttgcgtgtcgtataacagcaatgaattcaatagcccttaaaggcaacgcttatcactttaacaaacggcttttcgagttaaagccccattcgggacaagctttagctgcggaaaaaatacgaataagcctgccggaagaaaatcagggagcgctttccgctccggcaagaattcaagacccctactctatccgctgcgctccgcatgtaatcggtttgttttacgatatgagcgaaaccctgcgcaattttatcgaaaccgagatgaacagcgcaaacgataatccgcttattgattccgaaacacaatccgtataccactgcggacatttttacggaggacatatttgctttgcgatggattcgcttaaaaacatcatcgccaatatagctgaccttttagatagacagcttgccctgattgtggatacaaaatacaaccgaggacttccgccgaacctcacgggaacgttaggcgctatagcgtgcaatcacggtttcaaagctgtgcaaatcgcagtttccgcatggactgccgaagctctaaaaaacacaatgcctatgagcgtattttctcgttcaacggaatgtcataatcaagataaggtaagcatgggtactatcgccgcccgcgattgtgtgcggatcaataaactgacagcgcaagttacgtccgccatgctgttagccgcttttcaagctattgatctgcggctgaaaaagggcgagcttaaacttggcggcttgggacaggcggaaaaaacatataacgaaatcgccgctttttttaaaccgcttgttgatgaccgtccgttagaagacgatctgcgtaagacgttaaaattaatagaggaacggcatttttgcctgcgctaa

SEQ ID NO: 69332 - protein, 512 aa, Unknown
  Obtained from environmental sample
  DOMAIN (5)...(489): Phenylalanine and histidine ammonia-lyase
  misc_feature (1)..(512): Xaa is any amino acid
MNQEIIEIGKDRLTIEALVSAAKKQIKTRLCRSAEFEAKIEKGAALLDSMLAKHGGIYGVTTGYGDSCTETVKAEQYRELPINLTRFHGCGMGDYFDDETVRALMIVRLNTLAMGYSGVSMELLRYIEFFIEHDILPLVPQEGSVGASGDLTPLSYLAGALIGERQVRYQGKVRPAVEALAELGKLPYQFRPKEAIAVMNGTAVMNAAAAMALYDAEYLAELACRITAMNSIALKGNAYHFNKRLFELKPHSGQALAAEKIRISLPEENQGALSAPARIQDPYSIRCAPHVIGLFYDMSETLRNFIETEMNSANDNPLIDSETQSVYHCGHFYGGHICFAMDSLKNIIANIADLLDRQLALIVDTKYNRGLPPNLTGTLGAIACNHGFKAVQIAVSAWTAEALKNTMPMSVFSRSTECHNQDKVSMGTIAARDCVRINKLTAQVTSAMLLAAFQAIDLRLKKGELKLGGLGQAEKTYNEIAAFFKPLVDDRPLEDDLRKTLKLIEERHFCLR

SEQ ID NO: 69333 - DNA, 1233 bp, Unknown
  Obtained from environmental sample
  misc_feature (1)..(1233): n is a, c, g, or t
gtgatagaaaacaaacgggtggtaattaccggcggttcgataatcagcgcgttgggatgcgaatggccggatatattggcaaagttaaaagcgggaaaaaactgcgtccgtaaaatggatgactgggacaggtatgatcgcatgaataccaagcttgcggctccagtggattttaccatgcccgattatccgcgaaagaaaacccgcggccttggcagggtcgcccagcttgctttggtttccgcggacagggccctaatgcacgccggcataaacgcggacgatccggaactgaagaacggtcgctgcggcatcgcttttggctcgtccatgggaagcatcgattccctcatggatttttacagcatgctggttaaggatgatataaccgccatgagcgcgaccacgtacatcaaggcgatgccccagacctgcgccgcgaacatcggcgtatttttcggcctgaccggaagaattattacaactaacacggcctgcacctcaagcagccaggcgatcggtttcgcctatgagacggtaaagcggggcattcaggacattatgctggcgggcggcgccgaggatttaagcgcggcggacgccgctgtctttgacactctctttgccgcaagttccaaaaatgacagtccgcaaaaaactcccgccgcttatgataaaaaccgcgacggtcttgttatcggcgaaggagcgggaacattgatactggaagaatatgaacacgcggtaaaacgaggagcgaagataattaccgagattatcggattcggaacgaacactgacggcactcacattacacaaccgaaccgcgaaactatgggtattgccatgaagctggctctgaaagacgcaggacttgatccggcttccattgtttatgtgaatacccacggaaccgccaccgatacaggcgatgtcgcagaaagctgggctactgcggatatttttcaaagacctattccggcaagcacattaaaaagttacatagggcatacgttaggagcctgcggcgttattgaagcgtggattgcgattaacatgatgaaagaaaaatggttctgccccaacttaaatcttgaagaacttgatcctcgctgcggaccgcttgattatatcaccggagacggacggaagattgacggggaatatatcatgtcaaataatttcgcctttggcggagttaatacttctcttatcttcaggaacttgccatga

SEQ ID NO: 69334 - protein, 410 aa, Unknown
  Obtained from environmental sample
  DOMAIN (256)...(409): Beta-ketoacyl synthase, C-terminal domain
  misc_feature (1)..(410): Xaa is any amino acid
MIENKRVVITGGSIISALGCEWPDILAKLKAGKNCVRKMDDWDRYDRMNTKLAAPVDFTMPDYPRKKTRGLGRVAQLALVSADRALMHAGINADDPELKNGRCGIAFGSSMGSIDSLMDFYSMLVKDDITAMSATTYIKAMPQTCAANIGVFFGLTGRIITTNTACTSSSQAIGFAYETVKRGIQDIMLAGGAEDLSAADAAVFDTLFAASSKNDSPQKTPAAYDKNRDGLVIGEGAGTLILEEYEHAVKRGAKIITEIIGFGTNTDGTHITQPNRETMGIAMKLALKDAGLDPASIVYVNTHGTATDTGDVAESWATADIFQRPIPASTLKSYIGHTLGACGVIEAWIAINMMKEKWFCPNLNLEELDPRCGPLDYITGDGRKIDGEYIMSNNFAFGGVNTSLIFRNLP

SEQ ID NO: 69335 - DNA, 561 bp, Unknown
  Obtained from environmental sample
  misc_feature (1)..(561): n is a, c, g, or t
ttgggaatgccggatcagaaaacagaagaggaactgtggcaagagtaccgtaaaacacgggaccctaaaataagagaattctttattaaacaatacgctccgcttgtaaaatatgtagccggcagagtcgccgtaggaatgcccaataatgttgagtttgacgatttggtaggttttggggttttcgggcttattgacgcgatagaaaaatacgatacggaaaaaaacgtaaaatttaaaacttatgccgttacgcgcatacgcggcgctatttttgacgaactgcgccttatagactgggttccgcgctcggtaaggcagaaaacccgggaggtggaaacgactatttcgtctttggaagcccagcttggcagaaccgcgtcggatcaggaaatagcgagcgccatgggtctggacgaatccgagtacatgaaggttattcaaaaaatttccggaacttcgataatatcgcttaacgatttatggtattccggagacgagaacgacaaagtttcaataggagacagcatagaatcgccttcaagcatgaatccggagtaa

SEQ ID NO: 69336 - protein, 186 aa, Unknown
  Obtained from environmental sample
  DOMAIN (102)...(184): Sigma-70 region 3
  misc_feature (1)..(186): Xaa is any amino acid
MGMPDQKTEEELWQEYRKTRDPKIREFFIKQYAPLVKYVAGRVAVGMPNNVEFDDLVGFGVFGLIDAIEKYDTEKNVKFKTYAVTRIRGAIFDELRLIDWVPRSVRQKTREVETTISSLEAQLGRTASDQEIASAMGLDESEYMKVIQKISGTSIISLNDLWYSGDENDKVSIGDSIESPSSMNPE

SEQ ID NO: 69337 - DNA, 918 bp, Unknown
  Obtained from environmental sample
  misc_feature (1)..(918): n is a, c, g, or t
atggaagatcaagctgaaaaactacgtgaaataatgaaacgcaagaaagaaggtacggttccggcaaaatccgcttctgccgcaaaaacaactgttaaaagcgccgacaagccccgcattataactgttacttcaggcaagggaggcgtcggaaagacaaacctttccgtaaatatggcgctggcgttcgccagaataggaaaaaaagttatcgtcatggacgcggacttggggcttgccaatgtaaacgtaatgcttaacatgatccctaaatacaacctgtaccatgtgataaaaaagcaaaaaacaatacgggaaattcttgtggaaaccgaatacggcatttccatcgtggccggcgcttccggtttttcgcagatcgcgaacctgggcgaagaagacagaagagactttattaaagaactggattccctttccaacgcggatatcattattatagacacaagcgccggagtctccagcaatgttctggactttatcgccgccgcggacgacgcggtaataattaccactccggaacctaccgcgattaccgacgcttacgggattataaaaattatagctaccgagtatgattcccttaacatggggttaaaacttgtcgttaacagggcgaggggagcggcggaagcgaaaagcgtcgcggacaggatgatcaatatttccggtcagtttttgaatttaaaagttgattatcttgggtttatttacgatgattcatccgttccgcacgcggttatcaggcaaaaaccttttatggtggtggatccaaaatgcaaggcgagtatctgcgtccagcatattgttgagcgcatggacaggaacaaacacggggaatcgcacggtttcggggcaatgctcagaagatttttcggcggttcgccggatacgatataa

SEQ ID NO: 69338 - protein, 305 aa, Unknown
  Obtained from environmental sample
  DOMAIN (39)...(301): 4Fe-4S iron sulfur cluster binding proteins, NifH/frxC family
  misc_feature (1)..(305): Xaa is any amino acid
MEDQAEKLREIMKRKKEGTVPAKSASAAKTTVKSADKPRIITVTSGKGGVGKTNLSVNMALAFARIGKKVIVMDADLGLANVNVMLNMIPKYNLYHVIKKQKTIREILVETEYGISIVAGASGFSQIANLGEEDRRDFIKELDSLSNADIIIIDTSAGVSSNVLDFIAAADDAVIITTPEPTAITDAYGIIKIIATEYDSLNMGLKLVVNRARGAAEAKSVADRMINISGQFLNLKVDYLGFIYDDSSVPHAVIRQKPFMVVDPKCKASICVQHIVERMDRNKHGESHGFGAMLRRFFGGSPDTI

SEQ ID NO: 69339 - DNA, 1305 bp, Unknown
  Obtained from environmental sample
  misc_feature (1)..(1305): n is a, c, g, or t
atggaaatgtattgtgaaacagggttaaacagaaaagactgcgaacttaaaatcagggaaaaatacacaagcccttttactgtctacagggtagaaccgattaatataggcggtttttttggtttcttttcaaagcccggcgtaagattatggttttatttcccgtcttctaccagtaaaaatacaacttgggcaaaccaggtgaacgaaaccgcgaatcatcccgccggtttggaagaagaaaagaaaaaaataattgccataggaagaagttttgaacagtcggcagcaaattcaggtgttggaactgcaagtatggcaaatacaagcattgtaaatacaggtattgtaaatacccgtgacgccgcgcagcagctcctgaattcaataaatgactccataaatgaattaaaagaaaaagtttcaggcggcaaagaagaacatccggcgtttacccgcgccgcggaactacttaaaatgaatgatttttccgaaaagtatataaagggcattcttgaaaggctaaggaaagagatgcctcttgaaacattggaggatcctaacgcggtacaggagaaaatgctggaatggataggggagagtatcaatatttataaggaagaaacgcctgcccgaaaacccaggattatggttcttgtagggcctacgggcgtaggaaaaaccacaacgatttccaaacttgcggcaatttacgtggtaggaagggaaggggttccccctatagaagtgaggatgataactatcgatctttttcgtataggcgcaaaagaacagcttgaaaaaataggcaatattatgcagattccggtgttaactgctgatgataaaatgacattaagaaaagaaatcgcgcttaatttcgaggaaacagatctttttctgattgacactataggaaacagcccaaaagacgccgcgaagttgggtgaaatgaaagaaattctggacggctgcggcaagacggcggaatttcacctggttatttcggcgggaacaaaaacaagcgatatagaaaatattttacggcaatttgagccttttaattacagatccgtaatccttacaaaactggacgagacggaacatgtaggcaatataatatccgtgcttgccgagaaaaataaaccggtttcatatataacagacgggcagaaaattcctcttaatataaacaaagctgctgtagttcgttttttaatcaaccttgaaggtttcaagattgatcgggataaaattgaaaagcgcttcccttccggcgaagctgatcagtttaagtggagatag

SEQ ID NO: 69340 - protein, 434 aa, Unknown
  Obtained from environmental sample
  DOMAIN (213)...(411): SRP54-type protein, GTPase domain
  misc_feature (1)..(434): Xaa is any amino acid
MEMYCETGLNRKDCELKIREKYTSPFTVYRVEPINIGGFFGFFSKPGVRLWFYFPSSTSKNTTWANQVNETANHPAGLEEEKKKIIAIGRSFEQSAANSGVGTASMANTSIVNTGIVNTRDAAQQLLNSINDSINELKEKVSGGKEEHPAFTRAAELLKMNDFSEKYIKGILERLRKEMPLETLEDPNAVQEKMLEWIGESINIYKEETPARKPRIMVLVGPTGVGKTTTISKLAAIYVVGREGVPPIEVRMITIDLFRIGAKEQLEKIGNIMQIPVLTADDKMTLRKEIALNFEETDLFLIDTIGNSPKDAAKLGEMKEILDGCGKTAEFHLVISAGTKTSDIENILRQFEPFNYRSVILTKLDETEHVGNIISVLAEKNKPVSYITDGQKIPLNINKAAVVRFLINLEGFKIDRDKIEKRFPSGEADQFKWR

SEQ ID NO: 69341 - DNA, 846 bp, Unknown
  Obtained from environmental sample
  misc_feature (1)..(846): n is a, c, g, or t
gtggattcaggaaggggaaaaatccgcattggatattacctttgcataaaccctggaaccgtaacaaccgaaatgcccggcgaaaaaacggtagatcccgctttcgggcttccggcaatctggatagatcaggacaagagggacgaagcggaaaggtgcggctataccgtagtggatccgccgtcaataatcgcgacccatttaacagaaattatccgcagacacgccgcggacattctgggcttgcaggacacgcagaaaatcctgaacgaactgaaaaaagagtatccggccgttgttgaagaagttttaagagacggcaagggcttaaggattacggagatacaaaagattctgcacggcctgttacgcgaaagagtctcaatccgcaacatggtaaccattctggaaaccatcgccgattacgcgcctgtatccaaaggaagcatatggttccttacggaaaaggcgcgtcaggctcttgccagccagatatgcagccagtatgccgatgatgaccgcaggctgcgcgttcttacgattgatcccgctcttgagcaaaagatcatagaatccagatatgagacctcgtccggcgtgatatccgccatggaccccctcttccataaaatgtggatcgagactgtaagaaaagcggtaacggcggtcaaggaaaaaggctggatgcccgttatcatctgttcggaacaggcgcgtttccttgtaaaaaattcaaccgaccgcgaaatgccggatttggctgttttgtccagtcttgaaatagtgcaggatgtgattccggaggcggtgggagtgatacgtatagaaaataaatcaacggagtaa

SEQ ID NO: 69342 - protein, 281 aa, Unknown
  Obtained from environmental sample
  DOMAIN (2)...(266): FHIPEP family
  misc_feature (1)..(281): Xaa is any amino acid
MDSGRGKIRIGYYLCINPGTVTTEMPGEKTVDPAFGLPAIWIDQDKRDEAERCGYTVVDPPSIIATHLTEIIRRHAADILGLQDTQKILNELKKEYPAVVEEVLRDGKGLRITEIQKILHGLLRERVSIRNMVTILETIADYAPVSKGSIWFLTEKARQALASQICSQYADDDRRLRVLTIDPALEQKIIESRYETSSGVISAMDPLFHKMWIETVRKAVTAVKEKGWMPVIICSEQARFLVKNSTDREMPDLAVLSSLEIVQDVIPEAVGVIRIENKSTE

SEQ ID NO: 69343 - DNA, 384 bp, Unknown
  Obtained from environmental sample
  misc_feature (1)..(384): n is a, c, g, or t
ttgcgtaacgtcgcggattccgtccatattgacgaagaaatcagtaaatacatagtgtctgttgtaaccgccacaagaccggcgtcaacaagacaaatatccgcagttcaacagcaaaagactgaaagcgtaaaaatagaagcggagggcgtgtaccgttatgtgtcattcggagcttctccgcgtgcttctatagcattataccggtgcagccgtattcttgcgatgtttgaagggcgtaactttgtaagccctgaagacgtaaaaacggccgcttttccggttttgcggcataggattgtactttcttatgaagcggaagcggaaggcatggacgcggatgcggttataacaagaatattaagccatgtccccgttccgtaa

SEQ ID NO: 69344 - protein, 127 aa, Unknown
  Obtained from environmental sample
  misc_feature (1)..(127): Xaa is any amino acid
MRNVADSVHIDEEISKYIVSVVTATRPASTRQISAVQQQKTESVKIEAEGVYRYVSFGASPRASIALYRCSRILAMFEGRNFVSPEDVKTAAFPVLRHRIVLSYEAEAEGMDADAVITRILSHVPVP

SEQ ID NO: 69345 - DNA, 534 bp, Unknown
  Obtained from environmental sample
  misc_feature (1)..(534): n is a, c, g, or t
atggaaacaagcgaattactgcggactattattaaccttcccattttttcaaaaggacttgccgatgaaatgcttgcgggaaatttcagctctatttttaagggacagggaatggaatttgacgaggcgcggcattatgagcttggcgatgatatcagatcgatagactggaacgcaagcgcgcgttttggcgtcccatttgtaaaaatgttccgcgaagaacgcgaattaactattttaattttacttgatatttctccctccatgcatcggacgcatattgcgcaacaggggttaagcccatacgagcaggcgctaatctgtacggctttaatcgccttttccgccgaacatacggatcagaatgtaggcgcgtttttatttgacagggacattgaaaaagtttttccgccgcgcaagggacgcaaggctataatgtcgatagtaatggccgccctacagtatcagaacaacattataccgcgcagatcgcagtacgggagcgacatagcttccgcgttaacggcgcgctga

SEQ ID NO: 69346 - protein, 177 aa, Unknown
  Obtained from environmental sample
  misc_feature (1)..(177): Xaa is any amino acid
METSELLRTIINLPIFSKGLADEMLAGNFSSIFKGQGMEFDEARHYELGDDIRSIDWNASARFGVPFVKMFREERELTILILLDISPSMHRTHIAQQGLSPYEQALICTALIAFSAEHTDQNVGAFLFDRDIEKVFPPRKGRKAIMSIVMAALQYQNNIIPRRSQYGSDIASALTAR

SEQ ID NO: 69347 - DNA, 357 bp, Unknown
  Obtained from environmental sample
  misc_feature (1)..(357): n is a, c, g, or t
gtgcttatatcggatttttacagtattaattgggaacatgaaatggacaacctttgcagaaaacacgatgtaatagcgttaaaaatttccgatcctaacgaacttccttttaacggactcataacgctggaagacccggagacgggagtgcggatagaagcgcccgccggtcttgattcattcaaggaaagctgggcaggctggcttgaagaaagatcaattcaatgggaatccaagtgcaaaaaaagcggggcggcggttttgaagttatccacggaaacggacgcgccttccgccctgataaaattcttcggaagccgctctttaaacagatacataaaccggaaaaagaaatga

SEQ ID NO: 69348 - protein, 118 aa, Unknown
  Obtained from environmental sample
  misc_feature (1)..(118): Xaa is any amino acid
MLISDFYSINWEHEMDNLCRKHDVIALKISDPNELPFNGLITLEDPETGVRIEAPAGLDSFKESWAGWLEERSIQWESKCKKSGAAVLKLSTETDAPSALIKFFGSRSLNRYINRKKK

SEQ ID NO: 69349 - DNA, 1038 bp, Unknown
  Obtained from environmental sample
  misc_feature (1)..(1038): n is a, c, g, or t
atgggaatccaagtgcaaaaaaagcggggcggcggttttgaagttatccacggaaacggacgcgccttccgccctgataaaattcttcggaagccgctctttaaacagatacataaaccggaaaaagaaatgaaaaaatattcattttttattttttttattttactaacctgcgttttatacgcgcaaaacgcaagcgcgtatcttattccgcggcaaatatatgtgggagaccccgcgtcttttgttttaccgcttccggcttccgtacaaaacgaagattttgtcattacatcatacgacaaggatttaatcccgtcagaccccaatattgattttcacagaataattttggaacgccgcactacgggaagcagattgataattgaatttacgcctttcgcatccggcgttttggcgctgcccggcatagaaataggagacgattattttttcggcttaacggtcacggtaaattcattgctggacgttcgctcagacccaatactttccgcgcccgcttccgctctttcaatgccgggaacggcggcaatgctttacggttcaatggcgattcttgtccttgttattctactgacgatttggttcatctttaagggacgcgccgcgataaaaagtttgcgtaaaaaatggaaacgtttaagactttttaaaaatatgataaatacggaaaggcggctctacaaggcgttatcaaaaggcgcggaaaaaagagaagtccttgataaactttcaaatgaatttaaggcttttctttccatccttaccgaaaacgattgccgcgccatgacagcccgcgaatttatagagtttttctttcaactgccaaaagatttattttcagcgcaggaagacacagcgtattttcttggaagttttttccgtaaatgcgacgagcttcgtttttccggctctgacatcgatgttaaggctatacttcgtttgttatcggaactccatctttttacctgcgcccttgaaaaaagcgagaaaaagaaaacaaggagggcggcgtga

SEQ ID NO: 69350 - protein, 345 aa, Unknown
  Obtained from environmental sample
  misc_feature (1)..(345): Xaa is any amino acid
MGIQVQKKRGGGFEVIHGNGRAFRPDKILRKPLFKQIHKPEKEMKKYSFFIFFILLTCVLYAQNASAYLIPRQIYVGDPASFVLPLPASVQNEDFVITSYDKDLIPSDPNIDFHRIILERRTTGSRLIIEFTPFASGVLALPGIEIGDDYFFGLTVTVNSLLDVRSDPILSAPASALSMPGTAAMLYGSMAILVLVILLTIWFIFKGRAAIKSLRKKWKRLRLFKNMINTERRLYKALSKGAEKREVLDKLSNEFKAFLSILTENDCRAMTAREFIEFFFQLPKDLFSAQEDTAYFLGSFFRKCDELRFSGSDIDVKAILRLLSELHLFTCALEKSEKKKTRRAA

SEQ ID NO: 69351 - DNA, 999 bp, Unknown
  Obtained from environmental sample
  misc_feature (1)..(999): n is a, c, g, or t
gtgaacttcggttttgataacatatttatatttatctgcgccttttttgttattcccgccgcggtgattattttctcccgcatgaaagatccgtttgtagccactatccctctcggcgcgcccggcggaactccttttaaaacttcgcatataaacggcattgtcaatttgctgaaattcttagagttaataggattattattactctttttcagcgcggcaggtccttcaatgaagaccgcggaaattgtctggctgaacaggggcgcggatattatttttattttagacataagccccagcatggcggcaatcgacatggacgggaaaaatcgttacgacgccggcaaagcgttaattaccgaattcgcgaacaagcgccctacagacagcgtcgggcttgtcgctttcggcgaagatgcagccctgcttctccctcccactgcagacaggcaggctctggaattgcgtcttgaacaactgaaaataggggaaatgggagacgttaccgctctcggcatgggaatcgcggtcgccgcgtatcaccttgataaatccaccgctaagcgaaaaatcgcggttttaattacagacggggaaagcaacgccggttccatacatcctgaaacagcggcggatttgttacgcgatctcggcatatcattctgggttatcgccgtaggttcaatgggagaagtgccgatagattatatcgatccgcacacaaaaatacggcgcgcgggaatttttgattcccgttatgacacggagagcctaaggcgtttaagcgcggttggaggcggcacttttattaccgccgttaacgcggatgcttttgccgcggcattttcgcagttagacgacgctgaaattacggtgcagagatcccgcatcgtaaaccgcatgacttccgtttcttttcaatttttactagccgccgttattttgctggcggcggttaaaataataagacggtttatactgagggctatgatatga

SEQ ID NO: 69352 - protein, 332 aa, Unknown
  Obtained from environmental sample
  DOMAIN (91)...(286): von Willebrand factor type A domain
  misc_feature (1)..(332): Xaa is any amino acid
MNFGFDNIFIFICAFFVIPAAVIIFSRMKDPFVATIPLGAPGGTPFKTSHINGIVNLLKFLELIGLLLLFFSAAGPSMKTAEIVWLNRGADIIFILDISPSMAAIDMDGKNRYDAGKALITEFANKRPTDSVGLVAFGEDAALLLPPTADRQALELRLEQLKIGEMGDVTALGMGIAVAAYHLDKSTAKRKIAVLITDGESNAGSIHPETAADLLRDLGISFWVIAVGSMGEVPIDYIDPHTKIRRAGIFDSRYDTESLRRLSAVGGGTFITAVNADAFAAAFSQLDDAEITVQRSRIVNRMTSVSFQFLLAAVILLAAVKIIRRFILRAMI

SEQ ID NO: 69353 - DNA, 1464 bp, Unknown
  Obtained from environmental sample
  misc_feature (1)..(1464): n is a, c, g, or t
atgatattcgacaacgatcttaaaaagaaattactggtctccgagattttgttttgtttatttttattgtttgccgttatagcgctcattggtccgaaatggggagtaggttacgcgcccatagaataccgtaaagggcttgacgttgtttttgccattgatatttcgcgcagtatggatattcgcgacgcgcaaacaggatcccaatcaagatcgcgcgcggttttccagtcccgtcttgagcgcggcatttccatcgccatggaaagcgttacggctgtttcaggagcgcgttttgccgcaactataggacgcggaaagggatatttggcagtcccattaacctacgacagcgaagccgctctgcttttccttgaatcgcttaatgtttcttccatgacgggaagaagcacaaaccttgaatcattagttgacgcggcggcggacgcttttcaggactcttctcccgcgcgaaaagtaattgttcttatctcggacggcgagtctcatgccggcgttttaagaaacgcggttaaccgctgcgtacgcgacggtattacattgaatactgtcgccgtcggcagcgacgaaggacggcagataacgacgcaagctaacgatcccgattctccgtccgcgttgagcagaagggattcagccgcaatgagagccgccgccgaaagaacgggcggcatttacattgacgcagtccgcgaggactcaggcgccgcgctttcttcccagcttctttcacttgcgcaggacatggggagcagaagcaggaaacaggagccgaaacaaagaagaccgttatttatcatacttgccattattgcctacggcgcgtcaaaatttgttacgcgtcaatcgcaaaagaaacccctgcggcgattatccgtcgtttcgattatcgtacttttattttttacttcctgttccgagggcaaacttcttcttcttcaagccaactacttaaatatattgggcagatacgacgaagcggtagccccctacttaaaagcgttaagttacgaaaaagcggcgccttacgcggaatacggtcttggtcttactttttatcagcttgacgaagggaaagcggcgttaaaccgctacaaagattcgcataaacttcttgaaaaatatccgacaaacgaacacagggaactgagattcaggaatcactacaattcgggcgtaatatattttgaagaaggcgattaccgttccgccgccgattcgtttaaagacgcgttaagaacagacccaagaagactggacgcgaaacgcaatttggaattaagcctgatgtcgatatcgatggaaacaaacgcggagagcagaacgggaaaccgcgaagaaagcagagaagttctttttgaattcttaaaacaacacgaacagcaaaagtggaaaagcaaggaatggacgccggaagaaaattattcgggaccggattattag

SEQ ID NO: 69354 - protein, 487 aa, Unknown
  Obtained from environmental sample
  DOMAIN (48)...(256): von Willebrand factor type A domain
  misc_feature (1)..(487): Xaa is any amino acid
MIFDNDLKKKLLVSEILFCLFLLFAVIALIGPKWGVGYAPIEYRKGLDVVFAIDISRSMDIRDAQTGSQSRSRAVFQSRLERGISIAMESVTAVSGARFAATIGRGKGYLAVPLTYDSEAALLFLESLNVSSMTGRSTNLESLVDAAADAFQDSSPARKVIVLISDGESHAGVLRNAVNRCVRDGITLNTVAVGSDEGRQITTQANDPDSPSALSRRDSAAMRAAAERTGGIYIDAVREDSGAALSSQLLSLAQDMGSRSRKQEPKQRRPLFIILAIIAYGASKFVTRQSQKKPLRRLSVVSIIVLLFFTSCSEGKLLLLQANYLNILGRYDEAVAPYLKALSYEKAAPYAEYGLGLTFYQLDEGKAALNRYKDSHKLLEKYPTNEHRELRFRNHYNSGVIYFEEGDYRSAADSFKDALRTDPRRLDAKRNLELSLMSISMETNAESRTGNREESREVLFEFLKQHEQQKWKSKEWTPEENYSGPDY

SEQ ID NO: 69355 - DNA, 342 bp, Unknown
  Obtained from environmental sample
  misc_feature (1)..(342): n is a, c, g, or t
ttgaatggggcgaaaacaaagacttggataattaagaaatgccaatatccgtattttcggagctggatatggagagaagggagagataaatatgaacaaaagaaaaattattacactaacgccccaaaaggtatttctagtgcaataactgaaggtaaaatagtaactgattttttaccttctcctgaaaaattagttaggaaagagcctaaagtaaaaataacaataacattaaactccgggagtgttaatttttttaaaaaatatgcgcgaaaaaataatgtaaaatatcaaacaatgataaatgaagtactggataaatatgtccaaagatataaataa

SEQ ID NO: 69356 - protein, 113 aa, Unknown
  Obtained from environmental sample
  misc_feature (1)..(113): Xaa is any amino acid
MNGAKTKTWIIKKCQYPYFRSWIWREGRDKYEQKKNYYTNAPKGISSAITEGKIVTDFLPSPEKLVRKEPKVKITITLNSGSVNFFKKYARKNNVKYQTMINEVLDKYVQRYK

SEQ ID NO: 69357 - DNA, 555 bp, Unknown
  Obtained from environmental sample
  misc_feature (1)..(555): n is a, c, g, or t
gtgcgccacgttaccaactccttcttcggccagatgcttcaggagacggattgccccatctgccgcggcgacggtcaggtggtctccgacccgtgcgcggcgtgcggcggcagcgggttgcggcagtcggagacgaccgtatcggtagacataccggccggtgtggaggacggcaactacatccgcgtacccggcagaggcgacgccggcaggggaggcggggagtcgggcgaccttatcgtcgtcttgcacgagaagccgcacgagacattcacccgccacggcatacacctgagttgcaaactcaacatcaccttttcagaggcggcgctgggatgctcgaagaccataaaaacaatagacggcaaagaaaccctgaaaatcccaaacggcactcagtccgcaaaagttttcaagctgaagtcaaagggtctgccggagtaccgcagcaggaatagaggcgacctgctcgtggaggtgcacgtcaacacgccggagaagctggggcgcgaggagaaggagctgtttgagaagttggctaagcacggtatgtaa

SEQ ID NO: 69358 - protein, 184 aa, Unknown
  Obtained from environmental sample
  DOMAIN (59)...(180): DnaJ C terminal region
  misc_feature (1)..(184): Xaa is any amino acid
MRHVTNSFFGQMLQETDCPICRGDGQVVSDPCAACGGSGLRQSETTVSVDIPAGVEDGNYIRVPGRGDAGRGGGESGDLIVVLHEKPHETFTRHGIHLSCKLNITFSEAALGCSKTIKTIDGKETLKIPNGTQSAKVFKLKSKGLPEYRSRNRGDLLVEVHVNTPEKLGREEKELFEKLAKHGM

SEQ ID NO: 69359 - DNA, 2199 bp, Unknown
  Obtained from environmental sample
  misc_feature (1)..(2199): n is a, c, g, or t
ttgatttttaatataagaaaggcgcaagaaaatatggaacgcaatgacaatgcatccgagaccttcaaaatggctctgctcggatactcccgcaaggacttcgactacataacgcgcctagtcaacctgattgacctaggcagaccgcttaaactgttcgtgggcgacctatcgaaaatgcataatgtccaatgcgacattgccatcgcgattctagataatatctccaatctcagcgcctataacaaccatgtcacgcttgtcaagcaaaagagctccaacccgcctatcatttgcgcggcgcgcgaggcggatcggcagatactcgacagttaccgcatcggcgtgaaagcggatcacatcatcttcatgccgattcagctggagcgctttgccgcggttatccaccgcctcgcggcagacgccgacgctgacaaggaatccggcggcgacgacgcgtcgcagacgacgaacaggaacgtctcggcgctcgcgccgtcgtcgatccggttgggagagctcttcgtgaagagcggccttattacgaaagaagacttggacaaggccctggagcaccagaaaacgaccaaactgcacatcggcgacgcgctcatcgaccttggcataatcaccgaagatcaaaaactcaagtgccttgccgagcagctcaagaccaccgtggccgcgccgcggcagtacgccgccatcgacctcaacgtcgtggcgctaataccggagaatacggcgcggcgcttcaactgcatcgcgatagagaaacgcggcaacgaattaatcatagcgactacggacgtgctggacctcaatatgctcgatacgctgcgcgacacgaccgacatgcgcatcaccgcgatactcggtaaaaaagatgatatcgcgacctccttggatcgatgctaccgcgacatagcctcgcacaaagacgcctcccgcctcaccgagaacatggacgatcacgtggagtacgtcaagcgcaaggaaaaggaggccgacgacgaacaggaagcggtcgccgccggagcggaactcggcataataaaattagtaaacatactgattaccaacgcaatacgcgaccacgcgagcgacatacacatcgagccgatggaaaacgagttgctcgtacgctaccgcatagacggagacatgcgtaaggtgatgtcgccgcccaagaactcgcaccacgcaatcgtggcgcgcgtaaaaatcctctccgatctcgacatcgcggaacgccgcctgccgcaagacggacgcatggcgataaagatcggccaacgcgaagtcgatatccgcgtctccatactccccactatcttcggcgaaaaagcggtgctgcgtatactcgacaaagagtcgttcgaaaagaacaccgcaagcttgggcctcacccaatacgacgaacggatattccgttcgcagatcgcaaagccatacggcctcgtcatagtaacgggcccaaccggaagcggaaagtccacgacgctctacagcgccctgcaagccgtcaaaaacgtgaccaaaaatataattacggtggaggatccggtagaattccacatggagggaataaatcaggtcaacgtgaacacaaaaacaggcctgaccttcggaacagcgctgcgatcaatattgcggcaagacccggacatcgtcctgataggcgaaatccgcgacagcgaaacggcggacatcgcgataaaaatggcgctgacagggcaccttgtgctcacaacgctgcacacaaacgacgcggcaagcgccatagcccgcttcaccgacataggcatccctcccctgctgctcggttcgtcgctgaacttgatagtggcgcaacgattggtacggaaaatatgcccgaagtgtaaaatagagtacaaacccgcaccggaactgatacaaagcctaggactcgatccggaaaaggtcactcaattctacaaaggcaacggctgcgtcacctgcaacggcaccggcttcgcggggcgcacggcgatattcgaaatgctgcagattacaaaaaatatccgcaaactgatattgagaaacgcgtcgactatggagattcaggaagcggcggtggcggaaaatatgaagacgctgcggcaaacgggcatagaattggcggttaacggagagactaccatcgagcaggttttggcggcgactattgaaatttag

SEQ ID NO: 69360 - protein, 732 aa, Unknown
  Obtained from environmental sample
  DOMAIN (204)...(312): GSPII_E N-terminal domain
  misc_feature (1)..(732): Xaa is any amino acid
MIFNIRKAQENMERNDNASETFKMALLGYSRKDFDYITRLVNLIDLGRPLKLFVGDLSKMHNVQCDIAIAILDNISNLSAYNNHVTLVKQKSSNPPIICAAREADRQILDSYRIGVKADHIIFMPIQLERFAAVIHRLAADADADKESGGDDASQTTNRNVSALAPSSIRLGELFVKSGLITKEDLDKALEHQKTTKLHIGDALIDLGIITEDQKLKCLAEQLKTTVAAPRQYAAIDLNVVALIPENTARRFNCIAIEKRGNELIIATTDVLDLNMLDTLRDTTDMRITAILGKKDDIATSLDRCYRDIASHKDASRLTENMDDHVEYVKRKEKEADDEQEAVAAGAELGIIKLVNILITNAIRDHASDIHIEPMENELLVRYRIDGDMRKVMSPPKNSHHAIVARVKILSDLDIAERRLPQDGRMAIKIGQREVDIRVSILPTIFGEKAVLRILDKESFEKNTASLGLTQYDERIFRSQIAKPYGLVIVTGPTGSGKSTTLYSALQAVKNVTKNIITVEDPVEFHMEGINQVNVNTKTGLTFGTALRSILRQDPDIVLIGEIRDSETADIAIKMALTGHLVLTTLHTNDAASAIARFTDIGIPPLLLGSSLNLIVAQRLVRKICPKCKIEYKPAPELIQSLGLDPEKVTQFYKGNGCVTCNGTGFAGRTAIFEMLQITKNIRKLILRNASTMEIQEAAVAENMKTLRQTGIELAVNGETTIEQVLAATIEI

SEQ ID NO: 69361 - DNA, 357 bp, Unknown
  Obtained from environmental sample
  misc_feature (1)..(357): n is a, c, g, or t
gtgaccttttccggatcgagtcctaggctttgtatcagttccggtgcgggtttgtactctattttacacttcgggcatattttccgtaccaatcgttgcgccactatcaagttcagcgacgaaccgagcagcaggggagggatgcctatgtcggtgaagcgggctatggcgcttgccgcgtcgtttgtgtgcagcgttgtgagcacaaggtgccctgtcagcgccatttttatcgcgatgtccgccgtttcgctgtcgcggatttcgcctatcaggacgatgtccgggtcttgccgcaatattgatcgcagcgctgttccgaaggtcaggcctgtttttgtgttcacgttgacctga

SEQ ID NO: 69362 - protein, 118 aa, Unknown
  Obtained from environmental sample
  misc_feature (1)..(118): Xaa is any amino acid
MTFSGSSPRLCISSGAGLYSILHFGHIFRTNRCATIKFSDEPSSRGGMPMSVKRAMALAASFVCSVVSTRCPVSAIFIAMSAVSLSRISPIRTMSGSCRNIDRSAVPKVRPVFVFTLT

SEQ ID NO: 69363 - DNA, 1812 bp, Unknown
  Obtained from environmental sample
  misc_feature (1)..(1812): n is a, c, g, or t
atgagtgtcgcgttgggctcaacaaaagcgcctgtttacaccgaccttgccgaatgtcatgactgctacaagtgcattcgtaagtgtccggtaaagtccatcaaggtagaaaaggggcaggcgagcatcctgtttgaccgctgtatttactgcgggcgctgcgtgatgagctgccccgcccatgccaaacattaccggaacgacgttaaaaaagtaaagctgctgttggcagacgggcggaaagtagcggtttccctcgccccctcgtttgtttccgaatttaccgactggaaaccggaagaacttatagccgcgcttaaaaaacttggcttcttcgccgtgtcggaaaccgctctgggcgcggattttctttccgcccgcagtgcccgtgatttaatgtcgagcaacacaccgtctgccgctccggacaaaccctccctgatgatctcctcggcctgtccggtcattgtcgaatacataaagctctacaaaccaaatctcgtgccttttatttcacctcacgcctcgccgctcctcactcacgcgcggtttctccgttccagttacggcggggaatcccacggaaaagtcgcgattgtgttcatcgggccgtgcttcgccaagaaacacgaggccgacctgtacagcgctgagattgacgccgccattaccttcgaggaactgcgcgactggctaaacaatgaacacataacgccaaagacaatttctccttccgccatggcggactgcgcgtttgagccccgccggagcgcgaagggggcctttttccccattgaaagcggggaaataaccgctttttccgcctacatcaaggaagcggctgaagcggagaaggggccgtatatacacaccctctcggcctcgggctttcacgcggtaggggatatgctggacggatttgatcccgctacgatagaagcgccgctgtttctggaacttttggcctgtcccggcggctgcctcaacggtccaggaatgtccggtatgtcgccgggcgtttcccgtcatacgcgccttctggactatgtctgctccgccgacaataccctcgacggcgaagcgctctccctcacgccacagattgaagctggttatcctctggccccactaccggacgctgtacatacggaacaggaaatcaccgaagcgcttatgcgtgtgggaaaacacagccttgccgaccggcttaactgctcgagctgcggctacgatacctgccgggattttgccatcgccttgctggacggaagggcggaaaaaaccatgtgcgcctcgcatatgcgggagcttgccaataaaacagccaacggccttatcaaggcgattccttccggtgttgtcatcgtcgatagggatatgaaaatcatcgatagcaatgagcagtttgcccgtcttatgggaaacgaaactgaagaactgtttgccatgatgccggggctggaaggagcggatctcgctaaaatatcgcccttcccgcagtatttccaggcaataattgatccgtcagggccggagcttgcccagaccgacgtgcggaacggcagtaaaatctttcaccttactgtcttcgctgtggaaaaaggcgttgccgcggcgggagttgtggaagacattacagctcccagggtacggatcgaaactactgttgagagggcacgtgaactcatcaaaaagaatgtttctaccgttcaacanatagcgtttctcctgggagaaaacgcggcggaatccgaggccatcctcaattccattattgagtcttacactgtagaagaagaaaaaaatgcctga

SEQ ID NO: 69364 - protein, 603 aa, Unknown
  Obtained from environmental sample
  DOMAIN (399)...(433): Putative Fe-S cluster
  misc_feature (1)..(603): Xaa is any amino acid
MSVALGSTKAPVYTDLAECHDCYKCIRKCPVKSIKVEKGQASILFDRCIYCGRCVMSCPAHAKHYRNDVKKVKLLLADGRKVAVSLAPSFVSEFTDWKPEELIAALKKLGFFAVSETALGADFLSARSARDLMSSNTPSAAPDKPSLMISSACPVIVEYIKLYKPNLVPFISPHASPLLTHARFLRSSYGGESHGKVAIVFIGPCFAKKHEADLYSAEIDAAITFEELRDWLNNEHITPKTISPSAMADCAFEPRRSAKGAFFPIESGEITAFSAYIKEAAEAEKGPYIHTLSASGFHAVGDMLDGFDPATIEAPLFLELLACPGGCLNGPGMSGMSPGVSRHTRLLDYVCSADNTLDGEALSLTPQIEAGYPLAPLPDAVHTEQEITEALMRVGKHSLADRLNCSSCGYDTCRDFAIALLDGRAEKTMCASHMRELANKTANGLIKAIPSGVVIVDRDMKIIDSNEQFARLMGNETEELFAMMPGLEGADLAKISPFPQYFQAIIDPSGPELAQTDVRNGSKIFHLTVFAVEKGVAAAGVVEDITAPRVRIETTVERARELIKKNVSTVQXIAFLLGENAAESEAILNSIIESYTVEEEKNA

SEQ ID NO: 69365 - DNA, 759 bp, Unknown
  Obtained from environmental sample
  misc_feature (1)..(759): n is a, c, g, or t
atgagcggacacaaattggaaaacgtaatcgccgaaaggcccacgaaaactatctaccgcgacgggaataaggtcatcaaactcatgggcgagatgtaccccgcacccgacgtgctctccgaggcgcacaacctcgcctccgtcggcgagaccgccctcaaagttcccaaactcgtcgaagtgacgaaaatcaagggcaagtgggctatcgtctgggattacatcgacggcaccccgctcgaccagctcatgaagaagcacaaggcgaaggagaacgagtaccttgagcgcttcgtggacatccaactcgatatgcacagccatcacgcgacaaggcttccgctgcttatcgagaagatggagcgcaaaatcaaggcctccggcctcgacgcgacagcccgctacgaacttctgtcgaggctggcgggaatgcccaagcactccaaactctgccacggcgacttcaaccccagcaacatcgtcatcacggaaaaagacgaggcgtacataatagactggtcgcacgccgcccaaggcaacgcgtccgcggacgcggcgcagacctacctgctattctggctcgcgggcaacattgccctggcggataagtatctcgcgctgttctgcaaaaaaagcgacacggcaaaacagtacgtggaaaagtggctttccattgtggcggcctcgcagcttcccaaggcaaagccccaggaaaaagaatttttgatgcattgggccaatgtagtggaatacgtataa

SEQ ID NO: 69366 - protein, 252 aa, Unknown
  Obtained from environmental sample
  DOMAIN (5)...(218): Phosphotransferase enzyme family
  misc_feature (1)..(252): Xaa is any amino acid
MSGHKLENVIAERPTKTIYRDGNKVIKLMGEMYPAPDVLSEAHNLASVGETALKVPKLVEVTKIKGKWAIVWDYIDGTPLDQLMKKHKAKENEYLERFVDIQLDMHSHHATRLPLLIEKMERKIKASGLDATARYELLSRLAGMPKHSKLCHGDFNPSNIVITEKDEAYIIDWSHAAQGNASADAAQTYLLFWLAGNIALADKYLALFCKKSDTAKQYVEKWLSIVAASQLPKAKPQEKEFLMHWANVVEYV

SEQ ID NO: 69367 - DNA, 1878 bp, Unknown
  Obtained from environmental sample
  misc_feature (1)..(1878): n is a, c, g, or t
atgatatgcgcatccgaacagtcggtaatcgcactgcaaagcgtctacgataaggtcaaagccgagttcaaacgccgcggctgctacttcctgaacgcggaagagaccgaaaaggtgcgcaaggcgattatcgtcaaaggggcgctgaacgcgaagatcgttggtcagaaggccgcgaagatagcggaaatcgccggagtaaccgttccagaaaccacgaaaatcctcatcggcgaagtggagagcgtggaactctcggaagagttcgcgcacgaaaaactctcccccgttctcgccatgtacaaagcgaaagatttcaacgacgcggttgacaaggccgaccaactgataaaggacggcggctacgggcacacctcaagcgtgtacctcaacccgctgaccgcctccgacaaactcaacgctttcagttcgcgaatgaagacctgccgcatagtgctgaacacgccgtcggcgcacggcggcctcggcgatttgtacaacttccgtatgcgggcgtcgcttacgctcggctgcggcagctggggtggcaactccgtctcggaaaacgtgggcgtcaaacatttactgaatattaaaactctggcggcaaggagagaaaatatgctgtggttccgcactcccgaaaaagtatatatcaaacgcggctgtctccacacggccttagacgaacttaaggccgtgatgggaaagaagagggcgttcatagtcacggacacgttcctctaccagaacggctacaccaaaaccatcaccgacaaacttgacgaaatgggaatagtccacgagacgttctttgaagtcgcccccgacccgactctcggctgcgccaaaaagggcgcggaactgatgagcgctttcaagcccgacgtgattatcgcgataggcggcggttcggcgatggacgcgggcaaaatcatgtgggtgctctacgaacatccgcaggttgatttcgaggacatggctatgcgcttcgccgacatacgcaagcgcatctacaccttccccaagatgggagagaaagcctactttatcgccataccgacatccgccggaacgggcagcgaggttacgcctttcgccgtcatcaccgacgagaccaaagggatgaagtacccgctcgccgactacgaacttcttcccaagatggcgattgtggacgcggacgtgcagatgaacgcgcccaagggcctcacaagcgcttcaggtatcgacgctgtgacccactgcttagaggcctacgcctctatcatggcgacggactacaccgacggtctggcgatacagtcccttaaagtgattttcaagtggctgcccatcgcctacaacgagggcgcggcgaatccggaggcgcgcgagaagatggccaacgccgcgactatggcgggcatggctttcgcaaacgcgttcctcggcgtctgccactcgatggcgcacaaactcggagcgttccaccacctgccccacggcgtcgccaacgcgctgatgatcaacgaggtgcttcgctacaacgccgtcgaggttccgcctaagatggggactttctctcagtacgatcaccccaagaccctcgcccgctacgcggaagtcgcggacgccctcggtttgggcggcaaaaacgacgaggataagcttgagcacctgatcgccgcaatagacaagttgaaagatcagataggcatcaagaagaccatcaaagactacaacgtcgatgagaaggacttccttgcccgccttgacgagatgagcgaaaaagccttcgacgaccagtgcaccggagcgaatccccggtatccgctgatcgaggagataaaaaagatgttcctaaacgcgtactacggtaaaaaggagcgtgtataa

SEQ ID NO: 69368 - protein, 625 aa, Unknown
  Obtained from environmental sample
  DOMAIN (214)...(610): Iron-containing alcohol dehydrogenase
  misc_feature (1)..(625): Xaa is any amino acid
MICASEQSVIALQSVYDKVKAEFKRRGCYFLNAEETEKVRKAIIVKGALNAKIVGQKAAKIAEIAGVTVPETTKILIGEVESVELSEEFAHEKLSPVLAMYKAKDFNDAVDKADQLIKDGGYGHTSSVYLNPLTASDKLNAFSSRMKTCRIVLNTPSAHGGLGDLYNFRMRASLTLGCGSWGGNSVSENVGVKHLLNIKTLAARRENMLWFRTPEKVYIKRGCLHTALDELKAVMGKKRAFIVTDTFLYQNGYTKTITDKLDEMGIVHETFFEVAPDPTLGCAKKGAELMSAFKPDVIIAIGGGSAMDAGKIMWVLYEHPQVDFEDMAMRFADIRKRIYTFPKMGEKAYFIAIPTSAGTGSEVTPFAVITDETKGMKYPLADYELLPKMAIVDADVQMNAPKGLTSASGIDAVTHCLEAYASIMATDYTDGLAIQSLKVIFKWLPIAYNEGAANPEAREKMANAATMAGMAFANAFLGVCHSMAHKLGAFHHLPHGVANALMINEVLRYNAVEVPPKMGTFSQYDHPKTLARYAEVADALGLGGKNDEDKLEHLIAAIDKLKDQIGIKKTIKDYNVDEKDFLARLDEMSEKAFDDQCTGANPRYPLIEEIKKMFLNAYYGKKERV

SEQ ID NO: 69369 - DNA, 2448 bp, Unknown
  Obtained from environmental sample
  misc_feature (1)..(2448): n is a, c, g, or t
atggcggtagcggagacaggcatgggcatcgttgaggacaaggtgattaaaaatcactacgcttcggagtacatctacaacgcctacaaggacgaaaaaacctgcggcataatcgaggatgaccccgtctcaggtctcacccggatagccgaacctatcggccttgtggcggcggtcattcccaccaccaaccccacatccacggcgattttcaaggcgcttatttgcctgaaaacccgcaacgggattatcatctcgccgcacccccgcgccaaagccagcacatgcgccgccgctaaaatcgtactggacgcggcggtagaggccggagcgcccgagggaatcatcggctggatagacgagccgagccttgaaatgaccaatatggtgatgaaagaggcggacatcatccttgccaccggagggccgggcatggtcaagtcggcctattcctccggcaagcccgccatcggcgtgggttccggcaatgttcccgccataattgacgaaagcgcggacatactcctcgccgtcaactcaattatccactcaaaaacttttgacaacggcatgatatgcgcgtccgagcaatcggtaatcgccctgcaaagcgtctacgaaaaagtaaaaaccgaatttaaacgccggggctgttacttccttacgcctgaagaaaccgaaaaggtgcgcaatacgattattgttaatggggcgctgaacgcgaaaatcgttggacagaaggcggcgaaaatcgcggagcttgccggcgtgaaggttagcgaagcgacaaaaatcctgatcggcgaagtggagagcgtggagctttcggaagaattcgcccatgaaaagctttccccggtgctggcgatgtacaaggcgaaagattttgacgacgctctggacaaagccgaccatttgataagggacggcggttacggccacacggccagcgttttccttaacccgcataccggcgcggacaaactcgccgccttcagcgcgcgcatgaagacctgccgtattttgcttaactctccgtcagcgcatggcggcattggcgacctgtacaacttccgcctgcggccatcgcttacccttggctgcggcagttggggcggcaattcagtttcagataacgtcggcgttaaacacctgttaaatattaaaacactggcggcaaggagggaaaatatgctgtggttccgcgctcccgaaaaagtatatatcaagaggggatgcctccccgtggcattagacgagcttaaaaccgttatgggaaaaaaacgagcttacatcgtcaccgacacattcctgtacgaaaacggttacaccaaaacgataaccgaaaaactggacagcatgggcattgtccacgaaaccttttttgatgtcgcccccgatccgacattagcctgcgcgaaaaaaggcgcggcgcagatgagcgcgtttaagcccgatgtgattatcgccatcggcggcggctcggcaatggacgcgggcaaaatcatgtgggtgctctacgaacacccggatgcggattttgaggatatggcgatgcgcttcgccgacatccgcaaacgggtttataccttccccaaaatgggggagaaggcgtactttatcgccatacctacttccgccggaacaggcagcgaggttacgccctttgccgtcatcaccgacgagaccaaaggtatgaagtatccgctggcggattacgaacttttacccgacatggcgatagtggacgcggatgtgcagatgaacgcgcccaagggactcaccagcgcgtccggcattgacgcggtgacacacgcgctggaagcctacgcctcagtcatggcgaccgactacactgacggcctggcgatacaggcgctcaaggtgatctttgaatggctgcccgccgcctataacgaaggcgcggcaaacccaacagcgcgggaaaaaatggcgaacgccgccaccatagccggtatggcttttgccaacgcgttcctcggcgtgtgccactcaatggcgcacaaactcggcgcgttccaccacctgccccacggcatcgccaacgccctgatgatcagcgaagtgcttcgctacaacgcctgtgaagttccgccaaaaatgggctccttcccccaatatgatcatcccaaaaccttatcccgttacgcgcaaatcgcggacgcgttaaatctcggcggcaaaaccgatgaggaaaaacttgaaaaccttatcgccgccgtggaaaaactgaaagaacagatagggatcaaaaagacaatcagggattacggcattgatgaaaaagattttcttgcccgccttgacgacatgagcgaacaggcatttgacgatcaatgcaccggcgcgaatccccggtatcccttaattgaggaaatcaaaaagatgtacctcaatgttttttacggaaagaaggagagggtgtaa

SEQ ID NO: 69370 - protein, 815 aa, Unknown
  Obtained from environmental sample
  DOMAIN (10)...(391): Aldehyde dehydrogenase family
  misc_feature (1)..(815): Xaa is any amino acid
MAVAETGMGIVEDKVIKNHYASEYIYNAYKDEKTCGIIEDDPVSGLTRIAEPIGLVAAVIPTTNPTSTAIFKALICLKTRNGIIISPHPRAKASTCAAAKIVLDAAVEAGAPEGIIGWIDEPSLEMTNMVMKEADIILATGGPGMVKSAYSSGKPAIGVGSGNVPAIIDESADILLAVNSIIHSKTFDNGMICASEQSVIALQSVYEKVKTEFKRRGCYFLTPEETEKVRNTIIVNGALNAKIVGQKAAKIAELAGVKVSEATKILIGEVESVELSEEFAHEKLSPVLAMYKAKDFDDALDKADHLIRDGGYGHTASVFLNPHTGADKLAAFSARMKTCRILLNSPSAHGGIGDLYNFRLRPSLTLGCGSWGGNSVSDNVGVKHLLNIKTLAARRENMLWFRAPEKVYIKRGCLPVALDELKTVMGKKRAYIVTDTFLYENGYTKTITEKLDSMGIVHETFFDVAPDPTLACAKKGAAQMSAFKPDVIIAIGGGSAMDAGKIMWVLYEHPDADFEDMAMRFADIRKRVYTFPKMGEKAYFIAIPTSAGTGSEVTPFAVITDETKGMKYPLADYELLPDMAIVDADVQMNAPKGLTSASGIDAVTHALEAYASVMATDYTDGLAIQALKVIFEWLPAAYNEGAANPTAREKMANAATIAGMAFANAFLGVCHSMAHKLGAFHHLPHGIANALMISEVLRYNACEVPPKMGSFPQYDHPKTLSRYAQIADALNLGGKTDEEKLENLIAAVEKLKEQIGIKKTIRDYGIDEKDFLARLDDMSEQAFDDQCTGANPRYPLIEEIKKMYLNVFYGKKERV

SEQ ID NO: 69371 - DNA, 759 bp, Unknown
  Obtained from environmental sample
  misc_feature (1)..(759): n is a, c, g, or t
atgggtaactacaaactgaataaaatacttgtcgatcgaaaaacaaagaaaatttaccttgacggtgacaaggtgataaaactcatgggcgaggaataccccgcgcccgacgttctctccgaagcgcacaaccttgccgcggtgggagaaacagccctcaaggttccccgcctggtagaggtaacgaaaatagacggcaaatgggcagtagtgtgggaatatattgcgggaaccactcttgcccaacttatggaaaaaaacaaggacaaggaacagcagtaccttgaacgctttgttgacattcagcttgatatgcaccgccatagcgcgacaaggcttcccctgcttatagaaaagatggagcgcaagataaaagcctccagcctcgacgctaccgcccgttacgagattttgggaaggctggcaagcatgcccaaacacaccaaactctgccacggtgattttaaccccagtaatattgtcatcactgaaaaggacgaggcgtatatcattgattggtctcacgccactcagggcaacgcctcggcggacgcggcgcacacatacatgttgttctggcttacgggcaacgtcgcgttggcggaagattaccttttaatgttctgcaaaaagagcgacacggcaatacagtacgtggaaaagtggctgtccattgtggcggcttcacagcttcccaaagcaaaaccggaagacaaaggattattacttagttgggcgaatgtggtagagtacgtttga

SEQ ID NO: 69372 - protein, 252 aa, Unknown
  Obtained from environmental sample
  DOMAIN (60)...(186): RIO1 family
  misc_feature (1)..(252): Xaa is any amino acid
MGNYKLNKILVDRKTKKIYLDGDKVIKLMGEEYPAPDVLSEAHNLAAVGETALKVPRLVEVTKIDGKWAVVWEYIAGTTLAQLMEKNKDKEQQYLERFVDIQLDMHRHSATRLPLLIEKMERKIKASSLDATARYEILGRLASMPKHTKLCHGDFNPSNIVITEKDEAYIIDWSHATQGNASADAAHTYMLFWLTGNVALAEDYLLMFCKKSDTAIQYVEKWLSIVAASQLPKAKPEDKGLLLSWANVVEYV

SEQ ID NO: 69373 - DNA, 426 bp, Unknown
  Obtained from environmental sample
  misc_feature (1)..(426): n is a, c, g, or t
ttgataaagaccattcatcctgtattaaaagaaattgcctctatttttattaacaacgggaaacaggtgtaccttgtgggcggtgcggtgcgggatatgataagaggaaaagaaatacacgactgggatttggctacggacgctctgcccgaagaagtaatggattttgtcagacgggcgcacggcaaagttattcccaccggcattaaacacggaactgtcaccgtcctttacaaaaatctcagcgcggaaattacaacttttagaacggaatcaacctattcggacggacgaagacccgatcaaattcgctatgctgctgatattaaagaagacctttcaaggcgcgattttacgatgaacgctattgccatgcgcctgccagacggagaaatagttgatccgttcacggagccgctgatataa

SEQ ID NO: 69374 - protein, 141 aa, Unknown
  Obtained from environmental sample
  misc_feature (1)..(141): Xaa is any amino acid
MIKTIHPVLKEIASIFINNGKQVYLVGGAVRDMIRGKEIHDWDLATDALPEEVMDFVRRAHGKVIPTGIKHGTVTVLYKNLSAEITTFRTESTYSDGRRPDQIRYAADIKEDLSRRDFTMNAIAMRLPDGEIVDPFTEPLI

SEQ ID NO: 69375 - DNA, 942 bp, Unknown
  Obtained from environmental sample
  misc_feature (1)..(942): n is a, c, g, or t
gtgggaaacgcagacgaaagatttaacgaggacggcttgcgcccgttacgcgccgtccgcttcgccgctcagcttggctttgagattgaacaaactacccttgacgctattcacggcgcattatctatcagcgcaaaagtttcatgggagcgcgtgcgtgatgaaattgataaaatactcgcctcccccattccttcccaagcctttctgcttatggaaaaaacgggtcttttggaactttttataaaagaacttgccgtctgccgaggcgttgagcagaaaggctttcatagttttgacgtgctggatcattcccttcttgcctgcgattacgccgccgcaaaaaattattcgcaccaagtgcgcctagccgctctgttacatgacatcggcaaacccgatgtccgcaaattggacgaaagcggcgtttggacattctaccgtcatgaggaaatcggcgcagatatgtgcaacaagctcctcaagcggcttcgctattcaaacgaagttatcgaaaacgtatgccatttggtaaaagagcatatgtttcactacacggaagactggtcaaattccgccgtccgccgtttcatcgcccgtgtgggcgaaaccgctcttgaagacctctatcttctgcgccgcgcggacgcttttgcgttagccggaaaagagactgaaccgatgaacttgacggaattatccgacagagtaaaaaaagttctggcggaaaaacacgccttcacaataaaagaccttgctgtctccggaactgatttaatgacaatcggtattgagggcggaaaaacaatgggaataattttaaaagaacttttagaaacagtactggacgatcctgcgcagaatacgagagagaaattgttggagattgcggggaaaatttataaaaataaaattcatgataaatctcacaaagaacactaa

SEQ ID NO: 69376 - protein, 313 aa, Unknown
  Obtained from environmental sample
  DOMAIN (1)...(91): Poly A polymerase family
  misc_feature (1)..(313): Xaa is any amino acid
MGNADERFNEDGLRPLRAVRFAAQLGFEIEQTTLDAIHGALSISAKVSWERVRDEIDKILASPIPSQAFLLMEKTGLLELFIKELAVCRGVEQKGFHSFDVLDHSLLACDYAAAKNYSHQVRLAALLHDIGKPDVRKLDESGVWTFYRHEEIGADMCNKLLKRLRYSNEVIENVCHLVKEHMFHYTEDWSNSAVRRFIARVGETALEDLYLLRRADAFALAGKETEPMNLTELSDRVKKVLAEKHAFTIKDLAVSGTDLMTIGIEGGKTMGIILKELLETVLDDPAQNTREKLLEIAGKIYKNKIHDKSHKEH

SEQ ID NO: 69377 - DNA, 1128 bp, Unknown
  Obtained from environmental sample
  misc_feature (1)..(1128): n is a, c, g, or t
atgatatgctatttacgaggagaatttatgaaaaaacgtattttttattttgtttcaattttatttattgtaggattgattttttgcggatgtgtgagtaacgataaaagcggcgagaagacagcgcaggaagatgaaacgcctatcagtattgatttaccggaagggacaaaggagtttcatgtttatattgcttttgggcagtcgaatatgcagggaccggggcagattcgtccgcaggacaaagagggcgtaagcgatcgatttaaaattatgggcgtagtttcaagcaggtacgccggtgaatacagggaaaaaggcaaatggtacaaggctgttccgccgcttattattcccgataccaatttggttaactatttaggtttaaatatagggctgactcccattgattatttcggacgcacgattgtaaacaatatcccgaaagatattaccatcggcgttgtagccgtagcaaacggcgatatggctcttgcggcgtttcataaaacaaagggcgaggattattacagaggcaaaaacacattaagcggcagaccgagccaaacggaaatgcaaggcatgagcaggtacaaaggcgcgggttacgcgaatatgtacgacgccattattcaaaacgcaaaacttgcgaaaagagcgggcggagtaataaagggcataatcgttcatcagggcgaaagcggtcctgggcttgacaatatcgactgggacgaactttttaaggaaatctatgacgatatgcttgccgatcttaaacttgcgcctaactccattcccgttttgcttgggcaaacatggaacggcggttcgggaaacacaggcggcgctctttcaagcaacgctaaaatacaatctgttgtgcccaacgcatggataatcagttccgtcggctgtaccggcagaaccggacaagggcagcccgataacattcattttggttccgaagnngatgcactgctangcacacgctacggcgaaaaatgcttgagttggtttacgggaaaaagtgataggaagagttcacacaaagctcaagaggggaaaagcgattattgtccgaaagtaataagtgggttttactataagattacagacaaaaatctctga

SEQ ID NO: 69378 - protein, 375 aa, Unknown
  Obtained from environmental sample
  misc_feature (1)..(375): Xaa is any amino acid
MICYLRGEFMKKRIFYFVSILFIVGLIFCGCVSNDKSGEKTAQEDETPISIDLPEGTKEFHVYIAFGQSNMQGPGQIRPQDKEGVSDRFKIMGVVSSRYAGEYREKGKWYKAVPPLIIPDTNLVNYLGLNIGLTPIDYFGRTIVNNIPKDITIGVVAVANGDMALAAFHKTKGEDYYRGKNTLSGRPSQTEMQGMSRYKGAGYANMYDAIIQNAKLAKRAGGVIKGIIVHQGESGPGLDNIDWDELFKEIYDDMLADLKLAPNSIPVLLGQTWNGGSGNTGGALSSNAKIQSVVPNAWIISSVGCTGRTGQGQPDNIHFGSEXDALLXTRYGEKCLSWFTGKSDRKSSHKAQEGKSDYCPKVISGFYYKITDKNL

SEQ ID NO: 69379 - DNA, 765 bp, Unknown
  Obtained from environmental sample
  misc_feature (1)..(765): n is a, c, g, or t
atgaaaaacaatttgttttttatattattgttaatttttactatatcttttgttatttcttgttcatcaagcgacgccaatggcattgcgaaaagagctaaacaaccgtcaaatattgaaaaatcaaatgagcctgaaagtattcccggagtattattaagttttgatgattataatccggttacatgggaaaaacatttttatttatttgataaatacggcgcaaaagtaacattttttgttacaggaaaatccgttacaaaatttatgcttaacgcacaaaaacgcgggcatgagattggttatcataccattaatcatccgaatttatcaaaagtatcaaaaaccgtattttttacacaaactatttccagaaaaaacgcatttaaaagaggcggtattgaattaacttcatttgcttatccttatggaagttataatttatggatgaatagagaattattgaaacattacaaaatagtcagaggatttaatggatttaatatttattcaaaagacgaattaaaatcaggttttgtcaattcagcgtctatcgataattattattttgattctgataaatcatttaaacaaaatattgataaaatgataaaattggcaaaaaggaccggaatgattatttgctttacaacacatggaatatccgataaagtttgggggataacaccccaaagattagaatatgttttagaagaatgtaaaaaaaacggcttaaccttctatagatataaagattttcaataa

SEQ ID NO: 69380 - protein, 254 aa, Unknown
  Obtained from environmental sample
  SIGNAL (1)...(26)
  DOMAIN (44)...(163): Polysaccharide deacetylase
  misc_feature (1)..(254): Xaa is any amino acid
MKNNLFFILLLIFTISFVISCSSSDANGIAKRAKQPSNIEKSNEPESIPGVLLSFDDYNPVTWEKHFYLFDKYGAKVTFFVTGKSVTKFMLNAQKRGHEIGYHTINHPNLSKVSKTVFFTQTISRKNAFKRGGIELTSFAYPYGSYNLWMNRELLKHYKIVRGFNGFNIYSKDELKSGFVNSASIDNYYFDSDKSFKQNIDKMIKLAKRTGMIICFTTHGISDKVWGITPQRLEYVLEECKKNGLTFYRYKDFQ

SEQ ID NO: 69381 - DNA, 1014 bp, Unknown
  Obtained from environmental sample
  misc_feature (1)..(1014): n is a, c, g, or t
atgcccgtaaaaacgaccgtcaaaacgaccgtcaaaaagaagcgtcccgcgaccgccgccaaagccgccgcgaaaaccaccgtcaagaagcccgcagagcgcgagttggtctcgtttgacttcgccgtcaaatacctattgcgcggcaagcgcgactacgttgtcctcaacggctttctctccgaacttctcggcaaaaaggtcgaagtcaagtctctcgacaatatagaaaacattaaggacgacaaggacgataagaccaaccgcgtagacctgaaagcacagataaacggcggcgagatcgtcgtatttgaaattcagtttttgcaagaatgggatttcttcggcaaagcgcttttcggcgtatgtagcgccataaaggatcaggttgaggcgggcgatgtgtacaacatcaagaaagtctattcggtaaacatcgcgtactttaatttaaaagccaaaaaggagtatctgttttccggcaagttaaacggctttcaaggcgtccactacaaggacgaagtgatccctttcgctcaatcccgttcccaaaagtcaaaaaaacagtttgagattcatcctgagtattacctgattttaccgagaatgttcgacgaaaaactgcgcggacgtttcgacgaatgggtctacatcctgaaaaactcgaaagcccgcgccgactttaaggccgccggaatcaaagaggccaagaccaagttagactacctgcgcatgacgcccgaaaagaaaaaagagtacgcaagatttttagaacaccgccgaagcgctagaagcgcgttagaaacggcggtaggccaaggcgaacttagaggcgagcgcagaggcttacggaaaggtctacaacaaggcatacagaaaggcatacagaaaggttgggatgaagcaagtaccaaacacgccaaaagtatgtacaaaacaggctttacagtcaaacagatcgcaaaaggcctcgaactttcagaaaccgccgtcaagcagattttaggcttgtag

SEQ ID NO: 69382 - protein, 337 aa, Unknown
  Obtained from environmental sample
  misc_feature (1)..(337): Xaa is any amino acid
MPVKTTVKTTVKKKRPATAAKAAAKTTVKKPAERELVSFDFAVKYLLRGKRDYVVLNGFLSELLGKKVEVKSLDNIENIKDDKDDKTNRVDLKAQINGGEIVVFEIQFLQEWDFFGKALFGVCSAIKDQVEAGDVYNIKKVYSVNIAYFNLKAKKEYLFSGKLNGFQGVHYKDEVIPFAQSRSQKSKKQFEIHPEYYLILPRMFDEKLRGRFDEWVYILKNSKARADFKAAGIKEAKTKLDYLRMTPEKKKEYARFLEHRRSARSALETAVGQGELRGERRGLRKGLQQGIQKGIQKGWDEASTKHAKSMYKTGFTVKQIAKGLELSETAVKQILGL

SEQ ID NO: 69383 - DNA, 1020 bp, Unknown
  Obtained from environmental sample
  misc_feature (1)..(1020): n is a, c, g, or t
gtgaggggtaaagtccgttcgccctatttcacgcttaactccagccacgccttcggtacagacttcagggtgaaaagccaccagttctcggcgtcggtgaacgccggtatgagctcaaggtacatcccgccggtcgaggagacggacgccgacgattctttggagttcgactggtcttacggcggggtattgggctggcgttggtcgaacaacgcgacgggcgccgggacgcaagcatattcggccaacgtaaggtttgtgaacgaccaaaatcccacggcttccgcgacgttgcgccacacctacaaccgcgcccggctgagcgccaactacgacctcacgttcaacgactacacggactacgacaggcagaaccatgctctgagggcacagctgaccggctcgctcatgttcgccgacggactatgggcgctgggtcagcagatgagcagcagcggcggcttcgccctggttgacactcggggcgacctgaagagcgctaaggtgcatatcaaccgctcgcgggtgacgggcaatgaactcagccatagcggatggatgggcgccgcctaccacaaccgcctcatggcctacagcccgaccgaactcacgctaagcctgaccgacgtcccggtgggcgcgttcatggatcagagcagatactacgtaatgggcagttacaagcaaggcttcgcgctgaaggtcggcaagaagtcgcaggtcatagccatagtgcccttcgtggaaaagcacggcggcaggccgctgggccacacatacctgactatagagatggaactcgaaaacgcgggagagacggacgaagacgattcccgcgccccgcgagccgccttcaccagcggcgacggaatcctgcaaataggcggactgacgcccggatatacctacagagtgaaattcagggcctcctcgcgcctgaaggacgtgctgatagaaatcccggcgggagcttacggaatgtacgagcatccggaggtggaggtagaacgggaggagtga

SEQ ID NO: 69384 - protein, 339 aa, Unknown
  Obtained from environmental sample
  misc_feature (1)..(339): Xaa is any amino acid
MRGKVRSPYFTLNSSHAFGTDFRVKSHQFSASVNAGMSSRYIPPVEETDADDSLEFDWSYGGVLGWRWSNNATGAGTQAYSANVRFVNDQNPTASATLRHTYNRARLSANYDLTFNDYTDYDRQNHALRAQLTGSLMFADGLWALGQQMSSSGGFALVDTRGDLKSAKVHINRSRVTGNELSHSGWMGAAYHNRLMAYSPTELTLSLTDVPVGAFMDQSRYYVMGSYKQGFALKVGKKSQVIAIVPFVEKHGGRPLGHTYLTIEMELENAGETDEDDSRAPRAAFTSGDGILQIGGLTPGYTYRVKFRASSRLKDVLIEIPAGAYGMYEHPEVEVEREE

SEQ ID NO: 69385 - DNA, 1356 bp, Unknown
  Obtained from environmental sample
  misc_feature (1)..(1356): n is a, c, g, or t
atggcgagagggttagttacaaaagctcaaattatttctgcttattattgtctcccttgtattgggtttaccatttccgtcgccgaacctgacttacaagtgttgggaaggcagaccccttccgttccggcgcttacattgataattaccgtatccataggagtcggggtttttttaatgctttccgtactccgtcccctcttaaaaatacggctttcggttatactcatctttttttacctgataacatttattgtggcgtatttcgcgcccgatacttttgtccccgtgggctttgactcgggcggcgttaccacgggccccatgacggtgccttttattttggcgatgggcgcaggtattgccgctctgcgcagcgataaaagctcgcaggaagacagcttcggccttgtagcaatgtgcagtatagggcctattctggcggtgcttcttctgggtattttttacaaaccggagcatgccgaagtggcagcttccgaaattcataacgccgcgacctcgcgggatgtattcagatactttgccgttgaactgcccatctttcttaaagaggtatttatttctctaagcgccattgtgctttgctttattattttccaattattaacaaggcgttttaagaaatatcagattgggcgtattaccgtaggtttttcctacacttttgtaggccttgtaatttttttaacgggagttaacgtaggattttttccggtaggacagcttttgggatcacagcttgcctcatcgcctttcaaatgggtattaattccgcttggagcgatcataggttactttatcgtaaaagcggaacccgcggttcatgttcttaacaaacaggttgaggaaatttcctccggcgcgattacgataaagatgatgaaccgcgggctttccataggcatgtccctggctcttaccatgaccatgatccgcattcttttcggaattccgataatgtacattttaattcccggctatgtcttcgctttggcgctgacttttttcgtgccgcccatttttacgggtatcgcgtttgattcaggcggcgtttgttctggtcccatgacttcaacattccttctgcctttcgcgatgggaacctgctccggcgtagacggaaatcttatgattgacgctttcggcattgtcgccattgtcgccatgacgcccctcatcgttatccagttaatgggtcttgtttaccagttcaggacaaaatacgcagccactcttaccatacagcagactgaagctatcagcgcccaggccatcgccgcgggcggcgaaggcatcaactggggaaaaatttatgtgtacggagaggattcatag

SEQ ID NO: 69386 - protein, 451 aa, Unknown
  Obtained from environmental sample
  DOMAIN (1)...(157): Protein of unknown function (DUF1538)
  misc_feature (1)..(451): Xaa is any amino acid
MARGLVTKAQIISAYYCLPCIGFTISVAEPDLQVLGRQTPSVPALTLIITVSIGVGVFLMLSVLRPLLKIRLSVILIFFYLITFIVAYFAPDTFVPVGFDSGGVTTGPMTVPFILAMGAGIAALRSDKSSQEDSFGLVAMCSIGPILAVLLLGIFYKPEHAEVAASEIHNAATSRDVFRYFAVELPIFLKEVFISLSAIVLCFIIFQLLTRRFKKYQIGRITVGFSYTFVGLVIFLTGVNVGFFPVGQLLGSQLASSPFKWVLIPLGAIIGYFIVKAEPAVHVLNKQVEEISSGAITIKMMNRGLSIGMSLALTMTMIRILFGIPIMYILIPGYVFALALTFFVPPIFTGIAFDSGGVCSGPMTSTFLLPFAMGTCSGVDGNLMIDAFGIVAIVAMTPLIVIQLMGLVYQFRTKYAATLTIQQTEAISAQAIAAGGEGINWGKIYVYGEDS

SEQ ID NO: 69387 - DNA, 795 bp, Unknown
  Obtained from environmental sample
  misc_feature (1)..(795): n is a, c, g, or t
atggtagacaaatccgttttttcaaaaatcttctctaaactgccttcgaaattaaaaggaatacagcagggaaaaaagactgaaaaaccccgtcaaaaacaaacgccgaaattaaaactggttatttttattgtagactggagccgcgcgcatactataaccaatgtttgcgaaaatgaaaaagtacgttttcattttaccagcgtgggaaggggcaccgccagttcggaaatactcgaccttctgggcataggctcgggtgaaaaggcggtaattctctgccttgaacaggagataggcgtccatgttttaatgcgggaagtaaggaaggaacttaaggtttacgggccgggagcggggattgcgtttaccgttccgctttcagcaattaacgatccaatactattggtattcaagaaaagtatattgaaaagcgagaaaattcaggaaaaaaatcccggcaaaggagcaaatatggcaaataaattctcacacgatttaatcgtttctattgttaatcacggttacaccgacgaattaatgaactcggcaaggaacgcgggggcaagaggcggcacggtactgcacgcacgcggcacggcgcacgaggggcctgtaaaatttttcggcatttccgtacaagatgaaaaagaggtaattttgattctgtccgagaacgacaagaaagttccgataatgcaggcaataagcgagaattacggccttaacaccaaagcccaggggttaattttttctttgccggttgacagtgtaataggtttaagcgccgaataa

SEQ ID NO: 69388 - protein, 264 aa, Unknown
  Obtained from environmental sample
  misc_feature (1)..(264): Xaa is any amino acid
MVDKSVFSKIFSKLPSKLKGIQQGKKTEKPRQKQTPKLKLVIFIVDWSRAHTITNVCENEKVRFHFTSVGRGTASSEILDLLGIGSGEKAVILCLEQEIGVHVLMREVRKELKVYGPGAGIAFTVPLSAINDPILLVFKKSILKSEKIQEKNPGKGANMANKFSHDLIVSIVNHGYTDELMNSARNAGARGGTVLHARGTAHEGPVKFFGISVQDEKEVILILSENDKKVPIMQAISENYGLNTKAQGLIFSLPVDSVIGLSAE

SEQ ID NO: 69389 - DNA, 1137 bp, Unknown
  Obtained from environmental sample
  misc_feature (1)..(1137): n is a, c, g, or t
gtgtatgattttttccaggccggggaaataaacgaaagaattgaatcctatattttaatcccgcttgtaaacgctgacgatgaatttgcgaccgtgcatataggcacttccgtaaaggaatatttttccccgcttattcttgaaaaccttaatgttttcctgtccgcggcttcccctattgtcgcgaacgctttgcgccttaagcagatggaagccctgcaaaagaaaacaaaggccgctttcgcgcgttatgtaccgatagacgtaatggacgaaattatcaaaaaatcttcgtcgccttcaagccagagcgaaagcagggtgatttcaattttgttttctgatatcagaaattttacaaaaatctcggagaacactcaggcaagggaattggtggatttccttaacgcgtatttttccattatgggaaatgaaattatcgcggaaggcggcaacatcgacaaatttatcggcgacgcgattatggcaatcttcggcgctcccaagactctggagaactccgcggccagcgccatcagggcggcgctgaggatggcgaaagcgcttgccaaagtggacacctcaagcattacactgccggaagccggtttcggcgccggtataggcataaattgcggcgagtgcgttgtcggcaatataggctttcagaataaaatggactacacggttataggcgattctgttaatcttgcttcgcggcttgagggcgttaccaaatattatcatcagtacataatcgtgtccgaatacgcgtacaacgccgccaaggacgattttattttccggaagaccgacagcgtgcgcgtgaagggaaaagatcagccagtgggattatacacagtatacgcggcttaccgcggagaagaggacgagcagaccccggcgtccattgttataggaagggaagcgctggatcagtacaacaaggggcttaagctttacgccatgcgtgaatttgaaacggcaaagcagtattttaacagcactttgtctcttgagaaaaaagccgggatggatgattacctcgcgtcaatgtacctttccagaattgaggaattccagattaatccgcctccgcccgattgggatgccaccataaccatgactgaaaaataa

SEQ ID NO: 69390 - protein, 378 aa, Unknown
  Obtained from environmental sample
  DOMAIN (101)...(290): Adenylate and Guanylate cyclase catalytic domain
  misc_feature (1)..(378): Xaa is any amino acid
MYDFFQAGEINERIESYILIPLVNADDEFATVHIGTSVKEYFSPLILENLNVFLSAASPIVANALRLKQMEALQKKTKAAFARYVPIDVMDEIIKKSSSPSSQSESRVISILFSDIRNFTKISENTQARELVDFLNAYFSIMGNEIIAEGGNIDKFIGDAIMAIFGAPKTLENSAASAIRAALRMAKALAKVDTSSITLPEAGFGAGIGINCGECVVGNIGFQNKMDYTVIGDSVNLASRLEGVTKYYHQYIIVSEYAYNAAKDDFIFRKTDSVRVKGKDQPVGLYTVYAAYRGEEDEQTPASIVIGREALDQYNKGLKLYAMREFETAKQYFNSTLSLEKKAGMDDYLASMYLSRIEEFQINPPPPDWDATITMTEK

SEQ ID NO: 69391 - DNA, 1737 bp, Unknown
  Obtained from environmental sample
  misc_feature (1)..(1737): n is a, c, g, or t
ttgatattatcttcggtttctttttttaaaacttccgccctgccgaaattggcgtttgtctttacaagttcccgcgcgtccaaaaatgaggatttaatgccattagctgtaaaaatagacgctaacaggtttgcgcttaatctttccccgaaactcataaccaaatctttactgcgcaaagataattcgcccaacagagttattccgtcaagggtttgcgcaagcagagttatgttttcttctattactttaaccgcgtttttaagttccgccgcttttaaaaaatgctcggcgcagtctttatggcgcttgcttagttcttctatctgttttttgtatgattcaccgcgaaccgccgtagacgccaatccaataagggtatcggtcacacctgaaaacgcggaaacaattacagcgcttacatttgcgctgtattctttgtcttttaggatcccgataatccgctcaatcccttttgcgcttccaacggacgagcctccaaatttcaacactaacataatattactcccattgaatattactaattttttatatatttttacagtagtaaatgataaaaacatggtaaaagttgaatccggtaaaaaaagagtttatcttgattgggcggcgtccgccccttattcaaaaaccgacaattccgtcccctttggaaacccgtcgtctcatcacagcgaaggacgcctcgcaaaacaggctcttgaagacgcaagacagcgctgcgcggcggttttgaacgtaccgcctgaaactctgtactttacgtctggcggaaccgaatccaacagtatcgcgcttttttccaatttgacgcgtccgggaaaaggaagggttatttcgtctctcgcagaacacgcctctgtaagagaaggaatggaaactctggaaaaaatgggaaaacccacaggaagcgttacggttgattccgcgggaatggtaacgcctgaattttttacaaaagcgcttgataaatacggcgatgtgcgttttgcggcgattatgtcggtaaataacgaaacgggggcagtaacagatattgcttctttaaaggacgttatcaaaaaaaggaaagaaacagcgcctatacattttcactgcgatcttgttcaggcaatcgggaaaataccaattgatatttcaaattgtgaaatagattccgtttccataagcgcccataaaatttcaggaccgcgaggcattggacttttgtatctgcgaaaacctttggaagcgttttacacgggcggcggtcaggaaaaagggataaggggcggaaccgagaacacacagggagcggtagaactcgcgaactgtcttgctcaatacgcggacgcaaagacagtgcggcttgagtatgaacgcgcaaaatcccgctggaaaaaacttataacctctcttgcggcaatggaacgctgtacgctcattccctcctgccgcgtccctgaagacggcagattttctccatacattttacaagccgcgtttaaagacattcccggtgaagttatggctcgcgctcttgacgacatcggtttcgccgtttccacaggctcggcttgttcatcatcgtcccccgaacgtcccgtccttacagcaatgggcgttgatgaaaaattgagagtcgaaggtatacgcgtttctcaaggcttctctactacagacgaagaaatcgaactctttttagaagcggtcgcggaggtgttaaaatttctgtaa

SEQ ID NO: 69392 - protein, 578 aa, Unknown
  Obtained from environmental sample
  SIGNAL (1)...(28)
  DOMAIN (235)...(462): Beta-eliminating lyase
  misc_feature (1)..(578): Xaa is any amino acid
MILSSVSFFKTSALPKLAFVFTSSRASKNEDLMPLAVKIDANRFALNLSPKLITKSLLRKDNSPNRVIPSRVCASRVMFSSITLTAFLSSAAFKKCSAQSLWRLLSSSICFLYDSPRTAVDANPIRVSVTPENAETITALTFALYSLSFRIPIIRSIPFALPTDEPPNFNTNIILLPLNITNFLYIFTVVNDKNMVKVESGKKRVYLDWAASAPYSKTDNSVPFGNPSSHHSEGRLAKQALEDARQRCAAVLNVPPETLYFTSGGTESNSIALFSNLTRPGKGRVISSLAEHASVREGMETLEKMGKPTGSVTVDSAGMVTPEFFTKALDKYGDVRFAAIMSVNNETGAVTDIASLKDVIKKRKETAPIHFHCDLVQAIGKIPIDISNCEIDSVSISAHKISGPRGIGLLYLRKPLEAFYTGGGQEKGIRGGTENTQGAVELANCLAQYADAKTVRLEYERAKSRWKKLITSLAAMERCTLIPSCRVPEDGRFSPYILQAAFKDIPGEVMARALDDIGFAVSTGSACSSSSPERPVLTAMGVDEKLRVEGIRVSQGFSTTDEEIELFLEAVAEVLKFL

SEQ ID NO: 69393 - DNA, 1008 bp, Unknown
  Obtained from environmental sample
  misc_feature (1)..(1008): n is a, c, g, or t
atgaaagctcccgaagaaaaaacacaggaaatagaaaacgtactttcccatttaattggaatttcaggctgggcgaaaattacctactgcgaaaaagctcccgccgccgttcttgccgcctgcgttgaggaagggaaaaaactttgcgagaaaggcgtaaaaacttttaagattgacgcccgaagaacggacaaaagtttccccctcacttcctacgagctatgctgtaacgcgggtgaagcggttacaaacgcattcaacgaattgaaagttgatattcacaaccccgacgacgtaataaaaattgaaatccgcgaaagagcgttagtttactccggcggcaaaaggggattcggcggtctgcctgtgggaaccgcaggaaggggaatgttgttattatccggcggcattgattcccctgtcgccggatttatgatggcgtcgcgcggaatgactatagacgcgattcattttcactcctatccttacacttctttggaagcgaaacaaaaagttatccaactcgcggaaagaacaggtaagtattgcatgggaataaatctgtacattataaattttaccaaggcgcaaatgagaattaaagaacgcgctcccgctccatggactaccgtcctgttacgaatggcaatgatggaagcagcggaaaaagccgcgcaaaaaataaagtgcaaatgcctgattacgggcgagagcctatcgcaagttgcaagccagacgatagaaaacatgacatgcacacaaagcaggataaaacttcccgtcattcgcccgctgattggttttaataaagaagacattataaaaaaagcaagacaaataggcacttacgatatttcgatacaaccgtatcaggactgttgtacgcttttcagtccccagcaccctgtgttgcacggcgatgttttagaggcgaatgagttgtatgagaaactggaaattgagccgctaattgacgaggcgcttgaagggtatgaattggttaagtaa

SEQ ID NO: 69394 - protein, 335 aa, Unknown
  Obtained from environmental sample
  DOMAIN (128)...(281): ExsB
  misc_feature (1)..(335): Xaa is any amino acid
MKAPEEKTQEIENVLSHLIGISGWAKITYCEKAPAAVLAACVEEGKKLCEKGVKTFKIDARRTDKSFPLTSYELCCNAGEAVTNAFNELKVDIHNPDDVIKIEIRERALVYSGGKRGFGGLPVGTAGRGMLLLSGGIDSPVAGFMMASRGMTIDAIHFHSYPYTSLEAKQKVIQLAERTGKYCMGINLYIINFTKAQMRIKERAPAPWTTVLLRMAMMEAAEKAAQKIKCKCLITGESLSQVASQTIENMTCTQSRIKLPVIRPLIGFNKEDIIKKARQIGTYDISIQPYQDCCTLFSPQHPVLHGDVLEANELYEKLEIEPLIDEALEGYELVK

SEQ ID NO: 69395 - DNA, 1272 bp, Unknown
  Obtained from environmental sample
  misc_feature (1)..(1272): n is a, c, g, or t
atgaaatacttcaatcctgcgaatttagccattattgcctgtcccggcggggatatatttgcaaatgaagtaatccagcaccttcgccatagataccgtttaagccgcaaacaaacagtagaagagctttcaaaacgttacaatatagacgccgagaagattggtcttcaaatagacctgataaacaagattgtcacgcgtggaacattatcccaaagcggttctgaaaaaaataacggacctgtaaaggttcccgttaaatttacattatttccaaacggagaaataaaatccgaaattcaggagtctatccggggaaaagacgtttatattttccaggatgttgaaaatcattatcctgtaaatttcgcgggcgaaattgtaaataatttaaccacaaacgatcaccttatgacaatttttgttacggttgacgcggcgcggcaggcgggagcggagcggattactcttgtaattccgaattatccttattcgcgccagcacaaggcaaagggaagggaagggcttaccgcgagcagaataggaaaaatatttgaaagccttggagtagacaatattattactcttgatattcactcaagagatataatgaacgtgtttaaccatatacgccttgaaaaccttcacgccagttatcaaattattcaaacgttaatcaacatggacgatattttaaacgatgactttgtagtagtttctcccgataccggcgctgttgacagaaataaattctacgcttccgcgcttaaaaaacctctggctcttttgtacaaagaaagggattattcaaaaatatcaaaggacgcctcccaatcaaatatttcacaaatacgcctgctgggtaatgtaagagataaaaccgtcttcatggcggatgacattttaggcacgggcggcacgctgataaagggtatgaggcatcttaaagaaaacggcgcgcgcagaattatctgctccatcagtctgcctcttttctccggtaattcaatttcacactttgacgaagcgtacagcgaaggacttttttaccggcttatcggaacaaacgccgtctatcaggaagaagttgtaaagcgcgaatggtatgtaaatgtaaatatcacgcgtctgtttgccgacgttatttcgcgccttcatcaaaatcagtctgtttcaagcctgcttgataattccgcaattattaaccgtctgctttccaaaaagaaaatagaaccccaaaacgaacttccttttacacaaacaaacgaataa

SEQ ID NO: 69396 - protein, 423 aa, Unknown
  Obtained from environmental sample
  DOMAIN (209)...(343): Phosphoribosyl transferase domain
  misc_feature (1)..(423): Xaa is any amino acid
MKYFNPANLAIIACPGGDIFANEVIQHLRHRYRLSRKQTVEELSKRYNIDAEKIGLQIDLINKIVTRGTLSQSGSEKNNGPVKVPVKFTLFPNGEIKSEIQESIRGKDVYIFQDVENHYPVNFAGEIVNNLTTNDHLMTIFVTVDAARQAGAERITLVIPNYPYSRQHKAKGREGLTASRIGKIFESLGVDNIITLDIHSRDIMNVFNHIRLENLHASYQIIQTLINMDDILNDDFVVVSPDTGAVDRNKFYASALKKPLALLYKERDYSKISKDASQSNISQIRLLGNVRDKTVFMADDILGTGGTLIKGMRHLKENGARRIICSISLPLFSGNSISHFDEAYSEGLFYRLIGTNAVYQEEVVKREWYVNVNITRLFADVISRLHQNQSVSSLLDNSAIINRLLSKKKIEPQNELPFTQTNE

SEQ ID NO: 69397 - DNA, 1482 bp, Unknown
  Obtained from environmental sample
  misc_feature (1)..(1482): n is a, c, g, or t
atgggaaagtacattctttcgctggatcaggggactacaagttctcgcgcgattctttttgatcatgagcagaatattgttgcggtaaagcagaaagagtttacccaaatttatccgcatgaaggctgggtggagcatgatccaatggaaatattttccacccaacacgcggtaatgacgaatattatttccaaggcgaatataaaagcaagcgatatagccgctatcggcataacaaaccagcgtgagacgacgattctttgggataaaaatacgggcaagcccgtttacaacgctatagtgtggcaatgcagaagaacatccgcaattgtcgacgctcttgcaagagacggacttggcgatcatattaaaaaaactacggggcttatccacgacgcttatttttcagggactaaaattaaatggatacttgataacgtggaaggcgcgcgggagagggcgaaaaaaggcgagatacttttcggcactgttgatacatggcttatctggaaattatcgggcggtaaagcccatgttacggattacaccaacgcaagcagaacgatgatcttcgatattcataaacttgattgggacgatacgcttcttaaagccttggatattccgcgcgcaatactcccgcaggtaaagccgtcaggcgcaatgttcgcgtccgcaaacataaacggcgttgaaataccgatttcaggtaacgcgggagatcaacaggcggcgttgttcgggcaatgctgttttgaaaaaggcgacacaaaatgcacttacggcacaggctgtttcctgcttatgaacacaggtacagacgccgccgtgagcgcaaacggtcttttaactacaatcgccgcggggttaagcgaaaaagttcaatacgcgcttgagggttcagtctttacgggcggcgcggttattcaatggttacgggacgaattgcgtattattaccgacagcgcggacagcgaatattatgcggagaaagtaaagaatacaggcggcgtctatcttgttccggcgtttacgggacttggcgcgccgtattgggatatgtacgcgcggggctgtataatcggaattacgcgcggaacaaaaagagcgcacattatcagggcggcgcaggaatccatcgcgtatcaagtaatggatcttttaaacgccatggaaaacgatcttggagtaaaactaaaagagttaaaagttgacggcggcgcgagcagggacaaattccttatgcagtttcaggcggatatgtgccgcgcgaggattatacgccctattgtccgcgaaacaacggctctaggcgcggcgtgccttgccggaattaccgttggtttttggaaagacttgaacgaaatcaaaaaatgctggcgggaggacactgttttttcgcctgaaatggacaatgaaaaacgcgataaattaatagccggctggcataaagcggtggaaagaagccgcggctgggcttga

SEQ ID NO: 69398 - protein, 493 aa, Unknown
  Obtained from environmental sample
  DOMAIN (251)...(477): FGGY family of carbohydrate kinases, C-terminal domain
  misc_feature (1)..(493): Xaa is any amino acid
MGKYILSLDQGTTSSRAILFDHEQNIVAVKQKEFTQIYPHEGWVEHDPMEIFSTQHAVMTNIISKANIKASDIAAIGITNQRETTILWDKNTGKPVYNAIVWQCRRTSAIVDALARDGLGDHIKKTTGLIHDAYFSGTKIKWILDNVEGARERAKKGEILFGTVDTWLIWKLSGGKAHVTDYTNASRTMIFDIHKLDWDDTLLKALDIPRAILPQVKPSGAMFASANINGVEIPISGNAGDQQAALFGQCCFEKGDTKCTYGTGCFLLMNTGTDAAVSANGLLTTIAAGLSEKVQYALEGSVFTGGAVIQWLRDELRIITDSADSEYYAEKVKNTGGVYLVPAFTGLGAPYWDMYARGCIIGITRGTKRAHIIRAAQESIAYQVMDLLNAMENDLGVKLKELKVDGGASRDKFLMQFQADMCRARIIRPIVRETTALGAACLAGITVGFWKDLNEIKKCWREDTVFSPEMDNEKRDKLIAGWHKAVERSRGWA

SEQ ID NO: 69399 - DNA, 432 bp, Unknown
  Obtained from environmental sample
  misc_feature (1)..(432): n is a, c, g, or t
atggattacacggtaatcggagacgcggtaaatttagcgtcgcgcatggaaggacttacaaagacatatcactcggaaatattgatttctgaaagtctttttgatgaactgcgccaaaccgcgccgaatgccggtttggcttacagacttctggacactgtggcggtaaagggcaaaacaaaaggggtaagaatttttactgtaaaaaagtcccttacgccggcggaacagaaagcgtggcccctgcataatcagggaatgaaactttattacgcgcgttcctttgccgaagccgcgcaaaaattcaaggaagcgcttgcgatattacccgatgattttaacgctgacaatctgtataaaagatgcgtggaatacgcttccgcgccgccgccagcggactggaacggcgtggaagtaatgaagaccaaataa

SEQ ID NO: 69400 - protein, 143 aa, Unknown
  Obtained from environmental sample
  DOMAIN (79)...(112): Tetratricopeptide repeat
  misc_feature (1)..(143): Xaa is any amino acid
MDYTVIGDAVNLASRMEGLTKTYHSEILISESLFDELRQTAPNAGLAYRLLDTVAVKGKTKGVRIFTVKKSLTPAEQKAWPLHNQGMKLYYARSFAEAAQKFKEALAILPDDFNADNLYKRCVEYASAPPPADWNGVEVMKTK

SEQ ID NO: 69401 - DNA, 456 bp, Unknown
  Obtained from environmental sample
  misc_feature (1)..(456): n is a, c, g, or t
atgcgggaaggtaaaaacgtcagctactttccattttatggcgctgaaaagcggggcggcatagccagagccggcgttattgtctcagattcggaaattgccagccctttggtcacaaaaccggactcggcgctggtgatgaacagcgattctctgccggtttgcgaggaaattctcaaggaaaacggacttatgataataaactccagcctggttaaagaaaatcccagacgaaacgacataaaagttatcaaaatcgaagcgacaaacatagcggaacagaaagggaacgcccgttttgccaatatggtggcgcttggcgcaatggcaaagcttaccggagcgttttccctggacaatatcgaggaaatactgcgaaattttttctccccggacaagcaccatttcatcccaacaaacgtccaagccataaaagcggggtataacgctgtataa

SEQ ID NO: 69402 - protein, 151 aa, Unknown
  Obtained from environmental sample
  DOMAIN (1)...(149): Pyruvate ferredoxin/flavodoxin oxidoreductase
  misc_feature (1)..(151): Xaa is any amino acid
MREGKNVSYFPFYGAEKRGGIARAGVIVSDSEIASPLVTKPDSALVMNSDSLPVCEEILKENGLMIINSSLVKENPRRNDIKVIKIEATNIAEQKGNARFANMVALGAMAKLTGAFSLDNIEEILRNFFSPDKHHFIPTNVQAIKAGYNAV

SEQ ID NO: 69403 - DNA, 447 bp, Unknown
  Obtained from environmental sample
  misc_feature (1)..(447): n is a, c, g, or t
ttggcatatcaaaacgcagtatccacctataaagagaccaagataaagacggcgggtcaaggccagcttattatcatgctgtataacacggcgatacggcagcttgatgaggccctgtttttattgcaggcgaacgacaccggaaaaagagatccaggcaagatcgagaaaatcggcaaggctgtggttaaaacacaggaaatcatatccgaactaatggtttccctggattttgaacagggcggtgaaattgccgttaatctcttttctttgtatacatggttcaaccgggaacttatggaagccaacatcagccgggacgcaagacgcatattgattgtaaaaaatcatatcgaaaaccttcgcaacgcatggcaggaagtcgtgtcttcaaacgcttttgaaaccgccagcactgaggttttaggcgttaacattgcaatgtga

SEQ ID NO: 69404 - protein, 148 aa, Unknown
  Obtained from environmental sample
  DOMAIN (3)...(132): Flagellar protein FliS
  misc_feature (1)..(148): Xaa is any amino acid
MAYQNAVSTYKETKIKTAGQGQLIIMLYNTAIRQLDEALFLLQANDTGKRDPGKIEKIGKAVVKTQEIISELMVSLDFEQGGEIAVNLFSLYTWFNRELMEANISRDARRILIVKNHIENLRNAWQEVVSSNAFETASTEVLGVNIAM

SEQ ID NO: 69405 - DNA, 498 bp, Unknown
  Obtained from environmental sample
  misc_feature (1)..(498): n is a, c, g, or t
atgtcagcgacattaacagaaacaaaaacatcaatcagcgaaggtgagttgacccagcgcatggctgtcgtcaagcggtttagggagcttcttgagatgcagcgcgagcgttttcgcagttatcttgccgctctggacagtcagcagcttatcatcggcattgacagcgcggaggaaataacggcccatgtcgagttggaagagcaaatagtcgaagatatttattccatccagaaagtgattgatcccctggaaataatgtacaacagcgcgggcccgtatcttccggccaatgacctttccgcgttaaaagccgcgctggaagacctgaaaatccaggccgcggacagatcgaggcgaaaccgggatctaatttcccgccgtatggaagaaatcaataaagaattacaatcaatgaagaataacccgtttctggcaaatgcccgtttttcactgtataaaaatgtccccccttcgttagtcgacataatgggctga

SEQ ID NO: 69406 - protein, 165 aa, Unknown
  Obtained from environmental sample
  misc_feature (1)..(165): Xaa is any amino acid
MSATLTETKTSISEGELTQRMAVVKRFRELLEMQRERFRSYLAALDSQQLIIGIDSAEEITAHVELEEQIVEDIYSIQKVIDPLEIMYNSAGPYLPANDLSALKAALEDLKIQAADRSRRNRDLISRRMEEINKELQSMKNNPFLANARFSLYKNVPPSLVDIMG

SEQ ID NO: 69407 - DNA, 585 bp, Unknown
  Obtained from environmental sample
  misc_feature (1)..(585): n is a, c, g, or t
atggaaaatgtattaaccttgctcagagactccggggctatgcttgaagggcatttcctgctgagttcgggacgccattctgacaaatactttcaatgcgcaaagttgctgcaatatccggacaaggccgcgtctgcgcttgccggcgtggcggaaaagcttaaaaaggacatacgggacggcaaactggaaatacacgccgtcgtcggccctgccatgggagggattgtcgtcgcctacgaactaggcaggcagttggggcttccggcgttttttaccgagcgcgacgataccggaaaaatggcgctgcgccgcggttttgaaattaagccggaacaaaaaattttgattaccgaggatgtggtaactaccggaaaatcttccggcgaatgcgccgctgtccttgaggaacacggggcaaaaattgccgcccttgcctgccttgtggacagacgcgaagccggcgtaaatgtcccgtggacgctttatcccgcgtgtaaggttgacgccggaaactgggaatccggcgtctgcgaactgtgcaagaaaggaatacccgccgtaaaacccggctcaagaaaataa

SEQ ID NO: 69408 - protein, 194 aa, Unknown
  Obtained from environmental sample
  DOMAIN (32)...(159): Phosphoribosyl transferase domain
  misc_feature (1)..(194): Xaa is any amino acid
MENVLTLLRDSGAMLEGHFLLSSGRHSDKYFQCAKLLQYPDKAASALAGVAEKLKKDIRDGKLEIHAVVGPAMGGIVVAYELGRQLGLPAFFTERDDTGKMALRRGFEIKPEQKILITEDVVTTGKSSGECAAVLEEHGAKIAALACLVDRREAGVNVPWTLYPACKVDAGNWESGVCELCKKGIPAVKPGSRK

SEQ ID NO: 69409 - DNA, 765 bp, Unknown
  Obtained from environmental sample
  misc_feature (1)..(765): n is a, c, g, or t
atgaaaaaacagccgtattttactgtaatcttcgaaaatgagtacattattgcggtcaataaagctgccggaatttcggtgggcggcgaccgatgggatgaagccagggagcggctggataaactggtcgcggaacttattaagcccccggcgaaaattttaactgtccaccgtatagactgcgatacttccgggctggtggtattcgcaaaaaatgaggaagcccaccgccgcctttcaatcgcttttgaaggacgggatgtcaacaaacggtatattgccattgtccacggccgcccttcatggcaggaaacggcctgcgatcttcccctgattcccaatggcaacaaactccaccagactataattgacaaatatcagggtaaaaagtctcttacccgctttgtactgctgggcagcgcgggaaattatagcgttattgaagctctgccggaaaccggcagaacccaccagatacgcgttcacgccgcggccctgggccaccctgttgtctgtgattcaatgtacgggaagggcaagccggttatgctttctgaaataaaaaggaaatggcatggcgacccttatgatgaaaaacctcttttggcgcggcttggtcttcatgccgccgagcttgcggtaccgaaagaatctcttattctcaatgccccgcttcccagggatatggccgctctaatcaaccaaatgaagaaaagtggggagtggggagcagggagcagggagcaggtttgcttattttcttga

SEQ ID NO: 69410 - protein, 254 aa, Unknown
  Obtained from environmental sample
  DOMAIN (15)...(165): RNA pseudouridylate synthase
  misc_feature (1)..(254): Xaa is any amino acid
MKKQPYFTVIFENEYIIAVNKAAGISVGGDRWDEARERLDKLVAELIKPPAKILTVHRIDCDTSGLVVFAKNEEAHRRLSIAFEGRDVNKRYIAIVHGRPSWQETACDLPLIPNGNKLHQTIIDKYQGKKSLTRFVLLGSAGNYSVIEALPETGRTHQIRVHAAALGHPVVCDSMYGKGKPVMLSEIKRKWHGDPYDEKPLLARLGLHAAELAVPKESLILNAPLPRDMAALINQMKKSGEWGAGSREQVCLFS

SEQ ID NO: 69411 - DNA, 1251 bp, Unknown
  Obtained from environmental sample
  misc_feature (1)..(1251): n is a, c, g, or t
atgtcaaacacaaacattatccagcgaagagagctgaaaccgctttggaacaaagccagtaaaatggcgcagcattatgagaaagcgggaaactgcgttacttcggtaatgggatccgactttatttcaataataccttccaggcatcccaagcacatgctgttttgctctttttgcaaacgctaccatcaaaactcccggaatatggcggcacatgaattcccttgttcccaaatgcattatgacgccgtaaaagaggccagcaggcttggcggttcatttgtttatacctgcccaaacggtttgtttttctggaccagcccgtttttttcaggggggcgttttgccggagcgctgatggccggaggggcgcttgccataaaaagaaagcaggctttgcaaaggttttttgatttctacaaaggggaaattcccattgatgaaattgacaactaccttgagggcattcccgaaaggagcggcgaggaaatgaaggctctttcccggatgctgcggctttgcgcggaaaaaatttcctgttccggaacctgttatcatgatttggcggaatgtgagcatggatgcggctgcgcggatcagccgtcttatctgaatgacaaggaaaggcttcttatagcgtgcttgcgccggggcgatagcgtcgaagcccagagtatcgctcgggatctgttggccgatttcagcaatttggccgggggtgattttgagtatttcaaaatgaaggcaatagaactggtagtcctggtttcaagaaccggaacaaattccgaaaacgaggcggaacttgttgaaacgaacagccgtaatataaaacagcttgaagattccaataccgccggggaattggctgataacgtctgcctgattcttgaaaggatggccgggaaaatcttctcttttcaggggattcgccacgcgtccgcgcttaggaaagccgagcgttttatctgggaaaattacaccaggaagatcagcctgaaggagattgccgacgcatccgggctttcagcgccttatttcagcactgtattcaaaaatgaaatgggcgagaacctttcaaattatcttaacaggcttagggttgaaaaagccttgatgatgcttggcgaaagcgattctcccattaacaagatttcggcggactgtgggtttgaagatcaaagttggttttcaaaagtattcaaaagttataccggtattagcccatacgaataccgtaaatacggctga

SEQ ID NO: 69412 - protein, 416 aa, Unknown
  Obtained from environmental sample
  DOMAIN (370)...(414): Bacterial regulatory helix-turn-helix proteins, AraC family
  misc_feature (1)..(416): Xaa is any amino acid
MSNTNIIQRRELKPLWNKASKMAQHYEKAGNCVTSVMGSDFISIIPSRHPKHMLFCSFCKRYHQNSRNMAAHEFPCSQMHYDAVKEASRLGGSFVYTCPNGLFFWTSPFFSGGRFAGALMAGGALAIKRKQALQRFFDFYKGEIPIDEIDNYLEGIPERSGEEMKALSRMLRLCAEKISCSGTCYHDLAECEHGCGCADQPSYLNDKERLLIACLRRGDSVEAQSIARDLLADFSNLAGGDFEYFKMKAIELVVLVSRTGTNSENEAELVETNSRNIKQLEDSNTAGELADNVCLILERMAGKIFSFQGIRHASALRKAERFIWENYTRKISLKEIADASGLSAPYFSTVFKNEMGENLSNYLNRLRVEKALMMLGESDSPINKISADCGFEDQSWFSKVFKSYTGISPYEYRKYG

SEQ ID NO: 69413 - DNA, 1488 bp, Unknown
  Obtained from environmental sample
  misc_feature (1)..(1488): n is a, c, g, or t
ttggcgaaagcgattctcccattaacaagatttcggcggactgtgggtttgaagatcaaagttggttttcaaaagtattcaaaagttataccggtattagcccatacgaataccgtaaatacggctgaaccgatatatcggaagcaggataaaggcaggcagaaaatgaaagaagaaaatgaagtgctatcaacctatatgcaggcgaccgggagcaatgtgcagatttttgactgtaactcccagccatgtgaactggaaggttcattcagcattgagcaaaatatttgccgttattgcaagaatttttccggcggcagcaataattgccacggcaactgccacggcaattgccgcgaaatgcattcaaacaaaatccgggaaaccagccggaacggcagatcgcttatttaccagtgcgatctgggattgatgttctggatcagcccgatatacaacgatggaaaattttccggagcgttgcgcggttcgggctttataagctccaagatcagcaacgctggcccggccggctcggacggcagcccctgcgactctagggtttcatttttggaaaaatacaatgaaaaatacgatgaaagaattaccccggaagaattcgagcgccgtattctggcttttcagtttattgatgatgataaaattatatccctttccgagatgctgcttctgtgcgcggaaacaatatcaacaggcagtgagaattaccacgagatgctcagtcttcgttttgaacaacaggcgtctctttccgcccttattgatgagctaaaagaaaagtatcccaaaggttccggctttccggtgtatccccttgaaaaagagcgccagcttgtagcgatgctcagaaagggaaacaaacaagaagcggaaaaactccttaatgaactgttgtctgtgattgtattctgcaatcaggatcatttcaggtatattcagcttagatcgcttgagctggccgttctgcttgcccgcgccggaacaaattccgttaacggagcagggatggaaaacaaggcccgctatataaagcaaatccaggaagcaaaagccattgaggagatcgcggcggccctgcacagcatggttgaaaaaatagtcttacagatagttctgttccagggcattccccacgcttccgccatgagaaaagcggaatcttttatcaaagagaactacacccggaaaatcagcctgcgcgaagtcgcaaaaatagccggtctttccgccccctatttcagcactatctttaaagaggaaatgggcgaaaacctttccaaatatataaacaggcagagggtagagaaggccggtcgtatgcttttggaaacggacctttccctgtccgaaatttcgaacgcctgctgttttgaggatcaaagctggttctccaagatattcaagagctttaccggcatcagccccagcaaataccgcagccagggcgggaaaataagcatagcttaa

SEQ ID NO: 69414 - protein, 495 aa, Unknown
  Obtained from environmental sample
  DOMAIN (391)...(437): Bacterial regulatory helix-turn-helix proteins, AraC family
  misc_feature (1)..(495): Xaa is any amino acid
MAKAILPLTRFRRTVGLKIKVGFQKYSKVIPVLAHTNTVNTAEPIYRKQDKGRQKMKEENEVLSTYMQATGSNVQIFDCNSQPCELEGSFSIEQNICRYCKNFSGGSNNCHGNCHGNCREMHSNKIRETSRNGRSLIYQCDLGLMFWISPIYNDGKFSGALRGSGFISSKISNAGPAGSDGSPCDSRVSFLEKYNEKYDERITPEEFERRILAFQFIDDDKIISLSEMLLLCAETISTGSENYHEMLSLRFEQQASLSALIDELKEKYPKGSGFPVYPLEKERQLVAMLRKGNKQEAEKLLNELLSVIVFCNQDHFRYIQLRSLELAVLLARAGTNSVNGAGMENKARYIKQIQEAKAIEEIAAALHSMVEKIVLQIVLFQGIPHASAMRKAESFIKENYTRKISLREVAKIAGLSAPYFSTIFKEEMGENLSKYINRQRVEKAGRMLLETDLSLSEISNACCFEDQSWFSKIFKSFTGISPSKYRSQGGKISIA

SEQ ID NO: 69415 - DNA, 462 bp, Unknown
  Obtained from environmental sample
  misc_feature (1)..(462): n is a, c, g, or t
ttgcctcattatccgcttgcaagttatgccgaatctgaacattttaaactgtacatgcttgatataggacttctttctgctatgtccgatctggatataaacgcttttcttgatcgcgatccgtccgtctttgatcattttcacggagcgcttgcggaacaatatgtgcttggagaactgaaagcgctttcaggtatacctgtgtattattgggcgcgcgaaggttccgcgaaagcggaattggattttatcattcaaattgggaataaggttattcccattgaagtaaaagcggaaaggaatctaaaagcaaaaagcctgaaattatttatagatacttataatccgccaatagcgatccgtttatccatgtccgatttagggcaaaacccttattcaggatgtattatttacgatattccattgtatatggccggcaatttactccaactcctgtcttaa

SEQ ID NO: 69416 - protein, 153 aa, Unknown
  Obtained from environmental sample
  misc_feature (1)..(153): Xaa is any amino acid
MPHYPLASYAESEHFKLYMLDIGLLSAMSDLDINAFLDRDPSVFDHFHGALAEQYVLGELKALSGIPVYYWAREGSAKAELDFIIQIGNKVIPIEVKAERNLKAKSLKLFIDTYNPPIAIRLSMSDLGQNPYSGCIIYDIPLYMAGNLLQLLS

SEQ ID NO: 69417 - DNA, 627 bp, Unknown
  Obtained from environmental sample
  misc_feature (1)..(627): n is a, c, g, or t
gtgaaaacccttaaaatattgtacgaagataatatttgtattgtaattgacaaaccggccgggcttgcggttcagggcggaaagggggttaaatcgtccgtagacaggattttggctgaaacgcgcgatcccgcgccccttctggttcaccgcctggacaaggacacctctggggttctcctgaccgcgaaaacaaaggaagccgccgctgagttttcccggcttttgggggcggacaggcaggctgtaaagcggtacatcgcggtctgcgcgggaagccccgtaaaaaaagaggggatcatttcgcaggatttaatgatacggggcgtattaaaaaagtcggagacaaggtacaaggtgataaaaagcggggattttaccgtgctggagctggagcttggaacagggaggatgcaccaaatccgcagacaccttgccttaagcgggaatcctgtgcttggggacgacaaatacggggattttgcgctgaacaaggaactgagaaaagagaagggacttaaacgcctgcttttgcactcgtcgcggcttgtgataaaaggtaaatatcaaattgatataacatctcccctgcctgagtattttgaggagtttacttctttctcctga

SEQ ID NO: 69418 - protein, 208 aa, Unknown
  Obtained from environmental sample
  DOMAIN (12)...(147): RNA pseudouridylate synthase
  misc_feature (1)..(208): Xaa is any amino acid
MKTLKILYEDNICIVIDKPAGLAVQGGKGVKSSVDRILAETRDPAPLLVHRLDKDTSGVLLTAKTKEAAAEFSRLLGADRQAVKRYIAVCAGSPVKKEGIISQDLMIRGVLKKSETRYKVIKSGDFTVLELELGTGRMHQIRRHLALSGNPVLGDDKYGDFALNKELRKEKGLKRLLLHSSRLVIKGKYQIDITSPLPEYFEEFTSFS

SEQ ID NO: 69419 - DNA, 1089 bp, Unknown
  Obtained from environmental sample
  misc_feature (1)..(1089): n is a, c, g, or t
atggaaataccggcggccggttaccgccgcagtttcggtagcaatccgcagggattctggctgccggctctgggctggaccggcgcggtagaaccgtatttgagagcgtacaattttacatatacaattgtggacagccacggtttgctgtacggcaaacctttgccggaaaaagggagtttttcccctgttaaaacacctaacggtacatttattctcgcgagggatttttatgccgtaaaggaaattgaaaaaatatcaaacgatgaactgtacatggataatacccgcgatgtcggatatgagcttccgccggaaattgtcattccgtttttaaacgctgaaggagagcggcataaaacggggtacaagtattgggcgcgcgtatataacgcgggcggcaagaaatccgatacggtttacaatccgcaggccgcttcagaaaagataaccgaacatacaaggtcttttctggaaaatacaatcgcccgtctgcgggaagcgtccaaacatatggaagaaacgccgattagcctttatgcgaataacgcaggttattttggaaatttatggcgcgaaggaccgcaatttattgagtcgcttttccgtatggcgcaaggttaccgggatttacagtttgttactcccagctcttatattttcagccagaaacttaattcccttcaggttgtcgctcccgaattttcctcgtggggcgtaaacggctatgccgagacatggctggacacttccaacgactggatataccgccaccttatgcgctcaatggaaagaatgacggaattagccgagcgtttccccgatgatacgggcttaaaagagcgcgccttgaatcaggcggcccgcgaaatactgcttgcccagtcttccgactggccgtatcttctgcacaggcaggaatccaccgaatttgcgcgtaacaacgcggaaaacgcgcttcgtaactttaccacgatatacgaagccctgggcagcaactacatcagcaccgaatggcttacaaccctggaacgccgccacaatatcttcccgaacataaattaccgcgttttcaggagaaagaagtaa

SEQ ID NO: 69420 - protein, 362 aa, Unknown
  Obtained from environmental sample
  misc_feature (1)..(362): Xaa is any amino acid
MEIPAAGYRRSFGSNPQGFWLPALGWTGAVEPYLRAYNFTYTIVDSHGLLYGKPLPEKGSFSPVKTPNGTFILARDFYAVKEIEKISNDELYMDNTRDVGYELPPEIVIPFLNAEGERHKTGYKYWARVYNAGGKKSDTVYNPQAASEKITEHTRSFLENTIARLREASKHMEETPISLYANNAGYFGNLWREGPQFIESLFRMAQGYRDLQFVTPSSYIFSQKLNSLQVVAPEFSSWGVNGYAETWLDTSNDWIYRHLMRSMERMTELAERFPDDTGLKERALNQAAREILLAQSSDWPYLLHRQESTEFARNNAENALRNFTTIYEALGSNYISTEWLTTLERRHNIFPNINYRVFRRKK

SEQ ID NO: 69421 - DNA, 507 bp, Unknown
  Obtained from environmental sample
  misc_feature (1)..(507): n is a, c, g, or t
ttggaactatatataattcaagcgcgtaatgaaattaatgatatacaaaatgaaattgaaaatattttgttaaaatattccgttaaatatattttcccggcaataacacaaaatgacgaacaagatttaacagctcctatatcatttaagcaattgggagtttatgccggtattggctggatagggaaaaatgatttattggttacaaatgaatatggaccgagaataaggttaggggcggttttaatagatatagattttccatataatatcaatttaaaagaaaataaatgtcctgaaaattgtattttgtgtataaaatcatgtccatataaagcattaaaaaataaaatgtggactaatagtgtaaaaagagatgaaataataaattataaattatgtaatataaaaagaagtttatatataaaccaaattggacgtaaacattcatgcggatattgtatggtttcttgtatatatgggttaaaaaataatgaaaatatctaa

SEQ ID NO: 69422 - protein, 168 aa, Unknown
  Obtained from environmental sample
  misc_feature (1)..(168): Xaa is any amino acid
MELYIIQARNEINDIQNEIENILLKYSVKYIFPAITQNDEQDLTAPISFKQLGVYAGIGWIGKNDLLVTNEYGPRIRLGAVLIDIDFPYNINLKENKCPENCILCIKSCPYKALKNKMWTNSVKRDEIINYKLCNIKRSLYINQIGRKHSCGYCMVSCIYGLKNNENI

SEQ ID NO: 69423 - DNA, 786 bp, Unknown
  Obtained from environmental sample
  misc_feature (1)..(786): n is a, c, g, or t
atggcgataataaagaataatttcccgattttagaatatgatgactctgctaatgcgattattgagccggatcgaaagagtaatatatttcctaaaaattgtatgatgacattttttggggatgttctggaaaaatatctggaaagaacaaacgctgaaaagattggcgaatatagatctgaaatgagaatttttcctgtttggaaaattaaatataataatttagaaatttgtttaatacaggctgttgtagcttccggctcaatatcaatgatgacagattatcttataggaggaggtgttagaaatttaatagtatgcggagtttgcggtgttttgacagatataccgtcaggagatataatattaccaacaagcgctttacgtgacgaaggagcatcatatcattatttaccgcctgcacgggaaataatattaaatgaaatcccaataaaggcaataaaatcaactctgaaaaaaaataatgttcattattatgaatgtaaaacatggacaacagacggttttttcagggaaacaatggatatggtaaattatcgaagggaagaaggttgttctgttgtagaaatggaatgcgccgcaatagcggcggtatctgaatttaggaatattttatttggtcaattattgtatagcggcgatataataattagaaataaggaatatgatgaaagagattggtataataatttatcggcacgggaaaaattatttcatttatctttagaatcactccatgaattaaataaaatgttattggaatag

SEQ ID NO: 69424 - protein, 261 aa, Unknown
  Obtained from environmental sample
  DOMAIN (40)...(252): Phosphorylase family
  misc_feature (1)..(261): Xaa is any amino acid
MAIIKNNFPILEYDDSANAIIEPDRKSNIFPKNCMMTFFGDVLEKYLERTNAEKIGEYRSEMRIFPVWKIKYNNLEICLIQAVVASGSISMMTDYLIGGGVRNLIVCGVCGVLTDIPSGDIILPTSALRDEGASYHYLPPAREIILNEIPIKAIKSTLKKNNVHYYECKTWTTDGFFRETMDMVNYRREEGCSVVEMECAAIAAVSEFRNILFGQLLYSGDIIIRNKEYDERDWYNNLSAREKLFHLSLESLHELNKMLLE

SEQ ID NO: 69425 - DNA, 615 bp, Unknown
  Obtained from environmental sample
  misc_feature (1)..(615): n is a, c, g, or t
atgatattcctattgaaaaaatcaaaccttatttacaaaccggggttctcctggcataatcctgaatattcccataaagaattttttaaagaaaagacatggaatgaatattataataattatttttacgaaatatttttaaacataggaataaaagagggtattgcaaaaataatatcaaaaaacgtaataactgaatatatggataaaacgaaatggtttatatatgatgatgtaataagtacattagagaaaataaagaaaattggatacaataattatattttatcgaatcatgttccggaattaaatgtaattgtaaaaaatattggattaagtgaatattttagtgagatttacagttcggcaaatattggatatgaaaaaccaaatgtaaatatatatgaatatgttttaaaagaattaaggattgataaaaatacttgtattataataggcgatagttttaatgctgatataaaaggcggagaaaaaagcggaataaagtcaatacttgtacgaagcaaaaacacagaaaattataaatggtattgcagtaatttagaaaatataataacaatgattgaagaaataaggatacaaaaatatgaataa

SEQ ID NO: 69426 - protein, 204 aa, Unknown
  Obtained from environmental sample
  DOMAIN (1)...(176): haloacid dehalogenase-like hydrolase
  misc_feature (1)..(204): Xaa is any amino acid
MIFLLKKSNLIYKPGFSWHNPEYSHKEFFKEKTWNEYYNNYFYEIFLNIGIKEGIAKIISKNVITEYMDKTKWFIYDDVISTLEKIKKIGYNNYILSNHVPELNVIVKNIGLSEYFSEIYSSANIGYEKPNVNIYEYVLKELRIDKNTCIIIGDSFNADIKGGEKSGIKSILVRSKNTENYKWYCSNLENIITMIEEIRIQKYE

SEQ ID NO: 69427 - DNA, 1464 bp, Unknown
  Obtained from environmental sample
  misc_feature (1)..(1464): n is a, c, g, or t
atgaataataaaataattatcgtcggcgcgggcatcgccgggttgacagccggtatttacgcgcagcgcagcggattcgatgttactatttttgaacaacacacaatacccggcggtatgtgtacaagttggaggcgtaaagggtatttatttgagggcgctgttcattggcctgtcggcatgataccaaaaacagaattgaatgaaatttggagagacacaggcgcgttatcggataatgtaaatatcgagcgccatgaaccttttacttcagtcgaatgggaagggaaaaccgtttcaatataccgcgacatggaaagaacgaaaaaacactttctggaaatatctcccgaagataccgttgcaatacacaggcttatgaaagatatacaaattttgtctaaaatatcaatacctattacggacataaaaggcgtgaaaaactctaatccaaaaaaaatgacattggataaaataattaaaatgcttccggctttgccggcattaggcaaatttacaaaaatgtcatgcggcgagtatattaataaattcaaacatcctgcattgcgtaaagttttgaactttatgccattggattattatgcccttggattattgtgtacattatcatggctgcttataggcgactgcggctatcctgagggcggttcgcttgccctaacgcggcgcatggcggataaattcaaaacgctcggcggaaaattgattcttggaactaaagtattaaaagtaacaacggaaaacggcatttgcacaggcgttgaacttgaaaaagaaacgctccgcgcagatgctgtaatcgttacacaggaaacaatagcggctgtcaatcagttgttttcgccgcctccgaaagacaaatggattaaggaattatgcaaaaatacaaagccatctgtctgtacatacataggtatcgggataaaagcggaaatccctgaaacgccgaaatttgatctgcctaatcctatcgtatgcggcggtatctcttacacagaacttggttttaattataacgcttataaaggctacgctcccgataactgcacggcgttgaccgccgcttttttagatgacacctatgatttttggaaaaaggcgaaagatgagggaaggtatgaagcggaaaaacaatcgcttgcggaacagatcaaacgcgccatttcagcaaaatatccgcaagctgagggtaatatagaagtcatcgacattgccacaccgctcacttatgaacgttatacaggcgcatatcgcggctcatggatgagttttatgaacaagggtgacaaacaaaaaatatacccggggtttttaaaaagcattaccggtttgtatttcgccggccatcgaatgatgtctccgggcggcttgcctgtagcgcttttatccggccgcgcagcagcccagatggtgtgcaggcagtttgatatggagtttatataa

SEQ ID NO: 69428 - protein, 487 aa, Unknown
  Obtained from environmental sample
  SIGNAL (1)...(21)
  DOMAIN (12)...(479): Flavin containing amine oxidoreductase
  misc_feature (1)..(487): Xaa is any amino acid
MNNKIIIVGAGIAGLTAGIYAQRSGFDVTIFEQHTIPGGMCTSWRRKGYLFEGAVHWPVGMIPKTELNEIWRDTGALSDNVNIERHEPFTSVEWEGKTVSIYRDMERTKKHFLEISPEDTVAIHRLMKDIQILSKISIPITDIKGVKNSNPKKMTLDKIIKMLPALPALGKFTKMSCGEYINKFKHPALRKVLNFMPLDYYALGLLCTLSWLLIGDCGYPEGGSLALTRRMADKFKTLGGKLILGTKVLKVTTENGICTGVELEKETLRADAVIVTQETIAAVNQLFSPPPKDKWIKELCKNTKPSVCTYIGIGIKAEIPETPKFDLPNPIVCGGISYTELGFNYNAYKGYAPDNCTALTAAFLDDTYDFWKKAKDEGRYEAEKQSLAEQIKRAISAKYPQAEGNIEVIDIATPLTYERYTGAYRGSWMSFMNKGDKQKIYPGFLKSITGLYFAGHRMMSPGGLPVALLSGRAAAQMVCRQFDMEFI

SEQ ID NO: 69429 - DNA, 2067 bp, Unknown
  Obtained from environmental sample
  misc_feature (1)..(2067): n is a, c, g, or t
atgtttctgcgttctttgtccgtccccgtaagcgcaatcagcggaataggggtttccgcgtctcaaaaacttgcgcggcttggaatacacacagccgctgatcttctgcttcactatccgcgcgattgggaagaccgcgaaaaaattgttccgttaaaagattacagaagcggcaaaatctgcacagttgtaacggttttcgcgcgcgaatggattggctacggcagaatgaaaacgctgaaaatttacatagaagatgaaaacactcaagccgctcttgtatgttttaaccgcccttggcttgataaacagcttatcacagggcaaaaatacatgatttcaggacgcttttactacaaatacggcgaattgcaatcaagcgcgtttgaagcggaacctgagtcttcaggcgcaagtttcgggaaaatactgcctgtttatccgctaacggcggggatacttcaaaataatatgcggcgttttatttcttccgctataaaaaaatatgttaacgacttggagaacgaactgcccaatgaaataatagaaaaagaatcccttttatcaaagacgcaggcggtaaaagagatacatttcccgacttccgccaatatgcttgagaaggcgaaaaaaactcttgtttacgaagaactattttacatggaggttatggttcttcgcagagcgatagagcgaaagagcaaaataaaacttgaacttgcgaacaatgaaggtaaaaacgaaaatatttcacaattacagcaaagccttatcgaaagactttctttctcattaacggacggacaaaaacaggctgtaacggaaataaacagggatatgtcgtctaatattcctatggcgcgtcttttacagggcgatgtcggctgcggcaaaactcttgtctcatttctggcggcgttacgcgttgttgaggaaaagggacaggcggcaatcatggctcctacggaattgcttgcgcgtcagcacgccgaaaacgccgcgcgtcttttggagccgcttggagtcagtatcgcttttcttacgggaaatataaaagcgcagggacgcaaagaactgctgaaaaaccttgccgacggaacaatcggcataatagcgggaacgcacgctcttttttccaaagatgtcgagtataaaaacttaaaattggttgttatagacgaacagcaccgttttggcgtaacgcagcgttcgctaatcatggcaaaagggcaagaagccggtcttttgatgatgagcgcgactcccattccccgcactttggcgttaactgttttcggcgatatggacgtaactgtaataaaagatatgccggtgggaagaaaacccgtaattactcatttagcgaaagagtcaaacgaacaaaaagtttatgattttgtccgcaaagagctggagaagggcaggcaggcatattttgtctatccgttaatcgaaggcggcgatgaaataaaagacgccgtatcaatggcgcaaaggctgggaaaagaaattttcccgaaacacaaaacggctcttattcactccaaactgcccgaagatgaaaaaaagcagataatggacgattttagaaaaggcaaaataaaaatacttgccgctaccagcgttgtagaagtcggtgtagacgtgccgaacgccgcctgcatggtcattgaacacgccgagcgttttggtttatccgcgcttcatcaattacgcggacgagtcggcaggggagaggagcagtcgttctgttttcttgtttattcagacgaccttacggaagaaggcaagacccgcttaaaagtaatgctggaaaacagcgacggctttgtaattgcggaagaagatttgaaattaagaggtcccggacaaatcgcggggacggaacaatcgggctaccttgttcttgggatagccgacccaatccgagatatggaaacattggaaagagcgaggaatgatgtgttttctattttagagaatgatcctgatctgttactggagaataatcgcgtgattgcgagagtgctggaacaggcttcgccgtttggcgaggttgcgctataa

SEQ ID NO: 69430 - protein, 688 aa, Unknown
  Obtained from environmental sample
  SIGNAL (1)...(19)
  DOMAIN (262)...(424): Type III restriction enzyme, res subunit
  misc_feature (1)..(688): Xaa is any amino acid
MFLRSLSVPVSAISGIGVSASQKLARLGIHTAADLLLHYPRDWEDREKIVPLKDYRSGKICTVVTVFAREWIGYGRMKTLKIYIEDENTQAALVCFNRPWLDKQLITGQKYMISGRFYYKYGELQSSAFEAEPESSGASFGKILPVYPLTAGILQNNMRRFISSAIKKYVNDLENELPNEIIEKESLLSKTQAVKEIHFPTSANMLEKAKKTLVYEELFYMEVMVLRRAIERKSKIKLELANNEGKNENISQLQQSLIERLSFSLTDGQKQAVTEINRDMSSNIPMARLLQGDVGCGKTLVSFLAALRVVEEKGQAAIMAPTELLARQHAENAARLLEPLGVSIAFLTGNIKAQGRKELLKNLADGTIGIIAGTHALFSKDVEYKNLKLVVIDEQHRFGVTQRSLIMAKGQEAGLLMMSATPIPRTLALTVFGDMDVTVIKDMPVGRKPVITHLAKESNEQKVYDFVRKELEKGRQAYFVYPLIEGGDEIKDAVSMAQRLGKEIFPKHKTALIHSKLPEDEKKQIMDDFRKGKIKILAATSVVEVGVDVPNAACMVIEHAERFGLSALHQLRGRVGRGEEQSFCFLVYSDDLTEEGKTRLKVMLENSDGFVIAEEDLKLRGPGQIAGTEQSGYLVLGIADPIRDMETLERARNDVFSILENDPDLLLENNRVIARVLEQASPFGEVAL

SEQ ID NO: 69431 - DNA, 666 bp, Unknown
  Obtained from environmental sample
  misc_feature (1)..(666): n is a, c, g, or t
ttgaatatttatattttattgtatataatatatttaaggtttaatatgaatataataaaggcaattttctttgattttgatggtgtaatgaccatagataaaactggaacacaatctatttgtaaatatatttcagaaaaatataatattgataaaaatatatttgaaaaagagtatagaaaatataatgatgatttattatatggaataacaacccatgaaaaaatatgggataaaatatgtcaaaacttaaatgaaaatatacccatttctattttacatgattcttttgaaaatactccaataaataatgaaatgcatgatattattaaaaatgttaaaagtcaaaatataaagacggcattaataacggacaataaaattgatagaataaaaataataacagaaaaatataatttaaataaaatatttgatgttataatagtttctgcagaaataggttttggaaaagataataaaataatatttgaaacagtattagataaattaaatgtaaaatcaaatgaatgtatatttattgataatcaagaaaggaatttaattattcctaaaaatatgggaataaatactatattctttgaagatgaagaaaaagatatggaaaaattaaaatatgaaataaaaaaatatggtataaatatttaa

SEQ ID NO: 69432 - protein, 221 aa, Unknown
  Obtained from environmental sample
  DOMAIN (19)...(203): haloacid dehalogenase-like hydrolase
  misc_feature (1)..(221): Xaa is any amino acid
MNIYILLYIIYLRFNMNIIKAIFFDFDGVMTIDKTGTQSICKYISEKYNIDKNIFEKEYRKYNDDLLYGITTHEKIWDKICQNLNENIPISILHDSFENTPINNEMHDIIKNVKSQNIKTALITDNKIDRIKIITEKYNLNKIFDVIIVSAEIGFGKDNKIIFETVLDKLNVKSNECIFIDNQERNLIIPKNMGINTIFFEDEEKDMEKLKYEIKKYGINI

SEQ ID NO: 69433 - DNA, 516 bp, Unknown
  Obtained from environmental sample
  misc_feature (1)..(516): n is a, c, g, or t
atgcctagaccaacaaataaaaagggacttattgaactttcagaactcaatttcaataaattattggaatttattgacgaacttcccgaaaaaaataaaaatggaacatacaaaaacaatgaattaaatgatcgggataaaacaatcgccgatgtgatatgccatttgcacgaatggcatttgatgatggaaaattggtataaagttggaatgtctggaaaaaagcctgcaatacctgctgaaggtgttacatggcaaactttacctgtactcaatcgtaagatatatgaaaagtataaggatactgaattaaaggaagcgataacattatttaaaaagagccataaaaaaattatgggcttaattgaaaaacataccgatgatgagttatttacaaaaaagaaatatcaatggacagggacaacatcattgggggcatatttaattggatcaacgtcaagtcattatgactggggcttaaaaacaataaaaccattaaaaaaaatggtgaaataa

SEQ ID NO: 69434 - protein, 171 aa, Unknown
  Obtained from environmental sample
  DOMAIN (1)...(169): Protein of unknown function (DUF1706)
  misc_feature (1)..(171): Xaa is any amino acid
MPRPTNKKGLIELSELNFNKLLEFIDELPEKNKNGTYKNNELNDRDKTIADVICHLHEWHLMMENWYKVGMSGKKPAIPAEGVTWQTLPVLNRKIYEKYKDTELKEAITLFKKSHKKIMGLIEKHTDDELFTKKKYQWTGTTSLGAYLIGSTSSHYDWGLKTIKPLKKMVK

SEQ ID NO: 69435 - DNA, 462 bp, Unknown
  Obtained from environmental sample
  misc_feature (1)..(462): n is a, c, g, or t
ttggaaaccggtttacgacaagtgtataaatattcaaaagcatactcaggcagtcaaaatattatttttaaggaagaagatgtttttatccaacaagttcctcttgatgagaatatattgtatgaaggaattgatactgtcattgaaagtatagacgaagtaaatgattctggaaaaagtagagaaaaagtaggggataaagtaggggataaagtaggggataaagtaggggataaagtaggggataaagtaggggataaagtaggggataaaagtagggagaaaagtagggagaaaataattgaacttatacaagctaataaatatataactaaagatgaaatagcagaattaataggattatccttaaaaggcgtagaaaagaatatccggcagctaaaggacaatggcttgattaagcgtatcggtccaaacaaaggtgggtattgggaagtattgtga

SEQ ID NO: 69436 - protein, 153 aa, Unknown
  Obtained from environmental sample
  misc_feature (1)..(153): Xaa is any amino acid
METGLRQVYKYSKAYSGSQNIIFKEEDVFIQQVPLDENILYEGIDTVIESIDEVNDSGKSREKVGDKVGDKVGDKVGDKVGDKVGDKVGDKSREKSREKIIELIQANKYITKDEIAELIGLSLKGVEKNIRQLKDNGLIKRIGPNKGGYWEVL

SEQ ID NO: 69437 - DNA, 780 bp, Unknown
  Obtained from environmental sample
  misc_feature (1)..(780): n is a, c, g, or t
atgaacggagcggcaacaaatcccgaattcggcgttgtcgcccttgccgcgactcaggtaaaggccgcgattgacgcgacaatcgagcttggcggcgccggctacactttctggggcgggcgcgaaggttacatgagcctgcttaatacagatctcaagagggagaaagaaaatttagcccgcttccttacgatggcaagggactatgcccgcaaacagggctttaagggcgttttctacattgaaccaaaaccgatggagccgacaaagcaccagtacgattttgacacggaaaccgtcatcggcttcctgcgccagtggggccttgacaaggatttccgcatgaacatcgaagccaaccacgcggaacttgccgggcacgaattcgcgcacgaactggaaacagccgccgccgcgggtttcttcggctcggttgacgccaaccgaggcgacgcgcagaacggctgggacacagaccagttcccgatgagctactatgaaacagcgatggcgatgtacacaatccttaaaatcggcggctttacaaccggcggccttaactttgactcaaaaatccgcagaaactccatagacccggcggacctcttcctggcccacatcggcggcatggacgccttcgctgtagggttacaggtagcgcaaagaattattgacgacggagttatcccgaactttgtgaaagagcgttatgcgtcattcaacgacgggagacggcgcgaagttcagcaaaggcgaacttactctggaacagttggctaa

SEQ ID NO: 69438 - protein, 259 aa, Unknown
  Obtained from environmental sample
  DOMAIN (1)...(152): Xylose isomerase-like TIM barrel
  misc_feature (1)..(259): Xaa is any amino acid
MNGAATNPEFGVVALAATQVKAAIDATIELGGAGYTFWGGREGYMSLLNTDLKREKENLARFLTMARDYARKQGFKGVFYIEPKPMEPTKHQYDFDTETVIGFLRQWGLDKDFRMNIEANHAELAGHEFAHELETAAAAGFFGSVDANRGDAQNGWDTDQFPMSYYETAMAMYTILKIGGFTTGGLNFDSKIRRNSIDPADLFLAHIGGMDAFAVGLQVAQRIIDDGVIPNFVKERYASFNDGRRREVQQRRTYSGTVG

SEQ ID NO: 69439 - DNA, 384 bp, Unknown
  Obtained from environmental sample
  misc_feature (1)..(384): n is a, c, g, or t
atggcggattatttcgttggggcaaaagaatatttccccggaatccaaaaaatcaaatacgaaggaccaaagagcaaaaatcctctggcgttcaagtattatgacgctgataaagttatcggcggcaagaaaatgaaagatcatcttcgtttcgcaatcgcatactggcacagtttctgcggagacggcggcgacccgttcggaactgcaacgcatatcttcccgtggaatacggatgcaaaagatccgatggacgcggctgataaaaagatggacgccgcttttgagttctttacaaaaatgggcgctgaattttacgcgttccatgacagagacatggctcccgaaggcgcanaccccgcagaaagcgaaaaaatcttataa

SEQ ID NO: 69440 - protein, 127 aa, Unknown
  Obtained from environmental sample
  misc_feature (1)..(127): Xaa is any amino acid
MADYFVGAKEYFPGIQKIKYEGPKSKNPLAFKYYDADKVIGGKKMKDHLRFAIAYWHSFCGDGGDPFGTATHIFPWNTDAKDPMDAADKKMDAAFEFFTKMGAEFYAFHDRDMAPEGAXPAESEKIL

SEQ ID NO: 69441 - DNA, 357 bp, Unknown
  Obtained from environmental sample
  misc_feature (1)..(357): n is a, c, g, or t
atgagaatcggtcttgacggctttatttcactggatttcaaaccaaaagaaatacggctgaccggcggcggttcaaaaagcaaactgtggcagagcatcgctgcgaatattatgaatcttcctgtacgtcctccgtcaggttctgaagctgccgcaatgggcggcgcaattcaggctctttggtgtctgaataaaaattccgcagattcaaaaaagacaacaattgaagcattggcggacgaacacgtcgcattaggtgatacaatcgctcccgacaaaaaaagcgtggagcagtataaaaaagcctacgatgtttattcaaagtatcttgggactttaagtcctttatataaatag

SEQ ID NO: 69442 - protein, 118 aa, Unknown
  Obtained from environmental sample
  misc_feature (1)..(118): Xaa is any amino acid
MRIGLDGFISLDFKPKEIRLTGGGSKSKLWQSIAANIMNLPVRPPSGSEAAAMGGAIQALWCLNKNSADSKKTTIEALADEHVALGDTIAPDKKSVEQYKKAYDVYSKYLGTLSPLYK

SEQ ID NO: 69443 - DNA, 1134 bp, Unknown
  Obtained from environmental sample
  misc_feature (1)..(1134): n is a, c, g, or t
atgagaaccgtttgcggaatcgatctgggaacccagagttgtaaaattgtagtttatgattatgaaaaaaaggctattattgccaaatctcaggctccggtggacattatagccaataatgacgggacaagagagcaaaaaaccgaatggtacgacgcggtcataaaaacttgttttgataaaatcgataaaaacatcaaaaaggacatcgccgctatcggcgtttcaggacaacagcacggttttgtgcctcttgacgaaaaagggaagcctgtctacaacgtcaaactttggtgcgacacctcaactacagccgagtgcgaagaattgacaaaggcggcgggcggcgaaaaaagattgatagaaaaagccggactgccgatgcgccccggctataccgcgccgaaagttctttggctgaaaaaacacaaatccgccgcgtttgcgaaactgcggcatattcttctgccccacaattacatcaactttttattgacaggcgagtattgggcggaatacggcgacgcgtcaggaaccgcgctctttgatgtgcgcggacgcaaatggtcgtctgaaatctgtaagctgatttctcccgatgtagaaaaatatttaccgcccttaacaacttccgaaaaaacagcgggaaaggtaagcaaagccgcggcagccctttacggtcttaacgaaggcacgcttgtatcttcaggcggcggcgacaatatgatgggcgctatcggcactggcgcggttaaagacggattcttaacgatgagtttgggcacaagcggcactctttttggtttttcaaacgcgccggttatcgacccgaccggaaacctagccgcgttctgttcatcttccggtggctggcttccgcttctctgcacgatgaactgcacagtagcgagcgaagaattccgtaagcttatagaccttgatgtaaaagcctttgacgcggaagcggaaaaatctcctgtcggcgcggacggcattgttatactgccgttcttcaacggggaacgcactccgaacctgccgaacggaagagcgagcgtaaacggcattactgccgcaaacttcagagagaaaaccttgcgcgcgcagcgcttgagtccgctattttcggaatga

SEQ ID NO: 69444 - protein, 377 aa, Unknown
  Obtained from environmental sample
  DOMAIN (250)...(377): FGGY family of carbohydrate kinases, C-terminal domain
  misc_feature (1)..(377): Xaa is any amino acid
MRTVCGIDLGTQSCKIVVYDYEKKAIIAKSQAPVDIIANNDGTREQKTEWYDAVIKTCFDKIDKNIKKDIAAIGVSGQQHGFVPLDEKGKPVYNVKLWCDTSTTAECEELTKAAGGEKRLIEKAGLPMRPGYTAPKVLWLKKHKSAAFAKLRHILLPHNYINFLLTGEYWAEYGDASGTALFDVRGRKWSSEICKLISPDVEKYLPPLTTSEKTAGKVSKAAAALYGLNEGTLVSSGGGDNMMGAIGTGAVKDGFLTMSLGTSGTLFGFSNAPVIDPTGNLAAFCSSSGGWLPLLCTMNCTVASEEFRKLIDLDVKAFDAEAEKSPVGADGIVILPFFNGERTPNLPNGRASVNGITAANFREKTLRAQRLSPLFSE

SEQ ID NO: 69445 - DNA, 678 bp, Unknown
  Obtained from environmental sample
  misc_feature (1)..(678): n is a, c, g, or t
atgggaaataccacaagtattctcattacctcaaatgataatgaggggcataaatttatccttgattctcttaacaatcaaaccggcttaaacataatcggcattgaaaacgatgaaaccaatacgataataaaatccgaacgattaaaacccgacgtgcttattttaaacttattacagccggtaattgacggggcggaacttgcgcccattatacacagaagatcgcctaatacagctattatcatgatatgcgacaaagacgataacgaatacgccggaaaagccctcagagccggaatacttggatatctgttaaaaaacgcggatatgaacaaaatactacatgcggtaaaaattgtatctctgggcggatactttatcagcgcttccattattaacaggtttattaatacaaccgcgattacaaaccaattttccgaacaggaattaggacaaaattatacatttttttctcaggcggaacgcagtattgttacagaccttgccaggggtttttcagatacggaaattgccaaacatttgcatttcagtaagggaactataaaaaattatcttgcagccataaaaaacaagttaaaattaaaaaaccgtatacaaattgtggttttttcgctcttatccggacttattaggttagaaaaccttgatatatag

SEQ ID NO: 69446 - protein, 225 aa, Unknown
  Obtained from environmental sample
  DOMAIN (155)...(212): Bacterial regulatory proteins, luxR family
  misc_feature (1)..(225): Xaa is any amino acid
MGNTTSILITSNDNEGHKFILDSLNNQTGLNIIGIENDETNTIIKSERLKPDVLILNLLQPVIDGAELAPIIHRRSPNTAIIMICDKDDNEYAGKALRAGILGYLLKNADMNKILHAVKIVSLGGYFISASIINRFINTTAITNQFSEQELGQNYTFFSQAERSIVTDLARGFSDTEIAKHLHFSKGTIKNYLAAIKNKLKLKNRIQIVVFSLLSGLIRLENLDI

SEQ ID NO: 69447 - DNA, 597 bp, Unknown
  Obtained from environmental sample
  misc_feature (1)..(597): n is a, c, g, or t
ttgtcgcagtccaacctcaactactcctgcaccgcattcggcaaccaaaactccgtcgcctccggtctcaagaggatgttaacgctacgtcacccgggcaaaaataaagacgtgctggtaatggtaggcgacggcggcgttgcggacatcggtttggactacacgctgcactcgtggtttcgcggcgagagaataaccacggtgatgctcgacaacgaggtatacggcaacaccggcggtcaggagagcggaatgacggttaaaggcagagtgctgaatatggcgccgaagggaaaaaagttcggcaagatcccggtcttcgaaatggcaaaaacggcgggttgcgtttacgccgtgcgtgtcacggttgcaagccccaaaaggttaggaacggcaatcaggcgagcggtgcttgtcgcacgggaaatcggcccgacgtatgtacaagcttacacgccttgccctacaaacatgaagtttcagacaaataagacaatcgaaacggccaaagagggagagaagagctattatcaatacgaggaatacataacagaatcagcaaaagaatatttggatgaaaaagataaatctttttaa

SEQ ID NO: 69448 - protein, 198 aa, Unknown
  Obtained from environmental sample
  DOMAIN (1)...(150): Thiamine pyrophosphate enzyme, C-terminal TPP binding domain
  misc_feature (1)..(198): Xaa is any amino acid
MSQSNLNYSCTAFGNQNSVASGLKRMLTLRHPGKNKDVLVMVGDGGVADIGLDYTLHSWFRGERITTVMLDNEVYGNTGGQESGMTVKGRVLNMAPKGKKFGKIPVFEMAKTAGCVYAVRVTVASPKRLGTAIRRAVLVAREIGPTYVQAYTPCPTNMKFQTNKTIETAKEGEKSYYQYEEYITESAKEYLDEKDKSF

SEQ ID NO: 69449 - DNA, 1233 bp, Unknown
  Obtained from environmental sample
  misc_feature (1)..(1233): n is a, c, g, or t
atgaaaaaaatgttttttgcggttgcgttgttgacgttttttgttgcgagcggcgtaaatgcgcagcaaagcggatggatttcccgttattgggacgggtgcaagcccagttgttcatggagcggtaaaaactatgtcaatggcgccggacagtgcaaggagtgcgacaggaacaacaataagctggccaccagcgatatgaataagagcgcctgcgatggagggggcacctcttatacttgttgggatatgattccgttcgttgaccaaaacgacccaaacaaggcttacggctacgcggccacgccgagcgatcaatgcggtcagtgttacgagataaagttcgacggcggtttcaaacatggcaccgcctatgctacgcataaggctattaacggcaaaaccctgattgtgatggcaagcaatatgggcggcgacgtcggtcagggacagtttgacgttttgatcccgggcggcggggtgggacagtttgacgccttctcctcccaaataggcgtcagcaaagaggcgcttggcaagcaatacggcggttttttgagcgactgtgaagactcgttgaagtgggcggccggatctcttcagcaataccaaaaatgtctaagcgataagtgcaacaatgtattcaaagacccaaaacacgcgttgcttaacgagggttgcaacttttacgccaactggtttatggcggcgaacaacccgacaatgacgtataaagtaactacttgtccgcaaatattgatcgacagataccagaaaggcgacaacacccccacgccgaaaccaacgtacacactgacggtcaaacactatcccgaagagggcggaaccaccgaacctgcggccacaaaatcggatatcgaaaagggaacgcaggtaagcataacggccacgccggcggacggctacaccttcgcccgctggacggcgaccgacagcggcacgatagccaaaacggacagcgcctccacaaccgtaacagtgaacgggaacgtgaccgtaaccgccaattttggtaaactcatcgttatagtagtaccgcaggacagtaacaatttgggcgatatcaatataccgcccacgcatgacagcacanactcaataagaagcgttatcgccggaaaaacgcgcgtaggcataacgctgaaatcgcccccggcggtttcacgcctacctgccggcgggccacggttacacgtcgtacaagctgattaa

SEQ ID NO: 69450 - protein, 410 aa, Unknown
  Obtained from environmental sample
  SIGNAL (1)...(21)
  DOMAIN (24)...(258): Glycosyl hydrolase family 45
  misc_feature (1)..(410): Xaa is any amino acid
MKKMFFAVALLTFFVASGVNAQQSGWISRYWDGCKPSCSWSGKNYVNGAGQCKECDRNNNKLATSDMNKSACDGGGTSYTCWDMIPFVDQNDPNKAYGYAATPSDQCGQCYEIKFDGGFKHGTAYATHKAINGKTLIVMASNMGGDVGQGQFDVLIPGGGVGQFDAFSSQIGVSKEALGKQYGGFLSDCEDSLKWAAGSLQQYQKCLSDKCNNVFKDPKHALLNEGCNFYANWFMAANNPTMTYKVTTCPQILIDRYQKGDNTPTPKPTYTLTVKHYPEEGGTTEPAATKSDIEKGTQVSITATPADGYTFARWTATDSGTIAKTDSASTTVTVNGNVTVTANFGKLIVIVVPQDSNNLGDINIPPTHDSTXSIRSVIAGKTRVGITLKSPPAVSRLPAGGPRLHVVQAD

SEQ ID NO: 69451 - DNA, 462 bp, Unknown
  Obtained from environmental sample
  misc_feature (1)..(462): n is a, c, g, or t
atgttctacgaaaacgtaaccccgttggaggacgccctgaaaaccggcgtcctcccgacgcttgaaaccttcccctgcccgcacgataccgaggcgcaaagtaccggctgcgtacgcatcgtcttccccgagttcacctgcgtctgccccaagaccggctaccccgacttcgcgtccatactcctctgctacctccccggcaagctatgccttgagctgaagtcatggaagctctacctgaacgccttcaggatggtcggcaccttccacgaaacggtctccgcccatcttttcaacaccttgaaaacgctgctaactcccaagtggatgctgctcgccggagacttctacccgcgaggcaacgtagacaccacagtcctcttcgagacggacggcccgcgccccttaggcgccgacctgctcataggcccgtacctgccccctaggttaaaatcacaataa

SEQ ID NO: 69452 - protein, 153 aa, Unknown
  Obtained from environmental sample
  DOMAIN (36)...(135): GTP cyclohydrolase I
  misc_feature (1)..(153): Xaa is any amino acid
MFYENVTPLEDALKTGVLPTLETFPCPHDTEAQSTGCVRIVFPEFTCVCPKTGYPDFASILLCYLPGKLCLELKSWKLYLNAFRMVGTFHETVSAHLFNTLKTLLTPKWMLLAGDFYPRGNVDTTVLFETDGPRPLGADLLIGPYLPPRLKSQ

SEQ ID NO: 69453 - DNA, 774 bp, Unknown
  Obtained from environmental sample
  misc_feature (1)..(774): n is a, c, g, or t
atgaacagtacaagcattcctatagttaaactagttttggattctgatatgatgggcaaggtcatagtcggccttctcttgttcttctcgcttttgagttgggcgctgatcttcgcccgcgtggtgtctctcaaaagcgttgtgggcagttgcaagaagttccgccagcgcttccagcacgacgtgcggcacatcacggaggtagaccggatgagcagagacgaggtggaaacgcccatggggcagctcgccaaggtaggtgcggacgagtaccaccgtatcatcggcgacgtgaagacgcacacccgggtaagcgactggtcgtttttcttggagagccagttcacgatggcccgcgagcgtatagacagcgcgctagctagcattgtggccccgtttgactcaggtgttttcctcttggctatgataagcagcgtcgcgccgtttttggggcttttgggtacggtatggggcatcatgaactcgttctatgagatcggcaggcaggggtcggccggtctgccggtggtcgcgccgggtatagcgtcggcgcttatcaccacgattgtggggttggccgtggccattccggcgctgtttttctacaactactgcaaccataaagcggagcgggccgcggacgacatggaggagtttaaagatattttggttgtgcgtctgcgcagggagatcttcagcgcgttcttcgcggagaaccaggcggcgtcggcggcgccggcgcctaggccgcccatcggcggggggtatcaatga

SEQ ID NO: 69454 - protein, 257 aa, Unknown
  Obtained from environmental sample
  DOMAIN (89)...(221): MotA/TolQ/ExbB proton channel family
  misc_feature (1)..(257): Xaa is any amino acid
MNSTSIPIVKLVLDSDMMGKVIVGLLLFFSLLSWALIFARVVSLKSVVGSCKKFRQRFQHDVRHITEVDRMSRDEVETPMGQLAKVGADEYHRIIGDVKTHTRVSDWSFFLESQFTMARERIDSALASIVAPFDSGVFLLAMISSVAPFLGLLGTVWGIMNSFYEIGRQGSAGLPVVAPGIASALITTIVGLAVAIPALFFYNYCNHKAERAADDMEEFKDILVVRLRREIFSAFFAENQAASAAPAPRPPIGGGYQ

SEQ ID NO: 69455 - DNA, 420 bp, Unknown
  Obtained from environmental sample
  misc_feature (1)..(420): n is a, c, g, or t
atgaaaagaagaaaagaccgccagcggcaggtgataagcgacctcaacctcaccaacctgattgacgtcgtcttcgcgctcctcatcatattcatgatcacggcgccgatgatgacgcagggcgtgcaggtggacttgccgcagaccgagtctgagaacgtggaatctaacgaatccatacaggtgacgataaacgacctaggcgagatatacgttgaccacgagattgtttcgcttatcgagttccgtaagcggtttgccgaggttttcgcgggcaggagcgacgtgccggtctttatcaacgccgacaagaaggtgccctacgggttatttgtccgtgtgatttccgaggtgcaaaacgtgggcgttgtgaagctcgggtttcttacgacggcgttagacggaaagagcgagtactga

SEQ ID NO: 69456 - protein, 139 aa, Unknown
  Obtained from environmental sample
  DOMAIN (8)...(133): Biopolymer transport protein ExbD/TolR
  misc_feature (1)..(139): Xaa is any amino acid
MKRRKDRQRQVISDLNLTNLIDVVFALLIIFMITAPMMTQGVQVDLPQTESENVESNESIQVTINDLGEIYVDHEIVSLIEFRKRFAEVFAGRSDVPVFINADKKVPYGLFVRVISEVQNVGVVKLGFLTTALDGKSEY

SEQ ID NO: 69457 - DNA, 756 bp, Unknown
  Obtained from environmental sample
  misc_feature (1)..(756): n is a, c, g, or t
atgggcggggcgcaggcggcatacggcgagcgtgccggatatggggatatgggctttcggaaggtgctcataatctccattgttttccatttgctcgtccttgtagggttgccgcttatgggcaagctctttgttaagaccaagaaagtcgagcgtcccaagacttttcagatggtgcagatgccgccgtcgcggccgcagccgcagaaaaaggtgccggtagagccgacgccggtagagcctccgcctacgccgacgcccccgccgcccgcgccggaaccgacgccggcgcccgtgccgacgcctaagccgcccacgccgacgccggcgccgccggagcccaagccgcaaccgccaaagccgacgccgaagcgggaaacggttcgtaagccggtggaggagaaccttgacgaattggcgtcgctaatgaacgcgctgccgacgccgccgacgcagataagcgccccgggcgacttcaagtatcactggtacctgaacgccgtgcgcaataaaattgagagcaactggcgtccggccacggagaaccggaacatcgccgtggtggtctcgtttgagatacacagcgacggcagcgcccagaacataaaagtaacgagttcgagcggcgacgccacgatagataatttgggcgtgagggcggttatgatctcatcgccgttcggcaaactccccgcggatttttcgggagacagggtagaaattaactttacacttcgtccgaccaggaaatattag

SEQ ID NO: 69458 - protein, 251 aa, Unknown
  Obtained from environmental sample
  misc_feature (1)..(251): Xaa is any amino acid
MGGAQAAYGERAGYGDMGFRKVLIISIVFHLLVLVGLPLMGKLFVKTKKVERPKTFQMVQMPPSRPQPQKKVPVEPTPVEPPPTPTPPPPAPEPTPAPVPTPKPPTPTPAPPEPKPQPPKPTPKRETVRKPVEENLDELASLMNALPTPPTQISAPGDFKYHWYLNAVRNKIESNWRPATENRNIAVVVSFEIHSDGSAQNIKVTSSSGDATIDNLGVRAVMISSPFGKLPADFSGDRVEINFTLRPTRKY

SEQ ID NO: 69459 - DNA, 312 bp, Unknown
  Obtained from environmental sample
  misc_feature (1)..(312): n is a, c, g, or t
ttgaagtcgcccggggcgcttatctgcgtcggcggcgtcggcagcgcgttcattagcgacgccaattcgtcaaggttctcctccaccggcttacgaaccgtttcccgcttcggcgtcggctttggcggttgcggcttgggctccggcggcgccggcgtcggcgtgggcggcttaggcgtcggcacgggcgccggcgtcggttccggcgcgggcggcgggggcgtcggcgtaggcggaggctctaccggcgtcggctctaccggcacctttttctgcggctgcggccgcgacggcggcatctgcaccatctga

SEQ ID NO: 69460 - protein, 103 aa, Unknown
  Obtained from environmental sample
  SIGNAL (1)...(21)
  misc_feature (1)..(103): Xaa is any amino acid
MKSPGALICVGGVGSAFISDANSSRFSSTGLRTVSRFGVGFGGCGLGSGGAGVGVGGLGVGTGAGVGSGAGGGGVGVGGGSTGVGSTGTFFCGCGRDGGICTI

SEQ ID NO: 69461 - DNA, 306 bp, Unknown
  Obtained from environmental sample
  misc_feature (1)..(306): n is a, c, g, or t
gtgtttacatggacagaagaaaaaaatctgcttaataagaaaaaacatggtttttacttgtcggatattttggatgtttttaatgatccgtatttactggaaatatatgatacggctcattcgtctttagatgaagaccgttatataagtttggggcttttccatgatacagttattctttttgtggtaactgtggataaagttgacggaaatacccaaataatcactgcacgggaagcgaccaaaattgaacaggaggcatatcatgaacactataaaaaaagcacgaatagcggcaaaaattaa

SEQ ID NO: 69462 - protein, 101 aa, Unknown
  Obtained from environmental sample
  DOMAIN (2)...(91): Protein of unknown function (DUF497)
  misc_feature (1)..(101): Xaa is any amino acid
MFTWTEEKNLLNKKKHGFYLSDILDVFNDPYLLEIYDTAHSSLDEDRYISLGLFHDTVILFVVTVDKVDGNTQIITAREATKIEQEAYHEHYKKSTNSGKN

SEQ ID NO: 69463 - DNA, 522 bp, Unknown
  Obtained from environmental sample
  misc_feature (1)..(522): n is a, c, g, or t
atgataaataatcaaatacaagttattttgggagatataacccggcaaacagttgacgctatcgtcaatgccgctaatgaatcattacttggcggcggaggcgtggacggcgcaattcattctgcggcaggtaaagaactggatatagcctgccgtaagatacatgatgaaaagggaggatgcaaaacaggcgacgcggttattacaaccggaggtaatttaccggcaaaatttgttattcatacagttggtcctgtttggcgcggcgggaaacagcaagaagctgaattgttacgcagtgcgtatttaagttctttacgattggcatccaagaatgggattaagagtattgctttcccgaatatcagcacaggaatattcggtttcccgaaagaacaagcttctacaatagctgtttccgctgttgcagattttcttaacaataataaaacatctatagagaatgttatttttgtttgctttgataaagaaaattatgagctttataaaaagcttgtttag

SEQ ID NO: 69464 - protein, 173 aa, Unknown
  Obtained from environmental sample
  DOMAIN (22)...(138): Appr-1-p processing enzyme family
  misc_feature (1)..(173): Xaa is any amino acid
MINNQIQVILGDITRQTVDAIVNAANESLLGGGGVDGAIHSAAGKELDIACRKIHDEKGGCKTGDAVITTGGNLPAKFVIHTVGPVWRGGKQQEAELLRSAYLSSLRLASKNGIKSIAFPNISTGIFGFPKEQASTIAVSAVADFLNNNKTSIENVIFVCFDKENYELYKKLV

SEQ ID NO: 69465 - DNA, 654 bp, Unknown
  Obtained from environmental sample
  misc_feature (1)..(654): n is a, c, g, or t
gtgttatacgaaatattaaacgaacctcacggcattaccgacgagcgttgggggaaaatccagcagaacacggtagaggcgatacgaaagattgataaggaacatccgattattgtgggcggaacaaattataattcaatcgagaaattatttaaaattcctaagtataccgataaaaatttaatttacacttttcatttttacgatccgcatatttttacacatcagggcgcgacatggaataagccgtcgcttgatccgctgtccaatcttccgtttcccgcgcccgaaaactttaaccctcaaatccatgaaacttttaaggggacgtgggttgaggaatttttaaaaaattatgaacaggattctaaatttgaaaaattaagcggaacgcttgaaagggtagtgtctttttccaaagaaaggaaagcccctgttttctgcggcgagttcggcgtatttatgaaacaaagtccaaaggaagatcgcgtaaaatggtacaagtttatccgcgaagaatttgtgaagaaaaatatcccatggatatgctgggattatttcggcggttttggagtatttaaaacccagtttaggggaaccttccccgcggatttggatacggatgttattcaagctttggggttaagaatataa

SEQ ID NO: 69466 - protein, 217 aa, Unknown
  Obtained from environmental sample
  misc_feature (1)..(217): Xaa is any amino acid
MLYEILNEPHGITDERWGKIQQNTVEAIRKIDKEHPIIVGGTNYNSIEKLFKIPKYTDKNLIYTFHFYDPHIFTHQGATWNKPSLDPLSNLPFPAPENFNPQIHETFKGTWVEEFLKNYEQDSKFEKLSGTLERVVSFSKERKAPVFCGEFGVFMKQSPKEDRVKWYKFIREEFVKKNIPWICWDYFGGFGVFKTQFRGTFPADLDTDVIQALGLRI

SEQ ID NO: 69467 - DNA, 618 bp, Unknown
  Obtained from environmental sample
  misc_feature (1)..(618): n is a, c, g, or t
ttggtacgaaaatcttatcttcctccgtgtaactccgtgtactccgtggttaattcttcttattctttagaaaatccaaaacgtgtggctttgatggactttggcgcgaagcgcggaatagctaacgcgcttgcggcgcgtggttgcgaggtgtggtcattccctcatgacacaaatgcacaggagatactgaaaatcaagccggatgggatcatgctcagtaacggtcccggagacccggcggaaagcgcaaatagcggaattattgaaacactccgtattctgcaaaaaagcgacgtgacgatttttggtatatgcctgggacatcaactgctggcgttggcaaacggctattcaacgcgcaaacttaaatttggccatcgcggggcaaatcagcctgttaaagaattggcgaccggacgcgtttatattacaagtcaaaatcacggatatgccgttgtcgcggataacggttcgtttgtgaacgtaaacgacggtacttgcgaaggtatggattatggcaattgtttttcagtgcaatttcaccccgaagcgtgcagtgggccgcttgatacttcttttctatttgacaactttataaaaaggatgaacaaatga

SEQ ID NO: 69468 - protein, 205 aa, Unknown
  Obtained from environmental sample
  DOMAIN (30)...(202): Glutamine amidotransferase class-I
  misc_feature (1)..(205): Xaa is any amino acid
MVRKSYLPPCNSVYSVVNSSYSLENPKRVALMDFGAKRGIANALAARGCEVWSFPHDTNAQEILKIKPDGIMLSNGPGDPAESANSGIIETLRILQKSDVTIFGICLGHQLLALANGYSTRKLKFGHRGANQPVKELATGRVYITSQNHGYAVVADNGSFVNVNDGTCEGMDYGNCFSVQFHPEACSGPLDTSFLFDNFIKRMNK

SEQ ID NO: 69469 - DNA, 756 bp, Unknown
  Obtained from environmental sample
  misc_feature (1)..(756): n is a, c, g, or t
atgcttttccaccgctggccgaaacagacaatggaaaagtttattgtcatttttcaggtacaggaaattaaaatggataacactaccctgctttccgtacaagatgtctcatgcgcatatataagccgcaatttcgcgcttttcggcaagaaacagataaaaccagtactggatcatataaatattgaattgaaaaccggtgaaattttggggcttacgggaaaatccggctgcggaaaaactaccctcgccaaatgtattcttggcattattgattacgaaggaaaaattttaattgacggtaaagaaataaaaaacaaatccatgcaggttcaaatggtttttcaggagccgggcgcgtctcttaaccccgtaaaaaaaatcggctggctgatggaagagccgcttgttattcataaaataggaactaaagacgagcgcggggaaaaaacagatgaaatgcttgagcgcgtcggccttgacccgtcttacaaaacgcgccgtgttcatgatttatcaggcgggcaaaaacagcgcgtctgcatagcacgcgccctcattctgtccccccggcttttaatcgccgatgaggcaatcagcgcccttgacgtgtccacaggcgcgcagatactcaaccttttcagggaattacactcatcacttgggttaagcgtgctttttatttcacataacaaagatgcggtggagtatctttgcgacaggattttggttatggagaatggaaacataaaataa

SEQ ID NO: 69470 - protein, 251 aa, Unknown
  Obtained from environmental sample
  DOMAIN (67)...(248): ABC transporter
  misc_feature (1)..(251): Xaa is any amino acid
MLFHRWPKQTMEKFIVIFQVQEIKMDNTTLLSVQDVSCAYISRNFALFGKKQIKPVLDHINIELKTGEILGLTGKSGCGKTTLAKCILGIIDYEGKILIDGKEIKNKSMQVQMVFQEPGASLNPVKKIGWLMEEPLVIHKIGTKDERGEKTDEMLERVGLDPSYKTRRVHDLSGGQKQRVCIARALILSPRLLIADEAISALDVSTGAQILNLFRELHSSLGLSVLFISHNKDAVEYLCDRILVMENGNIK

SEQ ID NO: 69471 - DNA, 1143 bp, Unknown
  Obtained from environmental sample
  misc_feature (1)..(1143): n is a, c, g, or t
ttggcattcagccgcctaacccatcatggggaagaatgctctacgaatcgcaaacatggtttttcagcgccccctggtgcgccatcgcgccgggaatttttattatgcttacggttatcgcttttcacatgctcggcgaaggtcttaggcgcaggttcgggggataatatggcgcgcctgcttgaagtacgcgatcttcagattgccctgaaaaaagaagagaaaaccattaacgccgtggataatgtcagctttacagttgatgaaggagaaattgtcggtcttgcgggcgagacaggctgcggtaaaacgctgaccgcgctttcaatcgccggccttttgccgcaaaaagctaagattacaggcggagaaattatttttaaaaatagagagttaatatctttaaacgaaaaagattattgcagcatacgcggaaaagaaatttcgatgatttttcaggaggtaaggcagtctcttaatccgcttataaaagtcggccgacaaatccgtgaaacgctggaacttaacacagacacggccgattccgccaggaaaagctataaaaggcgcacagttgaaatgcttttccgtcttgggtttgaggaaccaaaaaaaatatataacgcgtatccgcaccagctttcgggcggcatgtgccagcttataatggccgccatcgccgcaattaccaatccgcgcctgttgttagccgacgagccttccagctctcttgacgcgcaggcgcaagagcgcatactttccatgcttgttcaaatgaaccgcgaatataaaacctccgttctgattatatcacacgatctttccgtaatacgctcgttttgcagccgcttccttgttatgtacgccggaaaaattgtagaagaaggagactcaggcgcgctctactctccccttcacccttacacccaggcccttgtcggagcaatacctggcaaggacaagcgcggcagggaacttgccaatattccggggaaagtcccatcggtagaggatcattttacaggatgccctttcgcgccgcgctgtaaaaaagcgcagaacatttgcaataatgcttttccaccgctggccgaaacagacaatggaaaagtttattgtcatttttcaggtacaggaaattaa

SEQ ID NO: 69472 - protein, 380 aa, Unknown
  Obtained from environmental sample
  DOMAIN (293)...(356): Oligopeptide/dipeptide transporter, C-terminal region
  misc_feature (1)..(380): Xaa is any amino acid
MAFSRLTHHGEECSTNRKHGFSAPPGAPSRREFLLCLRLSLFTCSAKVLGAGSGDNMARLLEVRDLQIALKKEEKTINAVDNVSFTVDEGEIVGLAGETGCGKTLTALSIAGLLPQKAKITGGEIIFKNRELISLNEKDYCSIRGKEISMIFQEVRQSLNPLIKVGRQIRETLELNTDTADSARKSYKRRTVEMLFRLGFEEPKKIYNAYPHQLSGGMCQLIMAAIAAITNPRLLLADEPSSSLDAQAQERILSMLVQMNREYKTSVLIISHDLSVIRSFCSRFLVMYAGKIVEEGDSGALYSPLHPYTQALVGAIPGKDKRGRELANIPGKVPSVEDHFTGCPFAPRCKKAQNICNNAFPPLAETDNGKVYCHFSGTGN

SEQ ID NO: 69473 - DNA, 798 bp, Unknown
  Obtained from environmental sample
  misc_feature (1)..(798): n is a, c, g, or t
atgaaattgaatttcgagttaaaattcggcgccgcgttgggtattatcattgttgtcatgtccctcgttagttttttttggtctcctcatgattattacatgatggatcacacaaaacgctttttatccccgtctgcgagccatcttttgggaaccgacaacttcggaagggacattctttcgcggatcatggccggcggcagaaattccctgcttctggctttttgtaccgttgcgggagccgcggcggccggcagtatcctcggccttcttgccggttttctcggcgggttgacagaagaaataattatgcggataatagacaccgttaattcctttcccggaatagttatcgcgcttttgtttacagcgataatggataacggccaatttaccctgtttgtcgcgctattaatactttttactcccagttttacccgcgttatgcgaactactgcccttcaatacaaagacgcttcatttatacaggctgaacgtcttttaggggcgggttttttccgcataacttttattcatattctgcctaatgttatcccgtctttgctttgcgcctgtgtaatcggactttccaacgcgattcttgccgaatccgccatgagttacctcgggcttggcattcagccgcctaacccatcatggggaagaatgctctacgaatcgcaaacatggtttttcagcgccccctggtgcgccatcgcgccgggaatttttattatgcttacggttatcgcttttcacatgctcggcgaaggtcttaggcgcaggttcgggggataa

SEQ ID NO: 69474 - protein, 265 aa, Unknown
  Obtained from environmental sample
  DOMAIN (67)...(265): Binding-protein-dependent transport system inner membrane component
  misc_feature (1)..(265): Xaa is any amino acid
MKLNFELKFGAALGIIIVVMSLVSFFWSPHDYYMMDHTKRFLSPSASHLLGTDNFGRDILSRIMAGGRNSLLLAFCTVAGAAAAGSILGLLAGFLGGLTEEIIMRIIDTVNSFPGIVIALLFTAIMDNGQFTLFVALLILFTPSFTRVMRTTALQYKDASFIQAERLLGAGFFRITFIHILPNVIPSLLCACVIGLSNAILAESAMSYLGLGIQPPNPSWGRMLYESQTWFFSAPWCAIAPGIFIMLTVIAFHMLGEGLRRRFGG

SEQ ID NO: 69475 - DNA, 972 bp, Unknown
  Obtained from environmental sample
  misc_feature (1)..(972): n is a, c, g, or t
atggggccgctcgcaccttttccaccaatacaaggagggctttatgcgtatcaaccacaacttaaccgccatcaacacccaccgccaactgggtatcagcgagctcgacggctcgaaatcgatggaaaaactgtccagcggattccgtatcaaccgcgcaggcgacgacgccgccggttggcgatctccgaaaagatgagaggccaagtcagaggcttgtcaatggcttccaaaaactcctcagacaccatatcattaatacagaccgctgaaggcgccctcgccgaaacgcactccatcctccagaggatgcgcgaactgtcagtccaatcggccaacgacacaaacaccgataaagaccgcgaagaactccaagccgaagtcagacagctgaaagccgaaatcgaccgcatcggcaataccacagagttcaacacgaagaaactgctcgaaggcagcgccacaggcgtccgcgacgagatcgtcggcacactgcgcgtgaacaacaacagcagcgtggtgatcgacgccaataaagagaagggaatggcggccagcatcagcaacgataaaagctgggcgtttgacggagcgtacatgctcgtgaaggtaaaccagacacacgacgccgaaggcaagaaagtgtttaaggcggaagactacaatctggtcgggccggacgggaacgttttcaagtttaagacctatacgccggataccaaggtgctggcgaatgggttggaggctaatacgatagttgccgagggcggggagataaagaatattgccagctctgccgatgattttgccactcagggcataggcgcgttgcttatcggcgaaaagcttacggagaaagagcttgcggtggtgggcgaagacagcattttgaccgccggttcaagctttacactcgcggctgctgataccgccgggattgatcttgacacccccaccggcgctacgaagtaa

SEQ ID NO: 69476 - protein, 323 aa, Unknown
  Obtained from environmental sample
  DOMAIN (60)...(181): Bacterial flagellin N-terminus
  misc_feature (1)..(323): Xaa is any amino acid
MGPLAPFPPIQGGLYAYQPQLNRHQHPPPTGYQRARRLEIDGKTVQRIPYQPRRRRRRRLAISEKMRGQVRGLSMASKNSSDTISLIQTAEGALAETHSILQRMRELSVQSANDTNTDKDREELQAEVRQLKAEIDRIGNTTEFNTKKLLEGSATGVRDEIVGTLRVNNNSSVVIDANKEKGMAASISNDKSWAFDGAYMLVKVNQTHDAEGKKVFKAEDYNLVGPDGNVFKFKTYTPDTKVLANGLEANTIVAEGGEIKNIASSADDFATQGIGALLIGEKLTEKELAVVGEDSILTAGSSFTLAAADTAGIDLDTPTGATK

SEQ ID NO: 69477 - DNA, 489 bp, Unknown
  Obtained from environmental sample
  misc_feature (1)..(489): n is a, c, g, or t
ttgccttcggcgtcgtgtgtctggtttaccttcacgagcatgtacgctccgtcaaacgcccagcttttatcgttgctgatgctggccgccattcccttctctttattggcgtcgatcaccacgctgctgttgttgttcacgcgcagtgtgccgacgatctcgtcgcggacgcctgtggcgctgccttcgagcagtttcttcgtgttgaactctgtggtattgccgatgcggtcgatttcggctttcagctgtctgacttcggcttggagttcttcgcggtctttatcggtgtttgtgtcgttggccgattggactgacagttcgcgcatcctctggaggatggagtgcgtttcggcgagggcgccttcagcggtctgtattaatgatatggtgtctgaggagtttttggaagccattgacaagcctctgacttggcctctcatcttttcggagatcgccaaccggcggcgtcgtcgcctgcgcggttga

SEQ ID NO: 69478 - protein, 162 aa, Unknown
  Obtained from environmental sample
  SIGNAL (1)...(20)
  misc_feature (1)..(162): Xaa is any amino acid
MPSASCVWFTFTSMYAPSNAQLLSLLMLAAIPFSLLASITTLLLLFTRSVPTISSRTPVALPSSSFFVLNSVVLPMRSISAFSCLTSAWSSSRSLSVFVSLADWTDSSRILWRMECVSARAPSAVCINDMVSEEFLEAIDKPLTWPLIFSEIANRRRRRLRG

SEQ ID NO: 69479 - DNA, 1941 bp, Unknown
  Obtained from environmental sample
  misc_feature (1)..(1941): n is a, c, g, or t
atggccgagaaactgttagagggcagcgccactggtgtcagggacgagatcgtgggtaatatgcgccttaacaataacagcagtgttgtgatcgacgccactaaggagaaggggatgaacgccagcatcgggaacgataagagctgggcgtttgacggggcttatatgttgataaaggtcaaccaaacgcctgacgctgaggggaataggatatttaaggctgaagactataacctcattgggccggacgggaacgttttcaagtttaagacatacacgccggataccaagatcaagtcttcagggttggaagcggggacgattattgcagagggtggggaaacgttgcacctgacgaatgctacggcgggaggcgcaataaagggttacactaactggcccaaagatgccagtaataatccgcttccttcggtagtgataggtgcggagttaaccgaaaacgagttgacatcggtggagggcggaagtgttttggttgccggttctaattttacgttacgcactgcgggtagcgctgtaactatcgacaattcgatgacaaagaatgcgcccggaataacaactattactctaggagccggtgatcggatagagttgacggttgctaccggcagtacgcctgccatagttgaggtcggtcagagtatcaccttagacaacggcacggtgctcaagaataacggtagcggtaatgtaagtatagagaacggcagtttaacgcttggtggtagcggtgatgctttggattctacctctagttccggaaacgtcaaagatttcactatcgcagcccaaagtacattgggtgacgattctaaagtcaaggtaatcgaccttaacctcgtgttggcctccaacctgttagtcgattccggtgcgatcagcacgaacgttaccataggcaacagcaccaaaataactttcggcgaggtcagccatatcgagacgggcagcgtctttgccaaaggcacctacatcgacacagttggcactgccgattggagtctgaagatagaggtaaaaggtaaggaagttgaagtcaagtgggacgctggcgcaaaagttctcacggtgggcggcgagatggtcgcggccggcaagagcataacgcttgaagacggtactgttttaacgcacaaagcgactcttggggcaccgactaccgccaccggagatatgttcatacagctgggcagcataaaaacggctgaggtcatcacgagcagttccggcctcggggcgcaattgaacaatttccttgccgccaaggacagcacgctggtcgccggctcaagactaggcagtatattgaactcgaccgtcaaactgatggccggtaccgtaattacggaaggcgacgccgacaagactttctccggtagcgtaactttcgccgccggcggcaagaacttccagttctccgccaacaccggcaacgctctggcgactcgttactacgacttgaaggtgcaagacagcatgacattcatcttctcgaagtacgatcccccgtcatcgcagcttaacgactcgctgatgtcgcaaatcggcgccaatagcggccaaacaacgttcctgtccatcaacgacatgcgttgcaaggctctcggtgtagccgacgtggacatcagcactaagtggggcgcggcgacggccatagagacggtgaacaacgctctccaaaaggtttctcaccagcgtagcttgatgggcgccctgcagaaccgcttggagcacacgataaagaacttggacaccgcggcggagaacttgcaagccgccgagagccgcatccgcgacgtggatatggcgaaggaagtgatggagttcacgaggacgaacatcctgcagcaggccgcgcaggcgatgttggcccaggcgaaccagcagccgcagagcgtgttgcagctgttgaggtag

SEQ ID NO: 69480 - protein, 646 aa, Unknown
  Obtained from environmental sample
  DOMAIN (553)...(624): Bacterial flagellin C-terminus
  misc_feature (1)..(646): Xaa is any amino acid
MAEKLLEGSATGVRDEIVGNMRLNNNSSVVIDATKEKGMNASIGNDKSWAFDGAYMLIKVNQTPDAEGNRIFKAEDYNLIGPDGNVFKFKTYTPDTKIKSSGLEAGTIIAEGGETLHLTNATAGGAIKGYTNWPKDASNNPLPSVVIGAELTENELTSVEGGSVLVAGSNFTLRTAGSAVTIDNSMTKNAPGITTITLGAGDRIELTVATGSTPAIVEVGQSITLDNGTVLKNNGSGNVSIENGSLTLGGSGDALDSTSSSGNVKDFTIAAQSTLGDDSKVKVIDLNLVLASNLLVDSGAISTNVTIGNSTKITFGEVSHIETGSVFAKGTYIDTVGTADWSLKIEVKGKEVEVKWDAGAKVLTVGGEMVAAGKSITLEDGTVLTHKATLGAPTTATGDMFIQLGSIKTAEVITSSSGLGAQLNNFLAAKDSTLVAGSRLGSILNSTVKLMAGTVITEGDADKTFSGSVTFAAGGKNFQFSANTGNALATRYYDLKVQDSMTFIFSKYDPPSSQLNDSLMSQIGANSGQTTFLSINDMRCKALGVADVDISTKWGAATAIETVNNALQKVSHQRSLMGALQNRLEHTIKNLDTAAENLQAAESRIRDVDMAKEVMEFTRTNILQQAAQAMLAQANQQPQSVLQLLR

SEQ ID NO: 69481 - DNA, 414 bp, Unknown
  Obtained from environmental sample
  misc_feature (1)..(414): n is a, c, g, or t
gtggagcaaatgaggctggatatgcatagcagacaggaaatccttaaagcaaattttaaggattatcaaaaggcgtcgaagaaagggcgcaaggaattgttggacaggcttgtgcctgtaacaggcttgaacaggagctatcttgcgacggcgcttggcaactatggcaacaaggagggcatggagaagccgcctgcaaaaggcaagaggaaagtgcgccctgcggggaaacgcgggggacgccctgtcaaatacggggaagagttcgtaaaggttctgaccaggatttgggacgattacgggaaaccttgcgggaagcttttggttccgatgattcgtagcattatagattttctggaaggatccgcattgcctaataatttttctagtcgaaatgggacggctgcccaataa

SEQ ID NO: 69482 - protein, 137 aa, Unknown
  Obtained from environmental sample
  misc_feature (1)..(137): Xaa is any amino acid
MEQMRLDMHSRQEILKANFKDYQKASKKGRKELLDRLVPVTGLNRSYLATALGNYGNKEGMEKPPAKGKRKVRPAGKRGGRPVKYGEEFVKVLTRIWDDYGKPCGKLLVPMIRSIIDFLEGSALPNNFSSRNGTAAQ

SEQ ID NO: 69483 - DNA, 1092 bp, Unknown
  Obtained from environmental sample
  misc_feature (1)..(1092): n is a, c, g, or t
atggagaagccgcctgcaaaaggcaggaggaagccgcgccctgcggggaaacgcgggggacgccctgtcaaatacggggaagacttcgtaaaagttttaagcaggatttgggacgagtacggcaaaccatgcgggaagcttttggtcccgatggttcgcggcatgatggattttctggcggaatcgaagaatcctgactacggaataactttagaaaccagaaggctgcttttggaagcgagcgcggcggaagcggacatactgctgaagcctgcgcggaaggcgcttgaaatcaagggcataagcacgacgcgggccgttcaaacgcctttgagaagccaaattcctgtacggacgcactttgaccgggacaaggttaagcccggaaacttcgcgtttgacacggtcgcgcactgcggaggctcttcaagcgggcagttttgcaaaaccttgacaggaacagacgtatattccgggtggtatgaaggacgcgccctgctaaacgcggctaactgctgggtgaaggccgccatttccgacatagatgccacccttcctttcccgatgacaggcgctcattacgacaacggcatggaattcataaacgaaccgctgcttagctggtgcattgatcggcacattgaggccactcgtaccaggccgtaccacaaaaacgataactgctacgcggagcagaaaaactacgacgcggtcaggaaaaccgtcggctacttccggtttgacactgccgaagagtgcgccgccctggctgaagtgtacctctggctttgccctttgtataattactggatgccttcgtttcgcctaacggacaaggaaaaacaggaggacggccgctataagaaggtctatgaaaaagagcctaaaacaccgtacgaacggcttatggaatcgcctgatgtatcgtcggagtgcaaaacggaactggaacgcaggagggccgggcaaaaccctgttgagctgaaccggaaattgaatgaggctgtcgggctgctcttgaaaataaaccaagaaaaattgtacgttaaaaaagcctcctgtcagggggatggtcaggcacccgctgcctga

SEQ ID NO: 69484 - protein, 363 aa, Unknown
  Obtained from environmental sample
  DOMAIN (123)...(303): Integrase core domain
  misc_feature (1)..(363): Xaa is any amino acid
MEKPPAKGRRKPRPAGKRGGRPVKYGEDFVKVLSRIWDEYGKPCGKLLVPMVRGMMDFLAESKNPDYGITLETRRLLLEASAAEADILLKPARKALEIKGISTTRAVQTPLRSQIPVRTHFDRDKVKPGNFAFDTVAHCGGSSSGQFCKTLTGTDVYSGWYEGRALLNAANCWVKAAISDIDATLPFPMTGAHYDNGMEFINEPLLSWCIDRHIEATRTRPYHKNDNCYAEQKNYDAVRKTVGYFRFDTAEECAALAEVYLWLCPLYNYWMPSFRLTDKEKQEDGRYKKVYEKEPKTPYERLMESPDVSSECKTELERRRAGQNPVELNRKLNEAVGLLLKINQEKLYVKKASCQGDGQAPAA

SEQ ID NO: 69485 - DNA, 876 bp, Unknown
  Obtained from environmental sample
  misc_feature (1)..(876): n is a, c, g, or t
gtggtagtaccctgccagactcgtgatgaaagtttccgccgccactcccgaaaaaaggacggcatccagaagggaaagggaaagggaaaaatccccggcggcacaggcctcggcaaatttattgagctcgtccagccccaccaggccaagcttttccctgataagctccatgcggatatgagcgccggaaaaggacgcgacttgatcaaaaagggtgtaggcgtccctgcagctcccggtagactccctggctatccagagaagggcatcgtcttctgcctctacgccgatttctttgcacgcctcgcggagcaatgtaataatggtatcaacagaaaccaggcggaagttaaactgttggcagcggctcctgattgtggcggggactttctgcagttcagttgtggcaaagataaaaacaacgtttgggggcggctcttcaatcgttttcagaagggcgttaaaagcgctattggacagcatgtggacttcgtcaatgatgtataccttgtagcggcctgtagcgggagggaaaagcacctcttccttaatctggcggacatcgtttacgccggtattggatgccccgtcaatttcaagcacgtccatactcgctccccgcagaacttccatgcactgggggcagactccgcatggctgcgaaggagtacctttctcgcagcgaagcgccctcgccagaatgcgggcggcgctggttttgccgcagccgcgcggtccggaaaaaaggtaagcatgggcaatctgccctttttcaagggagttcttgagagtggcggttacaaactcctgtcccgccagttcgtcaaaagttttcggccgccgcctcgtagcggttacttcgtagggcattgctaa

SEQ ID NO: 69486 - protein, 291 aa, Unknown
  Obtained from environmental sample
  misc_feature (1)..(291): Xaa is any amino acid
MVVPCQTRDESFRRHSRKKDGIQKGKGKGKIPGGTGLGKFIELVQPHQAKLFPDKLHADMSAGKGRDLIKKGVGVPAAPGRLPGYPEKGIVFCLYADFFARLAEQCNNGINRNQAEVKLLAAAPDCGGDFLQFSCGKDKNNVWGRLFNRFQKGVKSAIGQHVDFVNDVYLVAACSGREKHLFLNLADIVYAGIGCPVNFKHVHTRSPQNFHALGADSAWLRRSTFLAAKRPRQNAGGAGFAAAARSGKKVSMGNLPFFKGVLESGGYKLLSRQFVKSFRPPPRSGYFVGHC

SEQ ID NO: 69487 - DNA, 1371 bp, Unknown
  Obtained from environmental sample
  misc_feature (1)..(1371): n is a, c, g, or t
atgccctacgaagtaaccgctacgaggcggcggccgaaaacttttgacgaactggcgggacaggagtttgtaaccgccactctcaagaactcccttgaaaaagggcagattgcccatgcttaccttttttccggaccgcgcggctgcggcaaaaccagcgccgcccgcattctggcgagggcgcttcgctgcgagaaaggtactccttcgcagccatgcggagtctgcccccagtgcatggaagttctgcggggagcgagtatggacgtgcttgaaattgacggggcatccaataccggcgtaaacgatgtccgccagattaaggaagaggtgcttttccctcccgctacaggccgctacaaggtatacatcattgacgaagtccacatgctgtccaatagcgcttttaacgcccttctgaaaacgattgaagagccgcccccaaacgttgtttttatctttgccacaactgaactgcagaaagtccccgccacaatcaggagccgctgccaacagtttaacttccgcctggtttctgttgataccattattacattgctccgcgaggcgtgcaaagaaatcggcgtagaggcagaagacgatgcccttctctggatagccagggagtctaccgggagctgcagggacgcctacaccctttttgatcaagtcgcgtccttttccggcgctcatatccgcatggagcttatcagggaaaagcttggcctggtggggctggacgagctcaataaatttgccgaggcctgtgccgccggggatttttccctttccctttcccttctggatgccgtccttttttcgggagtggcggcggaaactttcatcacgagtctggcagggtactaccacagcctgcttcttttaaaagccggcgttacaagggattcggttttgggctatgccccggacaggttttcccggctggcgcttgataagtacgacacgatccgccttgaacgggcaggggagcttttgtacgaactttaccgggacattcgctattcagtgtctccccgctttgagcttgaaaccctggtctcaaaactttgctggcttgataaatggatctcccccgcagagctaggcgacgctgtttctaaagtgcaagccctggtgaataaccccatggccgcgccctcgcctgaaaagcaatcgccttcgttaacggaggaatttaagcgccacatggcaagcaggggaaatccaaaagagagcccaggaggaatttctcctgcgcctactagcgtcccccatgctaataccccacaggatccggctgtcaggaatgttctgtcggttttcacggaaccattgtggaggaaagccgcggatgaacatcaacccctttga

SEQ ID NO: 69488 - protein, 456 aa, Unknown
  Obtained from environmental sample
  DOMAIN (40)...(230): ATPase family associated with various cellular activities (AAA)
  misc_feature (1)..(456): Xaa is any amino acid
MPYEVTATRRRPKTFDELAGQEFVTATLKNSLEKGQIAHAYLFSGPRGCGKTSAARILARALRCEKGTPSQPCGVCPQCMEVLRGASMDVLEIDGASNTGVNDVRQIKEEVLFPPATGRYKVYIIDEVHMLSNSAFNALLKTIEEPPPNVVFIFATTELQKVPATIRSRCQQFNFRLVSVDTIITLLREACKEIGVEAEDDALLWIARESTGSCRDAYTLFDQVASFSGAHIRMELIREKLGLVGLDELNKFAEACAAGDFSLSLSLLDAVLFSGVAAETFITSLAGYYHSLLLLKAGVTRDSVLGYAPDRFSRLALDKYDTIRLERAGELLYELYRDIRYSVSPRFELETLVSKLCWLDKWISPAELGDAVSKVQALVNNPMAAPSPEKQSPSLTEEFKRHMASRGNPKESPGGISPAPTSVPHANTPQDPAVRNVLSVFTEPLWRKAADEHQPL

SEQ ID NO: 69489 - DNA, 384 bp, Unknown
  Obtained from environmental sample
  misc_feature (1)..(384): n is a, c, g, or t
atgctaataccccacaggatccggctgtcaggaatgttctgtcggttttcacggaaccattgtggaggaaagccgcggatgaacatcaacccctttgacattttaaagaacgcccacaaaattcaggagcagatgggggcttttcaggaaaaacttgaggaaataaaaattaccggaaccgccggtggcggaatggcagaaatagatatgaacgggaaaatggaagtgcttggcgtgaggatagcccaggaagcgattgaagaccgggaaatgcttcaggatttaataacagccgcgtttaacaacgctatggaaaagattcgggaagaaattaaccgcgaaatgggtggaatgatccccggcggtttaaatggtattatatga

SEQ ID NO: 69490 - protein, 127 aa, Unknown
  Obtained from environmental sample
  DOMAIN (35)...(126): Uncharacterised BCR, YbaB family COG0718
  misc_feature (1)..(127): Xaa is any amino acid
MLIPHRIRLSGMFCRFSRNHCGGKPRMNINPFDILKNAHKIQEQMGAFQEKLEEIKITGTAGGGMAEIDMNGKMEVLGVRIAQEAIEDREMLQDLITAAFNNAMEKIREEINREMGGMIPGGLNGII

SEQ ID NO: 69491 - DNA, 612 bp, Unknown
  Obtained from environmental sample
  misc_feature (1)..(612): n is a, c, g, or t
atgactgaaggagccaacgctcttgacaggctggttgcgctcttttccaggctccccgggattgggaagaaaagcgcaagccgccttgtgtaccacattcttgactccgatccgtcttacgccagggcccttgccggagatctccagggccttcatgacgcgattaagcgatgctcgcgctgtggcagttttaccgaaagcgatccctgccccatctgcaccgacaccgcccgcgatcgcagcctgctttgcgtagtggaacgcgcccaggatatcagggtcattgaggaatccaaggagttccgcggcctctttcacgtcctgggcgggctcatagcccctctggaaggggttaatcccggcgaccttgccatagcgcagcttcttggccgtgtcagggacgagggcgtcatagaggtaattctggcccttaacccgacaatagaaggcgacactaccgccctttacatccagaaatttctgaaagaaaaactgccttccggtcagctcgaaataagccgccttgcttcgggcctccctgtcggcggcgaccttgaatacgccgacaggcttaccttgtcccgaagcctgcggggcaggataagaatgtaa

SEQ ID NO: 69492 - protein, 203 aa, Unknown
  Obtained from environmental sample
  DOMAIN (81)...(178): Toprim domain
  misc_feature (1)..(203): Xaa is any amino acid
MTEGANALDRLVALFSRLPGIGKKSASRLVYHILDSDPSYARALAGDLQGLHDAIKRCSRCGSFTESDPCPICTDTARDRSLLCVVERAQDIRVIEESKEFRGLFHVLGGLIAPLEGVNPGDLAIAQLLGRVRDEGVIEVILALNPTIEGDTTALYIQKFLKEKLPSGQLEISRLASGLPVGGDLEYADRLTLSRSLRGRIRM

SEQ ID NO: 69493 - DNA, 477 bp, Unknown
  Obtained from environmental sample
  misc_feature (1)..(477): n is a, c, g, or t
atgaaaagacaggagattattatggggattttattaaacgaagtttttgacgagcgatccatactattaaattttgagagcaaaaccaaagagggaatttttaaagaattggcagaagtattaatcgcggttcaccccgaatgtgatcgaacttcaatgctagcggcattatgggaacgtgaaaacaaactaaatacagggattgtttccggtgtcgcgtttcctcacacaatatacggaggaatcaataacatagctggagcaatcggcatatcgcaaacaggaattgactacggcgctctcgataacaaacctgtttatgttgtgtttatgctggcgataagcgataaggcaatggaaaaccatttgcgaattttaaaccagcttttcacacttgcccaatccgaggcaatcgcgataatgaaaaaagcgcaaaatgcagagaccgtgaaagatattctgtcccgctttaaatag

SEQ ID NO: 69494 - protein, 158 aa, Unknown
  Obtained from environmental sample
  DOMAIN (14)...(157): Phosphoenolpyruvate-dependent sugar phosphotransferase system, EIIA 2
  misc_feature (1)..(158): Xaa is any amino acid
MKRQEIIMGILLNEVFDERSILLNFESKTKEGIFKELAEVLIAVHPECDRTSMLAALWERENKLNTGIVSGVAFPHTIYGGINNIAGAIGISQTGIDYGALDNKPVYVVFMLAISDKAMENHLRILNQLFTLAQSEAIAIMKKAQNAETVKDILSRFK

SEQ ID NO: 69495 - DNA, 759 bp, Unknown
  Obtained from environmental sample
  misc_feature (1)..(759): n is a, c, g, or t
atgggtaactacaaactggaaaaaataatcgccgtacggacggtgaagacgatctaccgtgacggggacaaggtaataaagctcttgaacgaggattatcccgcgccggacgtgcttgccgaggcgctcaaccttgtcgtggtagaacagacctctctcaaagtcccccggctggtggaggtaacgaaaatcaacggcaagtgggctatcgtttgggaatacgttgagggaaccagccttgaccggttaatggaaaaaaacaaggacaaggaacagcagtaccttgaacgctttgttgacattcagattgatatgcaccgttacagcgcgacgaggcttcctctgcttgccgaaaaaatggatcgtaaaataaaagcctccggtcttgacgccacaacccgctatgagcttttgggaaggctgtcaggtatgcccaagcacaccaaactctgccacggcgactttaaccccagcaacgtgattatcaacgataaggacgaggcgtacatcatcgactggtcccacgccgcccagggtaacgcctcggcggacgcggcgcagacctacctgttgttctggcttgcgggtaacatcaccctggcggaaaagtaccttgcgctgttctgtaaaaagagcgacacggcgaaacagtacgttgaaaagtggctttccattgtagcggcttcacggcttccaaaggcaaagccggaagaaagagaatttctactgcattgggccaatgtagtggaatacgaatag

SEQ ID NO: 69496 - protein, 252 aa, Unknown
  Obtained from environmental sample
  DOMAIN (5)...(218): Phosphotransferase enzyme family
  misc_feature (1)..(252): Xaa is any amino acid
MGNYKLEKIIAVRTVKTIYRDGDKVIKLLNEDYPAPDVLAEALNLVVVEQTSLKVPRLVEVTKINGKWAIVWEYVEGTSLDRLMEKNKDKEQQYLERFVDIQIDMHRYSATRLPLLAEKMDRKIKASGLDATTRYELLGRLSGMPKHTKLCHGDFNPSNVIINDKDEAYIIDWSHAAQGNASADAAQTYLLFWLAGNITLAEKYLALFCKKSDTAKQYVEKWLSIVAASRLPKAKPEEREFLLHWANVVEYE

SEQ ID NO: 69497 - DNA, 1512 bp, Unknown
  Obtained from environmental sample
  misc_feature (1)..(1512): n is a, c, g, or t
atgagcgccgcgttgggctcagcaaaagcgcctgtttacacggagcttgccgaatgtcatgactgctacaagtgcattcgaaaatgcccggtaaaatctatcaaggtggcgaaggggcaggcgagcattctgtttgaccgctgtatttactgcgggcgctgcgtgatgaattgtcctgcccatgccaagcattaccggaacgatattgacaaagtgaagctcctgttggcgaacgggcagaaagtggcggtttccgccgcaccctcgtttgtttctgaatttacagaatggaaaccgcaagagcttatcgccgcgcttaaaaagctggggtttgccatcgtgtcggaaaccgccctgggcgcggattttcttgccgcccgcagcgcccgtgatttgatgtcgggcaatacaccgtgtgcatctccgggcaaacaacccttgatgatttcctcggcctgtcctgtcattgtcgactatatcaagctctacaatccccaccttgcgccttatatatcttctcacgcctcaccgcttcttacccacgcccggtttatccgctcacgttacggagctgaaactgcggtcgtgtttatcgggccgtgcttcgccaagaaacacgaggccgacatttacaatgaagagattgacgccgccattaccttcgaggaactgcgggaatggctgcacaaagagcgcttaacgcccaagacaatttcgctttccccttccgccctggcggactatgcgtttgagccccgtcggagcgcgaagggagctttcttccctgtcgaggggggggaaataacggctttttccgcatacatcgccgaagccgcggcggaagagggaaagcggatacaaaccctctcggcatccggctttcacgctgtaggcgatctgttgaagggatttgatcccgccacgctggaagcgccgctgtttctggaactgttggcctgtcccggcggctgcctaaacggccccggaatgtccggcatgtccccgggcgtttcccgccatacgcgccttttggactatgtctgctccgccgataataccctcgacggcgaagcgctctccctcacgccacagattgaagccggttatcctctggccccactgccggacgctgtacatacggaacaggaaatcaccgaagcgcttatgctagtgggaaaacacagccttgccgaccggctcaactgctcgagctgcggttacgatacctgccgggattttgccatcgccctgctggacggaagggcggaaaaaaccatgtgcgcttcgcatatgcgggagcttgccaacaaaacagcaaacggccttatcaaggcgattccttccggcgttgtaattgttgaccgggacctgaaaatcatcgatagcaatgagcagtttgcccgtcttatgggaaacgaaactgaagaactgtttgccatgatgccgggggctggaaggggcggatctcacgaaaatatcgcctttcccgcagtatttccagacaataattga

SEQ ID NO: 69498 - protein, 503 aa, Unknown
  Obtained from environmental sample
  DOMAIN (396)...(430): Putative Fe-S cluster
  misc_feature (1)..(503): Xaa is any amino acid
MSAALGSAKAPVYTELAECHDCYKCIRKCPVKSIKVAKGQASILFDRCIYCGRCVMNCPAHAKHYRNDIDKVKLLLANGQKVAVSAAPSFVSEFTEWKPQELIAALKKLGFAIVSETALGADFLAARSARDLMSGNTPCASPGKQPLMISSACPVIVDYIKLYNPHLAPYISSHASPLLTHARFIRSRYGAETAVVFIGPCFAKKHEADIYNEEIDAAITFEELREWLHKERLTPKTISLSPSALADYAFEPRRSAKGAFFPVEGGEITAFSAYIAEAAAEEGKRIQTLSASGFHAVGDLLKGFDPATLEAPLFLELLACPGGCLNGPGMSGMSPGVSRHTRLLDYVCSADNTLDGEALSLTPQIEAGYPLAPLPDAVHTEQEITEALMLVGKHSLADRLNCSSCGYDTCRDFAIALLDGRAEKTMCASHMRELANKTANGLIKAIPSGVVIVDRDLKIIDSNEQFARLMGNETEELFAMMPGAGRGGSHENIAFPAVFPDNN

SEQ ID NO: 69499 - DNA, 1263 bp, Unknown
  Obtained from environmental sample
  misc_feature (1)..(1263): n is a, c, g, or t
atgcctgaaagcattgaatacctgcctggcggcgcctccggcgattcacctaattcgcttacccaaaacactttcatcgaagtagatcatttccagctttgcaaatacaaccagaacgcgccaggggacgtgtttctttcgcagaaaaaccccagcgacggacgggtgatcaccgccctttccgacggcctcggctccgggataaaggctggagtgcttgccacgctcaccgcgactatggccgccaaattcatttcgtgtaacattcccatcaagcgggcaacagaaatcatcatgaattccctgccggtatgcaaagagcgggggatcagctacgcgacattcacgctggtcgatattgcccctaacgcttcggtaagaattatggagtatgacaacccgccctacacgtttataagaaaaggaacattacttgaaccctcgaagagagaaaaccctttcgagcggcaggacaaatcgaccgggcccaaaaaagataccagcgtgctgtattcgcactttaaggcccaaagcggcgaccgactgatttttttctccgacggcgtaagtcaggcgggcatgggaaccaaaccccaccccttcggctggacaaccgccaaagcccgtgagtatgccctcgagagcgtccggaaaaatccggaaatcagcgcccgtgaattggcccacaccatagtccagaaggcttcgcaattcgatcttttaaagccgaaagacgatatctcctgcggcgttatttatttccgggagccgagggatatgctgatactaaccggtccgccggttcaccccgaaagcgacaaggagatcgcgaatatttttttatcgttcaacggaaagaaagtggtttctggcggcaccaccgccacaattatcagccgggagcttaaccggcaaataaaagtgaacatgaaaagcttcgataaaaccataccgccatggtcggagatggaaggggcggacatggttaccgagggcatcatcaccctgggggcggttcaggcgatgctggagaaccgcagcgaactggaggcgcacgccggacgccgggatgccgcttcccgcatgatcgacctcctcctggacagcgaccggatcacatttatcgtaggcaccaagatcaacgaagcccatcaggatcctactatgcctgtagagctggagatcaggcgcaacgtgatcaaacgcctcgcgtccctgttgaaagaaaaatacctcaaagaggtacagatacgttatttttag

SEQ ID NO: 69500 - protein, 420 aa, Unknown
  Obtained from environmental sample
  DOMAIN (52)...(255): Stage II sporulation protein E (SpoIIE)
  misc_feature (1)..(420): Xaa is any amino acid
MPESIEYLPGGASGDSPNSLTQNTFIEVDHFQLCKYNQNAPGDVFLSQKNPSDGRVITALSDGLGSGIKAGVLATLTATMAAKFISCNIPIKRATEIIMNSLPVCKERGISYATFTLVDIAPNASVRIMEYDNPPYTFIRKGTLLEPSKRENPFERQDKSTGPKKDTSVLYSHFKAQSGDRLIFFSDGVSQAGMGTKPHPFGWTTAKAREYALESVRKNPEISARELAHTIVQKASQFDLLKPKDDISCGVIYFREPRDMLILTGPPVHPESDKEIANIFLSFNGKKVVSGGTTATIISRELNRQIKVNMKSFDKTIPPWSEMEGADMVTEGIITLGAVQAMLENRSELEAHAGRRDAASRMIDLLLDSDRITFIVGTKINEAHQDPTMPVELEIRRNVIKRLASLLKEKYLKEVQIRYF

SEQ ID NO: 69501 - DNA, 1470 bp, Unknown
  Obtained from environmental sample
  misc_feature (1)..(1470): n is a, c, g, or t
atgcttaatatcaataacaatgcgtcccgacttaaacgggaaatactggtgcgtattgcgcgattgcagtttgaggggaaattggccgaaggcgttcataacatccccagggagcttgcccccacaggcggcaatccgatccgttgctgtatataccatgaccgtgaaatcttaaggcatagagtgatcgcccggctgggatgcagccttgaagactataacgatgaaaagcggctcgctgaatatgtgcaggaagctctgaaccgcgaaaaaccaacctggcccatacataccgtacttgatttggcgtgtaacgcctgcgtgcgttcccattatatggtaaccaacgcctgtcttgcctgtgttgcccgcccctgcctggtgaactgcggcaggaaggcgattgaggttaaagaaggccgagcgcgtattgacagcgaaaaatgcgtcagctgcggcctgtgcatgcaaaattgcccctatcacgcgatcataaaaattcccgtgccctgtgaggaagcctgtccggtaggagccatttccaaaaacgaaagcggcagggagcgcattgattatcacaagtgtatcaattgcggcaactgtatgcgcgaatgtccctttggcgcgatgatggataagagccaactggttgacgtgatcaagcatattatgaataaaaagaacgtggtcgccatgtacgcgcccgccgtagcggcccaattccgggttgagcccggaaagctagagggtgcgatacttgcggcgggcttctcacacgtgattgaagtcgccctgggcgcggatattacgacggacaaggaggctgcggaattcctggagcgtatggaaaaaggcgaaaagatgatgaccacttcctgctgtccggcgtttgtgcgggccgtccgccgccatgtaccggaacttgccgactgtatttccggaacccgcacccccatgagctacaccgcagaaatcgccaaaaaagaaaaccccgactgtataaccgttttcattggcccctgccttgccaaacggcgggagggcatggacgacgagtttgtggattacgttgtttccgttgaggaactgggcgcgttgtttgtggccaaggagatcgatgtcgctcaggcggccccgacgccggggaacaaactgcccacctcgtttgcgaggaatttcgccaaatccggcggcgtagcccaggctgtaagggcgaggctcaaagacccttcgaagctgagagaaaccgtcattgacggccttgataaagagggaatgaaacgcctcgccgaattcggcaagataaacacaggcaaacttccctgcacggaaaacacgcccaatcttatcgaagtgatgtcatgccagggcggctgtatcgccgggccttcggtagttaccaatccaaaggtcgccctatcgcagttgacaaaatacgcggaatttggcgcaaagacaaacgacgggtaa

SEQ ID NO: 69502 - protein, 489 aa, Unknown
  Obtained from environmental sample
  DOMAIN (217)...(463): Iron only hydrogenase large subunit, C-terminal domain
  misc_feature (1)..(489): Xaa is any amino acid
MLNINNNASRLKREILVRIARLQFEGKLAEGVHNIPRELAPTGGNPIRCCIYHDREILRHRVIARLGCSLEDYNDEKRLAEYVQEALNREKPTWPIHTVLDLACNACVRSHYMVTNACLACVARPCLVNCGRKAIEVKEGRARIDSEKCVSCGLCMQNCPYHAIIKIPVPCEEACPVGAISKNESGRERIDYHKCINCGNCMRECPFGAMMDKSQLVDVIKHIMNKKNVVAMYAPAVAAQFRVEPGKLEGAILAAGFSHVIEVALGADITTDKEAAEFLERMEKGEKMMTTSCCPAFVRAVRRHVPELADCISGTRTPMSYTAEIAKKENPDCITVFIGPCLAKRREGMDDEFVDYVVSVEELGALFVAKEIDVAQAAPTPGNKLPTSFARNFAKSGGVAQAVRARLKDPSKLRETVIDGLDKEGMKRLAEFGKINTGKLPCTENTPNLIEVMSCQGGCIAGPSVVTNPKVALSQLTKYAEFGAKTNDG

SEQ ID NO: 69503 - DNA, 318 bp, Unknown
  Obtained from environmental sample
  misc_feature (1)..(318): n is a, c, g, or t
ttgaggcggcaagtttcaatccacgcacccgcgaagggtgcgaccgcgagaaacaagcggcggcgatgttatgccttgcagtttcaatccacgcacccgcgaagggtgcgactacccattttcatcgtgtttgcttcaatatatttgtttcaatccacgcacccgcgaagggtgcgactgttcggttttaacgccctaacgcctaaagaccagtttcaatccacgcacccgcgaagggtgcgactgggaaaaacaaagaaggcggtagtcgccgcggtgtttcaatccacgcacccgcgaagggtgcgactatcgtag

SEQ ID NO: 69504 - protein, 105 aa, Unknown
  Obtained from environmental sample
  misc_feature (1)..(105): Xaa is any amino acid
MRRQVSIHAPAKGATARNKRRRCYALQFQSTHPRRVRLPIFIVFASIYLFQSTHPRRVRLFGFNALTPKDQFQSTHPRRVRLGKTKKAVVAAVFQSTHPRRVRLS

SEQ ID NO: 69505 - DNA, 414 bp, Unknown
  Obtained from environmental sample
  misc_feature (1)..(414): n is a, c, g, or t
ttggcagtttcaatccgcgcacccgtgatgggtgcgacactggataaacctaacatatattgcgcattagtgggtttcaatccacgcacccgtgatgggtgcgactcaaccatagctccaatgcgcggtgaaacattttgccgtttcaatccacgcacccgtgatgggtgcgacgataaggccaactggatcagccggagaccgaactatgtttcaatccacgcacccgtgatgggtgcgaccaccggaagcatataccgccgcggcggagacggtcaagtttcaatccacgcacccgtgatgggtgcgactgacgatactgtgctattcgggcgcaacaagaaagtttcaatccacgcacccgtgatgggtgcgacccgcaaagcctaccgccgtggtaatcggtgtggataa

SEQ ID NO: 69506 - protein, 137 aa, Unknown
  Obtained from environmental sample
  misc_feature (1)..(137): Xaa is any amino acid
MAVSIRAPVMGATLDKPNIYCALVGFNPRTRDGCDSTIAPMRGETFCRFNPRTRDGCDDKANWISRRPNYVSIHAPVMGATTGSIYRRGGDGQVSIHAPVMGATDDTVLFGRNKKVSIHAPVMGATRKAYRRGNRCG

SEQ ID NO: 69507 - DNA, 558 bp, Unknown
  Obtained from environmental sample
  misc_feature (1)..(558): n is a, c, g, or t
gtgatgggtgcgactgaccggtacacgctgaccgtgccgtatgacgccgtttcaatccacgcacccgtgatgggtgcgaccgaggcctttttgcacaaaaggacgggcactggtgtttcaatccacgcacccgtgatgggtgcgacagcgccaaacccacgaatacactcccaagcgctttgtttcaatccacgcacccgtgatgggtgcgaccaaaatttcatgaacgacttatctctacacggcatggtttcaatccacgcacccgtgatgggtgcgactgatagcctgctccgtcaagtgagcgaattcggggtttcaatccacgcacccgtgatgggtgcgacagtaacaccgggattaactgacccatgtcgcaggtgtttcaatccacgcacccgtgatgggtgcgaccacaaatactctaactcgagaggaggaataagactatgtttcaatccacgcacccgtgatgggtgcgacgttgagatacaagctaccgccaacccggataccgataacgtttcaatccacgcacccgtgatgggtgcgacataa

SEQ ID NO: 69508 - protein, 185 aa, Unknown
  Obtained from environmental sample
  misc_feature (1)..(185): Xaa is any amino acid
MMGATDRYTLTVPYDAVSIHAPVMGATEAFLHKRTGTGVSIHAPVMGATAPNPRIHSQALCFNPRTRDGCDQNFMNDLSLHGMVSIHAPVMGATDSLLRQVSEFGVSIHAPVMGATVTPGLTDPCRRCFNPRTRDGCDHKYSNSRGGIRLCFNPRTRDGCDVEIQATANPDTDNVSIHAPVMGAT

SEQ ID NO: 69509 - DNA, 300 bp, Unknown
  Obtained from environmental sample
  misc_feature (1)..(300): n is a, c, g, or t
atggtcgcacccatcacgggtgcgtggattgaaacccgccaaacccaccatcgtggccggtcgaagccggtcgcacccatcacgggtgcgtggattgaaactcctgaggctgtgccgggcgggaatatcacacagtcgcacccatcacgggtgcgtggattgaaacctcggagaccacaacggcacaaattgcatctatcttcggtcgcacccatcacgggtgcgtggattgaaactatttcagggaactcttccccacattcgtctttatgtcgcacccatcacgggtgcgtggattga

SEQ ID NO: 69510 - protein, 99 aa, Unknown
  Obtained from environmental sample
  misc_feature (1)..(99): Xaa is any amino acid
MVAPITGAWIETRQTHHRGRSKPVAPITGAWIETPEAVPGGNITQSHPSRVRGLKPRRPQRHKLHLSSVAPITGAWIETISGNSSPHSSLCRTHHGCVD

SEQ ID NO: 69511 - DNA, 303 bp, Unknown
  Obtained from environmental sample
  misc_feature (1)..(303): n is a, c, g, or t
gtgcgacataaagacgaatgtggggaagagttccctgaaatagtttcaatccacgcacccgtgatgggtgcgaccgaagatagatgcaatttgtgccgttgtggtctccgaggtttcaatccacgcacccgtgatgggtgcgactgtgtgatattcccgcccggcacagcctcaggagtttcaatccacgcacccgtgatgggtgcgaccggcttcgaccggccacgatggtgggtttggcgggtttcaatccacgcacccgtgatgggtgcgaccattttactggcgggggtggtgaaatga

SEQ ID NO: 69512 - protein, 100 aa, Unknown
  Obtained from environmental sample
  misc_feature (1)..(100): Xaa is any amino acid
MRHKDECGEEFPEIVSIHAPVMGATEDRCNLCRCGLRGFNPRTRDGCDCVIFPPGTASGVSIHAPVMGATGFDRPRWWVWRVSIHAPVMGATILLAGVVK

SEQ ID NO: 69513 - DNA, 510 bp, Unknown
  Obtained from environmental sample
  misc_feature (1)..(510): n is a, c, g, or t
gtgcgtggattgaaacgggtatatctttttgtaatactcttcaagccgttgtcgcacccatcacgggtgcgtggattgaaactatcctacaggccggccttccgtatgtcgatgttgtcgcacccatcacgggtgcgtggattgaaacataagtcattgatttttatagagatacaacaatcagtcgcacccatcacgggtgcgtggattgaaacttatgcgcccattctcgcgtcagcgtatggcgcgtgggtcgcacccatcacgggtgcgtggattgaaacaccgttttgggctgcctcgcgcataagtgcgtacgtcgcacccatcacgggtgcgtggattgaaacgtcttcattttgtaagacgtgtttcacggcggcggtcgcacccatcacgggtgcgtggattgaaacgtggaatcccgctccggacactgtcccgttgccggcgtcgcacccatcacgggtgcgtggattgaaacccgtccgcacctatcaaagactctag

SEQ ID NO: 69514 - protein, 169 aa, Unknown
  Obtained from environmental sample
  misc_feature (1)..(169): Xaa is any amino acid
MRGLKRVYLFVILFKPLSHPSRVRGLKLSYRPAFRMSMLSHPSRVRGLKHKSLIFIEIQQSVAPITGAWIETYAPILASAYGAWVAPITGAWIETPFWAASRISAYVAPITGAWIETSSFCKTCFTAAVAPITGAWIETWNPAPDTVPLPASHPSRVRGLKPVRTYQRL

SEQ ID NO: 69515 - DNA, 306 bp, Unknown
  Obtained from environmental sample
  misc_feature (1)..(306): n is a, c, g, or t
gtgatgggtgcgactagggtggtgtcactcaccccccatcacaacaaaagtttcaatccacgcacccgtgatgggtgcgacggaccggtattgccgatactatctacaacgcatggtttcaatccacgcacccgtgatgggtgcgaccgccgcccgcgctcgcgcctttatggacaacgtcgtttcaatccacgcacccgtgatgggtgcgaccaagtctggaatctgagggggacacgccaaagtgtttcaatccacgcacccgtgatgggtgcgaccgaaaaggaggtggaggggaaatgctaa

SEQ ID NO: 69516 - protein, 101 aa, Unknown
  Obtained from environmental sample
  misc_feature (1)..(101): Xaa is any amino acid
MMGATRVVSLTPHHNKSFNPRTRDGCDGPVLPILSTTHGFNPRTRDGCDRRPRSRLYGQRRFNPRTRDGCDQVWNLRGTRQSVSIHAPVMGATEKEVEGKC

SEQ ID NO: 69517 - DNA, 402 bp, Unknown
  Obtained from environmental sample
  misc_feature (1)..(402): n is a, c, g, or t
atggacacacaggaaaaaccttttctgcctgccgccgttatttttgacatggacggccttatgtttgataccgaaaacctgactataccgctctgggaagtcgcgggcaagccgtttggatataacctgacccgtgaaattgtccttcgcatggtgggtatcagcggcgaaagagcgcagcagcttttgcttgaggaattcggctctgattttccatacgaagcgatacgcgacgagtacaagatacttgtcagcaaagaaattgaaaaaaagggagtcccaaaaaaacccggccttatgtacttgctcgaccgccttcgcgccgcaaatatcccccttggggtagcgacttccacccgcagtcccagagccattgatctctgggaaaagccggcattctga

SEQ ID NO: 69518 - protein, 133 aa, Unknown
  Obtained from environmental sample
  misc_feature (1)..(133): Xaa is any amino acid
MDTQEKPFLPAAVIFDMDGLMFDTENLTIPLWEVAGKPFGYNLTREIVLRMVGISGERAQQLLLEEFGSDFPYEAIRDEYKILVSKEIEKKGVPKKPGLMYLLDRLRAANIPLGVATSTRSPRAIDLWEKPAF

SEQ ID NO: 69519 - DNA, 1533 bp, Unknown
  Obtained from environmental sample
  misc_feature (1)..(1533): n is a, c, g, or t
atgaacacaacgcttgtcgcggttatcgaggtcggctctacgggcattaggcttaatgtcgccgaaatttcctcaaacgggcaatggaaggtgcttgaccgcgcggtaaggcctgtggggcttgggcgcgatgtttttacgtcaggccagctttcaaaagaatccatgcatgaatgtcttaccgtctttcagaatttccgcgaacttttatcgggatggagcatcgcggacaacaatatccatttaattgccacaagcgccctcagagttgcgcataatagggatatttttatagaccgcgtaaaacaggaaacgggatttaatctttctattgtggaaggcattgaagaaaacaggctgatgtatcttgccgtgcgctttgccttaaaacaggaacttccccttttctggcgcgctaattcgatgattatcgaaatcggcggcggctctacggaaataatgcttttacgcagagggcagatggttgcggctcacagtcttaaaatgggaacaattatcatcgatcaacattcgcgtcacagccttggacccggtttttattacgagcgctaccttaacgaaaacattaaaaacacattgagcatgctggatatagagatggatcttgcgcatgtgcggactatggttgcctgcggctccgacgcgcgccttgccgcggaacagtccggaaaagaacttaacgaaaactgccgcattatagaacgcgatgactttatcaaatttacggaaaaaatacgcaatttaggcatagaagactgtgtgcgtcatttcggaatttcctatactgacgcggaagggcttattcccggcttattggtgcttaaactttttcttgagcgcacaggggcaaaaaatgtagcggttccgcttgtatcaataagggacggttatcttgtcgatttggcttcaggcgtcgattcgaatttgcaggatgaattctttacgcagattatcgcgtccgcggttaatctgggacgcaagtttcatttcgacgaggcgcacagcctgcatgtggcgaaacactgtatgacaatttttgattcgcttgtcaaagaacacggaatgagccgcagacaaagggtaatgctggaaaccgccgccatacttcacgatataggcacatacataaaaacatcgggacatcaaaagcatggtcagtacattgtaaacaactcggaaattttcggtcttcatcaggatgaacttggcataatctcgaatgttatcaactatcacagggggggacccccctcgcaggcggatattgaatatatcaaactccagcgcgaagagcggattcttgtattaaaaatggcatctatcctgagagtcgccgacgctctggaccgcggccattcacagcagataaaaaaaataactgtcgaacggcgtcttgaaaccgtagtccttcatgtggacaaagcctacgatctaacacttgagcttttaggtattgaagaaaaaggcggaatgtttcaggatgtattcggctgtaaaattgttttgagttaa

SEQ ID NO: 69520 - protein, 510 aa, Unknown
  Obtained from environmental sample
  DOMAIN (338)...(458): HD domain
  misc_feature (1)..(510): Xaa is any amino acid
MNTTLVAVIEVGSTGIRLNVAEISSNGQWKVLDRAVRPVGLGRDVFTSGQLSKESMHECLTVFQNFRELLSGWSIADNNIHLIATSALRVAHNRDIFIDRVKQETGFNLSIVEGIEENRLMYLAVRFALKQELPLFWRANSMIIEIGGGSTEIMLLRRGQMVAAHSLKMGTIIIDQHSRHSLGPGFYYERYLNENIKNTLSMLDIEMDLAHVRTMVACGSDARLAAEQSGKELNENCRIIERDDFIKFTEKIRNLGIEDCVRHFGISYTDAEGLIPGLLVLKLFLERTGAKNVAVPLVSIRDGYLVDLASGVDSNLQDEFFTQIIASAVNLGRKFHFDEAHSLHVAKHCMTIFDSLVKEHGMSRRQRVMLETAAILHDIGTYIKTSGHQKHGQYIVNNSEIFGLHQDELGIISNVINYHRGGPPSQADIEYIKLQREERILVLKMASILRVADALDRGHSQQIKKITVERRLETVVLHVDKAYDLTLELLGIEEKGGMFQDVFGCKIVLS

SEQ ID NO: 69521 - DNA, 1230 bp, Unknown
  Obtained from environmental sample
  misc_feature (1)..(1230): n is a, c, g, or t
gtggttaaggccgatactaccgaggagcttttgcaccccgatgtgttaaaagcaatagacgacctttcagtttatcttacggaaaatgttccggatgtgggcaaagtcgtaggttttgcggatattatcaaaaggatcaatcaggtgttcaacgccggagaaagcccggaaggactgcggaaagttgtatcaactgacacttccggcagttttggtttttcggatacgggagatttcggcttcggtaattttggctttaacgataacagccatgttacggaaaaaaataaacatgatattgaatatcacgatatatccaaatacaacatggcggatctgctggcttttctggataccgcttccgggaaatcacagcatttgagcgggaatgatattgtcagagaaatcaaacgtctgaccaattatgagggcatggcttattatgaaattccttcggatccaaagcgttacggcaaagaaacgcctgaagaacttcaacggctgatagcaaattaccttgttctgcttgccggggatgatgattccggttactcaaatgagccgcttgagcctaccgcgataaggacactgatacaactgcgaacgacaggcaacagggattccaaggcggtaatagacatagttaaggaatatacagaggttaattttgcaaaaaacgtgcaggttataataggcggcggcgtaacttacgaaatagcgattacggaattgatttttaactctcaaataatatcaataattatttccgtgcttattgtgttcatcataatgtcattttcctataaatcgcctgttgccggatttgtcggagccgtcccgctgtcgctggcgatcctttgtaatttcgctgtgatgggttttttaggcatcaaattaagtcttggaacagcgcttatttccagcctcgcggtcggcataggcattgactatacaattcactttatcgaatttttcaagcgcgaataccgtattggaggagatgattttctccgcaggacttatataggctgcggaaaagcgattatcattaacgccctgtccgtcggcgccgggttcggagtgctcgcgttatcccaattcgtaattatcgcccaattaggctcgcttatcgccttaaatatgatgataacagcttttgtcagccttacggtgataccggctctgcttttggtgattaaacctaattttatttacaagcaagtaacttga

SEQ ID NO: 69522 - protein, 409 aa, Unknown
  Obtained from environmental sample
  misc_feature (1)..(409): Xaa is any amino acid
MVKADTTEELLHPDVLKAIDDLSVYLTENVPDVGKVVGFADIIKRINQVFNAGESPEGLRKVVSTDTSGSFGFSDTGDFGFGNFGFNDNSHVTEKNKHDIEYHDISKYNMADLLAFLDTASGKSQHLSGNDIVREIKRLTNYEGMAYYEIPSDPKRYGKETPEELQRLIANYLVLLAGDDDSGYSNEPLEPTAIRTLIQLRTTGNRDSKAVIDIVKEYTEVNFAKNVQVIIGGGVTYEIAITELIFNSQIISIIISVLIVFIIMSFSYKSPVAGFVGAVPLSLAILCNFAVMGFLGIKLSLGTALISSLAVGIGIDYTIHFIEFFKREYRIGGDDFLRRTYIGCGKAIIINALSVGAGFGVLALSQFVIIAQLGSLIALNMMITAFVSLTVIPALLLVIKPNFIYKQVT

SEQ ID NO: 69523 - DNA, 1428 bp, Unknown
  Obtained from environmental sample
  misc_feature (1)..(1428): n is a, c, g, or t
atggaaaaattgtttaagtatccggcgctgatagtcggaattatcgttataataacggtatttttggggcttcagcttccacgcgcggaattggacaacaataatatacgatttttgccggacaaaaatcaggcaaaaattatttctgaatatgtcgatgaaaccttcggcggccaagtattaatccttgccggacttgagcgcaaatatcaaacggtatttgaaaaagactttcttaagagaatcagtgatttttcccgtgccgttgaaaacatggaatacgttaaatcggttaattccattatgtcgacgcagtatataaccggcaacaatgacagtattgtcgtttcggatttagttccggaaaatttttcgggaacagcggaagaaattaccgaacttaaaaggcgtatcgcgtcatgggatttgttccggggttctcttgtttcagacgatctttcggctacgcagattcttattaccctgaacgcggttacggcggattttacccgcccggaagtaatgcagagcgtagatgaaatccggaagattgccgatgaatattttacaggcgaggcgcaggtgtattttaccgggcagccgatcttcaacgcgattattaacaggtcaatgattgaagataacattttgcttatacctttagttgtcgttgttatattgctgatgttattcttttcatttaagcgctttacttatgtggctcttccgtttttgacggttatcatagcggttgtctggactgtcggtatggcggccttgctggggattaaactttcggttattacgactatactgcctgttattctcttcgctgtcggcagcgcctacggtattcatattgttacgcattacatggaagatatacgggaaaaagtattatccatagaggaacatcgtatactggttttggatttaacaaaaaaactgattaaaccggtatttctggcggcgcttaccacgctggcgggttttatatcattttgttttacgcctattattccaatgagggaattcggttattgcgcaggcttcggagtgctcgcgtcctttgccgtggcagtcctttttatcccgtcaatgtttctgctccgcggtccccgcgttttaaatgatcaaaaaaaagagcaaaaaggcgaggatcgtttcagcaacgctatcgcaattattttttccggcatcgctgagaaaaagatacctgtgcttatttgcgcggcgctggtcatgctcatttcgttttacggactttctaaagttattgttgacaacgctatggttgaattttttcagaaagaaaccgacataagccgttcagaccgttttatacgcgagtatttcggcgggtcaaagacattaatcttgtggttaaggccgatactaccgaggagcttttgcaccccgatgtgttaa

SEQ ID NO: 69524 - protein, 475 aa, Unknown
  Obtained from environmental sample
  DOMAIN (148)...(261): MMPL family
  misc_feature (1)..(475): Xaa is any amino acid
MEKLFKYPALIVGIIVIITVFLGLQLPRAELDNNNIRFLPDKNQAKIISEYVDETFGGQVLILAGLERKYQTVFEKDFLKRISDFSRAVENMEYVKSVNSIMSTQYITGNNDSIVVSDLVPENFSGTAEEITELKRRIASWDLFRGSLVSDDLSATQILITLNAVTADFTRPEVMQSVDEIRKIADEYFTGEAQVYFTGQPIFNAIINRSMIEDNILLIPLVVVVILLMLFFSFKRFTYVALPFLTVIIAVVWTVGMAALLGIKLSVITTILPVILFAVGSAYGIHIVTHYMEDIREKVLSIEEHRILVLDLTKKLIKPVFLAALTTLAGFISFCFTPIIPMREFGYCAGFGVLASFAVAVLFIPSMFLLRGPRVLNDQKKEQKGEDRFSNAIAIIFSGIAEKKIPVLICAALVMLISFYGLSKVIVDNAMVEFFQKETDISRSDRFIREYFGGSKTLILWLRPILPRSFCTPMC

SEQ ID NO: 69525 - DNA, 717 bp, Unknown
  Obtained from environmental sample
  misc_feature (1)..(717): n is a, c, g, or t
atgcagtttggcgttaaggctttacgctgggcgtattatgaaaaaatgatccccgaaaatataacggaaaatatcggcggtttttccggaggcagcaaacagcgagatacttttacaatagacgaaatagaaaaattaagaaatataaactactgggataataaaatggcgtatgcggcgtttaggcttgcaagcacttcggcattaaggcgcggagaatgcctggctttacggcggcaggacttaggcgaaaatattttatatatccggcactcatataaccatattgacggcttaaagctgacaaaaaacaggcttgaacgcacggcgtatatactgccggaagtgcggggcctgttaatggaattactggctgacaatccgcatgagagatcacctgagcagtttgtattttattccgacgttgagaatgacaagccatgcaatataaatcatttcacaaggtatttaaaacgcgccattgagaaagccgggataaaaataaatgggcgcatgattgattttcattccctgcggcattatgtcgctacaaaatgggcggacaataacggcggcgattaccggcaagttgcgaaaattacaggacataaaagcatatcgcaagctgagcattacgcgcggcacggaaacgaattggaaacaatagagcttgggaaaaaagcggctaccattcttgaatataaaaaggaggcatag

SEQ ID NO: 69526 - protein, 238 aa, Unknown
  Obtained from environmental sample
  DOMAIN (46)...(221): Phage integrase family
  misc_feature (1)..(238): Xaa is any amino acid
MQFGVKALRWAYYEKMIPENITENIGGFSGGSKQRDTFTIDEIEKLRNINYWDNKMAYAAFRLASTSALRRGECLALRRQDLGENILYIRHSYNHIDGLKLTKNRLERTAYILPEVRGLLMELLADNPHERSPEQFVFYSDVENDKPCNINHFTRYLKRAIEKAGIKINGRMIDFHSLRHYVATKWADNNGGDYRQVAKITGHKSISQAEHYARHGNELETIELGKKAATILEYKKEA

SEQ ID NO: 69527 - DNA, 2052 bp, Unknown
  Obtained from environmental sample
  misc_feature (1)..(2052): n is a, c, g, or t
atgaaaatcgagcggatccccagggaaagaaccgctaaagatatcgaaaaccaggaaacccgcaagacctattggcaggatcttggcaggcgcgtttcaactctgcgcgaaagcgccagatttcttttttcctttcaaaacccttttaacgaccgcgtcgccgtctcctcggatgaaaactcactcaccgccgccgcgacgcgggaagccgtcgaacaggattaccgtttcagcgtcaagcaggtcgcccaggcggatcgtttcctctcccctccccttgatgaaaaaacgaaaatcgaggcgggaaattacacgtttaccgtgggcaaggaagagatctcccttaatttcaggggaggttccctgcgtgaatttgccgacgcgctaaaccgccggggccgcgacaagctcggcgccagcctgataacggtgcagcccggcacaaaatcgcttttgattgaatctaaagtgaccggcgcggaaaaccggctcggcttttccggcgacgcggaatctttggctataaaactggggattttggaacaggtgaacgattcccgcagggaaatcgtgatctccgaaggcactgtccgggaatcatccccgccggaccagccttcagacccccttaccataaatgaaggcgttctgggcttaccctccctcgcgtctgcctcaatcccctttgccctggaagtagagcggggatcgcctttggtgctgaaactggaaacccagacaaagatcaaccctgaaaccgcgcgttcaatcccgcagccgccgccgggccccagcatcccctcgtccggatctattacttacggcgacattacaatagacaacaatccttctacggcgcctttgcctgcatggactcccccgcccgtgccgaaacgggtggacaaccttgccgttctttccttaagtttttcagacggaaccaagaccgtactgaggcctatcaccgactcgggcgactttatcccgcgggaattcaacctttccgaatatgccgcgggcaaaaccattaccgccctgaatatcgacaacgccaacacccacagggaaatatcggtcaggggcgcggtggtttatgatcccaaggccataggcggcggcctgcgtcccttgaaccccgtttcaatcgcccaggacgccattattgacatggaggggataaaaatgcagcgcccctcaaacactatcgccgacataattcccggcgttaccctgaccgcgaaaggcgtttccgacaagccggtacggctgggcgtaagcaccgaccgcgaagggataaaaaacgccattataaacctggtcggcaactacaaccgcctcatggcggaaataaacgtactaaccgcaagaagcctgtcttcaggagcctatgaagttaagcgagaggatggaactaaagtaattgaatacagaacacgcgctgatgacgctattatagacgaacttacctatttaacggatgatgaaaaaagcgagatgcgcaaacgcctcggcgtttttcacggcgattcgacattgactcagctaaagtccagcctgcaaaggaccgcctcggctccctaccctaccgacgagcaaagggatctttctttgctggcccagatagggataagcacctttatcctcgactccggcgccggttacagttataacccggcggggatgcggggctatcttcagattgacgaaaaaaaactggacgcggcgattgaacagcatcttcccgcggtcaagcagttgtttggatccgacacaacgggcgacatggttatagacacgggcgtcgctttcaacatggacagcctctccaagccttttgtcgaaagaggcggcatcatctcgctaaaaacaggcactatagattcgcgaatcagccaggacagaaggaagatcgacaccatggatcgacagcttgccgccaaggaagccgaactcaaggcccaatacagccgcatggaaaacgcgttctcgcgcatggagcagatgacgtcctccctggagaatttcagccggcagaatagtaataacaggtaa

SEQ ID NO: 69528 - protein, 683 aa, Unknown
  Obtained from environmental sample
  DOMAIN (1)...(87): Flagellar hook-associated protein 2 C-terminus
  misc_feature (1)..(683): Xaa is any amino acid
MKIERIPRERTAKDIENQETRKTYWQDLGRRVSTLRESARFLFSFQNPFNDRVAVSSDENSLTAAATREAVEQDYRFSVKQVAQADRFLSPPLDEKTKIEAGNYTFTVGKEEISLNFRGGSLREFADALNRRGRDKLGASLITVQPGTKSLLIESKVTGAENRLGFSGDAESLAIKLGILEQVNDSRREIVISEGTVRESSPPDQPSDPLTINEGVLGLPSLASASIPFALEVERGSPLVLKLETQTKINPETARSIPQPPPGPSIPSSGSITYGDITIDNNPSTAPLPAWTPPPVPKRVDNLAVLSLSFSDGTKTVLRPITDSGDFIPREFNLSEYAAGKTITALNIDNANTHREISVRGAVVYDPKAIGGGLRPLNPVSIAQDAIIDMEGIKMQRPSNTIADIIPGVTLTAKGVSDKPVRLGVSTDREGIKNAIINLVGNYNRLMAEINVLTARSLSSGAYEVKREDGTKVIEYRTRADDAIIDELTYLTDDEKSEMRKRLGVFHGDSTLTQLKSSLQRTASAPYPTDEQRDLSLLAQIGISTFILDSGAGYSYNPAGMRGYLQIDEKKLDAAIEQHLPAVKQLFGSDTTGDMVIDTGVAFNMDSLSKPFVERGGIISLKTGTIDSRISQDRRKIDTMDRQLAAKEAELKAQYSRMENAFSRMEQMTSSLENFSRQNSNNR

SEQ ID NO: 69529 - DNA, 432 bp, Unknown
  Obtained from environmental sample
  misc_feature (1)..(432): n is a, c, g, or t
ttgttttttccactgccaaggatggcagtggcgtataggaacatggaggtaccaatgggtatgactatctcgagcgtagtttccggcacgagtttcgccccgcagccggaacttcctaaattacagccggtcagatctgcggatcaaagggccgctgtcgataaattcgtctcttccctgccgggaaacggcgaaaaattgaataccgcgcagcttgatttacaccggatagcggcggatatcgaacaagtaagccaaactttcaacagaaaactccaattcgtggtggaccatcagtcaaaagaggtaattgtcaaggtaattgacaaaaataccgataaggtgattaaggtgctcccgcctgaagaattacagcggctgcacagaaaactgaaagaaaccattggcttgttgtttaacgagaaagtgtaa

SEQ ID NO: 69530 - protein, 143 aa, Unknown
  Obtained from environmental sample
  DOMAIN (36)...(142): FlaG protein
  misc_feature (1)..(143): Xaa is any amino acid
MFFPLPRMAVAYRNMEVPMGMTISSVVSGTSFAPQPELPKLQPVRSADQRAAVDKFVSSLPGNGEKLNTAQLDLHRIAADIEQVSQTFNRKLQFVVDHQSKEVIVKVIDKNTDKVIKVLPPEELQRLHRKLKETIGLLFNEKV

SEQ ID NO: 69531 - DNA, 942 bp, Unknown
  Obtained from environmental sample
  misc_feature (1)..(942): n is a, c, g, or t
atgatgcgccgtccggcagggatgccggagttcgatgttgcagcctgtatgggtgaaaacatcggcttgaaatggaacaaggagggattttccatggttatcaatcacaacatgagtgcgatgtttgcgcatcgtacgatgcaaggcgcgatgatcgacggcgaaaagagcattcagaaactcgcctcgggagaaaggattaatcgtgccggcgatgacgcctcggggcttgctgtctccgagaagatgcgaagtcagatacggggcctgatgcaggcagggagaaatgtccaaaacggcatttcttttctgcagactgcggaaggctatatggaggagacaagccagatctttaaccgtatccgtgagctggcggttcagtcagccaacggcatctacaccgaagaggacagaacttacatccagatcgaagtttccgctctggtagccgaagttgaccggatcgcgagccatgcgcagtttaacggcatgaacatgcttaccggagcttttgccaacggcgggccgaaaaccatgctgttccagattggcgccaacatggaccagaacacgaaggtctatatcggcgaaatgactgcctcatcgcttggagtgttgaacaatcagggaacgaccgggcctatcaacatgaaggatcctgatgccgccaacaaggctattgcggctttggacagcgcgttaacgcaggttaacaagcagagggcggatctcggcgcataccagaaccgctttgaaacagcggctcagggcatcgccatcgcggcggagaatatgcaagcctccgaatcccgcatcagggatgtgaacatggcaaacgaagtggtgaaattcaccagggatgccattctgaaccagtcggggacggcgatgctggcccaggcgaatgtgcggacccagtccgtactgcagctgcttggctag

SEQ ID NO: 69532 - protein, 313 aa, Unknown
  Obtained from environmental sample
  DOMAIN (220)...(291): Bacterial flagellin C-terminus
  misc_feature (1)..(313): Xaa is any amino acid
MMRRPAGMPEFDVAACMGENIGLKWNKEGFSMVINHNMSAMFAHRTMQGAMIDGEKSIQKLASGERINRAGDDASGLAVSEKMRSQIRGLMQAGRNVQNGISFLQTAEGYMEETSQIFNRIRELAVQSANGIYTEEDRTYIQIEVSALVAEVDRIASHAQFNGMNMLTGAFANGGPKTMLFQIGANMDQNTKVYIGEMTASSLGVLNNQGTTGPINMKDPDAANKAIAALDSALTQVNKQRADLGAYQNRFETAAQGIAIAAENMQASESRIRDVNMANEVVKFTRDAILNQSGTAMLAQANVRTQSVLQLLG

SEQ ID NO: 69533 - DNA, 933 bp, Unknown
  Obtained from environmental sample
  misc_feature (1)..(933): n is a, c, g, or t
atggttgggtatatatcggcagacaaaaaaactatacttatcaaaagagacgaatatggagacgataaagcatttgtaaaaacggaaactataagccgcacagagcctccggaatatagcgatgatggcagcgaactatcgggaggagagtgtagagaagaaggttctcccataacaacagaagtggtattttcggaaactcagcataaggactacttcgtaaatgcccacggggatcgttgttatcttttttatttagtagctgatggcaataaaatagaaatatgtgggaacgtatcggatgatataaaaaaaggcgataaagtatccgtaacatatcaagtagagacatgccgccaagagactgaaggtgtgtattattatgatagtaatagattggtatctgtgaataaaatagatgggtctgctactaccttcaccgacccacgcgacaaaaaaacctacaaaaccgtaaaaatgggcgaacaggtttggatggcggagaacttgaactttgaagcgaaagaaggatcaatgtgctacgacaacaaacctgccaactgccaaaaatacggacggctctatgactgggaaacagcaatgaaggcttgcccaaatggttggcatttgccgagcgataaagaatggcagacccttgtggatttcgcaggcggcgttaaagttgctgggaagaaactcaaagctactagcggttggactaacaacggcaatggcacagacgactttggctttgcagctttgcctggcggctcctatttgtgtcgcgatggttgcgatttctacaatggtggcatcggtggcgactggtggaattcttcaattagagacgacgattatatgttcatcggcgaaccagacggtcccgacaaggagaacggtgcctcatacagcgtccgttgcatcaaggattaa

SEQ ID NO: 69534 - protein, 310 aa, Unknown
  Obtained from environmental sample
  misc_feature (1)..(310): Xaa is any amino acid
MVGYISADKKTILIKRDEYGDDKAFVKTETISRTEPPEYSDDGSELSGGECREEGSPITTEVVFSETQHKDYFVNAHGDRCYLFYLVADGNKIEICGNVSDDIKKGDKVSVTYQVETCRQETEGVYYYDSNRLVSVNKIDGSATTFTDPRDKKTYKTVKMGEQVWMAENLNFEAKEGSMCYDNKPANCQKYGRLYDWETAMKACPNGWHLPSDKEWQTLVDFAGGVKVAGKKLKATSGWTNNGNGTDDFGFAALPGGSYLCRDGCDFYNGGIGGDWWNSSIRDDDYMFIGEPDGPDKENGASYSVRCIKD

SEQ ID NO: 69535 - DNA, 783 bp, Unknown
  Obtained from environmental sample
  misc_feature (1)..(783): n is a, c, g, or t
atgacaccggagggtactgtcaatcgtaccgctcttccggctgtttttaatcccgacgacctatatgcgctggaagcggcgcttcaaattaaggataaaaatccgggcgctgctgttactgttataacaatgggtccccctgcggcggcggcggtgctcaaagaatgtctttacagaggcgctgattttaccgcccttgtttcagatcgcggttttgcgggcgcggataccctcgccacttcttacgccctcaaatgcgccatcgagaaagccggcggttacgacctcgtgctgtgcggaagacaggcgattgacggcgataccgctcaagtcggtccgcagaccgccgagaaacttggaataaatcaaattacttgcgtttcaaaaatagaaaaaatcgatacgtcgaaaaaagaaattaccgctgtccgttcaatcgaaggcggttgggaaaaagttaaggcaaaaatgcccgtccttcttacttttaccgaggaaggagaatcgccccgaccggcttccgccgtcaaaacttgcgctttcaaaaaagcggctcccgtcgcaggtatcgacggaacacagagcgcaaatccgatggcgttatgggacatcgccgcaatcaacgccgatcccgtacattgcgggctttcaggttcgcctactaaggtgaagaaaattgattctgtcgtgcttaccgccgccgatatcaagtatatcgagccgagcgatgcaggcgttaccgagttgatccacggtctaattgcggatcatacatttggataa

SEQ ID NO: 69536 - protein, 260 aa, Unknown
  Obtained from environmental sample
  DOMAIN (4)...(197): Electron transfer flavoprotein domain
  misc_feature (1)..(260): Xaa is any amino acid
MTPEGTVNRTALPAVFNPDDLYALEAALQIKDKNPGAAVTVITMGPPAAAAVLKECLYRGADFTALVSDRGFAGADTLATSYALKCAIEKAGGYDLVLCGRQAIDGDTAQVGPQTAEKLGINQITCVSKIEKIDTSKKEITAVRSIEGGWEKVKAKMPVLLTFTEEGESPRPASAVKTCAFKKAAPVAGIDGTQSANPMALWDIAAINADPVHCGLSGSPTKVKKIDSVVLTAADIKYIEPSDAGVTELIHGLIADHTFG

SEQ ID NO: 69537 - DNA, 1011 bp, Unknown
  Obtained from environmental sample
  misc_feature (1)..(1011): n is a, c, g, or t
atgagcgataacagtgtaatggtttacatacaacaacatgaaggaaaagcggcggaggtaagtctcgaacttgtctcgaaagcccgtgagcttgcggataaattaaaagtcgaggttagcgccgcccttttcggcgagaaagtaagcgcggaagtttcacgcctcgcctcgcttggcgcggatcgtgtttacatagccgaagacgctcggcttaaatactacacgccgataccttacagcaaattgatgaatcaagtagttgaagaatacaaaccgcaaattgttttgttcggagcgacaaccgaagggcgcgatcttgctccccgtgtcgcatcgcatttgaaagtgggacttaccgcggactgcaccgatttgcagataggcgaccacactcaaaaagaaaccgagtacaaggacatactttatcagatacgccccgcgttcggcggcaacatcatcgccacgattgtaagccccgagaaaaaaccgcagatggcgacagtccgcgaaggcgttatgcgcatggctcagcccgacaaatcacgaaaagccgaaaccgtgaaaatcaaggcaacacttaataccgatgattttgttacggaaataattgagcgcgtaatggaagaaaaaaccgtaaacctgaaaggcgcgcagataatagtttcaggcggcatgggcgtagggagcaaagataacttcgccctaatccgcgagcttgcccaaaccctcggcgcggaagttggcgcgtcacgcgccgccgtggatcagggctttatcggcaaggaacatcaggtggggcagacggggacaacggtgcgcccgaaactgtacatcgcctgcggcatttccggggcgatacagcaccgcgccggcatggacggctccgcgagaattatcgccattaacaccgatcccgaagcgccgattttcagcgtcgcgcattacggcatagtgggagacttaaacgatgttatcccaagaatgatcaaagcatataaggcaagagtttaa

SEQ ID NO: 69538 - protein, 336 aa, Unknown
  Obtained from environmental sample
  DOMAIN (5)...(201): Electron transfer flavoprotein domain
  misc_feature (1)..(336): Xaa is any amino acid
MSDNSVMVYIQQHEGKAAEVSLELVSKARELADKLKVEVSAALFGEKVSAEVSRLASLGADRVYIAEDARLKYYTPIPYSKLMNQVVEEYKPQIVLFGATTEGRDLAPRVASHLKVGLTADCTDLQIGDHTQKETEYKDILYQIRPAFGGNIIATIVSPEKKPQMATVREGVMRMAQPDKSRKAETVKIKATLNTDDFVTEIIERVMEEKTVNLKGAQIIVSGGMGVGSKDNFALIRELAQTLGAEVGASRAAVDQGFIGKEHQVGQTGTTVRPKLYIACGISGAIQHRAGMDGSARIIAINTDPEAPIFSVAHYGIVGDLNDVIPRMIKAYKARV

SEQ ID NO: 69539 - DNA, 1011 bp, Unknown
  Obtained from environmental sample
  misc_feature (1)..(1011): n is a, c, g, or t
atggaaaattttttactggataacgatgatattttatttcatttggatcacatcgatcttgatcgcataattcaattaaaagaagacaactttgagcaggcgaagcaatacgcccacgctcccagagacatagaggacgcaaaagattcctaccgcagaatcctgtcgatcatcggcgaaatcgccggagagtacatggctcctaacgcccccgccgtcgatgaaagcggcccgactcttgcaaacaatcaggtaacgctgaaccccgcgacaaaaaaagccctcgacatgatggcgaaagccgacatgatgggttttgttatcccccgcagatacggcggtatcaatatgcctaacacaattttaactataggcgcggatatcttgtcgagggcggacggctcttttctcaacttcggccttcagcaggacaacgccggaacgatcaacaaattcgcgtcggaagagcagaagcaggcctacctgcccaaactctgctccggcgagtgggactcctcgatggttttaacggaacccgacgcgggcagcgatttgcaatcggtcaacctgaaagcgacgcaggacgcggacggaaaatggcgcttaaacggtgttaaacgctttatcaccaacggctgcgcgaaaatcgcccttgttctcgcccgaagcgaagaaaaaggaaaaggcgcgcgcggtctctcattcttcttatacaaacgcgaagatgatgtatcgaagcagacaatgctaatccgccggttggaacacaaactcggcatacacggctctcccacctgtgagctgcaattcaacaacgcgcccgcgggagttaatcggcgagcgtcagcgagggctgaccaaatacactctctggctgatgaacaacgcgcgtctgggagtagccgctcagggcgtaggcatcgccgaagccgcctaccgcgaagccgatctttacgccgcaaagcgcattcaattcggcgcgcccgtgcgcgatctcccccctgtttttga

SEQ ID NO: 69540 - protein, 336 aa, Unknown
  Obtained from environmental sample
  DOMAIN (173)...(224): Acyl-CoA dehydrogenase, middle domain
  misc_feature (1)..(336): Xaa is any amino acid
MENFLLDNDDILFHLDHIDLDRIIQLKEDNFEQAKQYAHAPRDIEDAKDSYRRILSIIGEIAGEYMAPNAPAVDESGPTLANNQVTLNPATKKALDMMAKADMMGFVIPRRYGGINMPNTILTIGADILSRADGSFLNFGLQQDNAGTINKFASEEQKQAYLPKLCSGEWDSSMVLTEPDAGSDLQSVNLKATQDADGKWRLNGVKRFITNGCAKIALVLARSEEKGKGARGLSFFLYKREDDVSKQTMLIRRLEHKLGIHGSPTCELQFNNAPAGVNRRASARADQIHSLADEQRASGSSRSGRRHRRSRLPRSRSLRRKAHSIRRARARSPPCF

SEQ ID NO: 69541 - DNA, 996 bp, Unknown
  Obtained from environmental sample
  misc_feature (1)..(996): n is a, c, g, or t
gtgagctgcaattcaacaacgcgcccgcgggagttaatcggcgagcgtcagcgagggctgaccaaatacactctctggctgatgaacaacgcgcgtctgggagtagccgctcagggcgtaggcatcgccgaagccgcctaccgcgaagccgatctttacgccgcaaagcgcattcaattcggcgcgcccgtgcgcgatctcccccctgtttttgaaatgctcaccgagatgaaagtcgccgtagaagccggccgcgccctgttatacgaaacagcccgctttgtcgatttgaaagaagttcttgaagaatactccgacaaacaccccgaagaaaagggagaaattattgaggagaaaaagaaatacgcgaaactcgcgggccttttcactcccgtggtaaaagcctacgcgaccgaaacggcgaacaaagtttccaacgacgcgattcaaatccacggcggaaccggctacatgaaagagtttaacatcgagcgccactaccgcgacgcgaggatcaccaacatctacgaaggcacgacgcagttacaggtagtcgccgccataggccccgtaacatcgggcgtcgctcaaatgatactggacgagtacgacggcgcaaattacacccacggcgcggagttactcgcaaaagtccgcgagtcgcgaaaagtttttgacgaggcgcttgagttcgccaagtcctgcaaagagcacgagcagtttttaacgtaccactcgcgcaggcttgtggagatggcgacggatttgattattagttacttgtttatgagggacgggaattacagtgagaggaagcagaaggtagcggagatatttattaccaagatggtctcgagaataagagcgaacagagatttcattatgggagaaaatgcaacttacttaagaattataaggctgtcattgacgctagtaagtagaaatattttactgctcgtcgctttattatcaagtgaaggcaagatgtatgcctaa

SEQ ID NO: 69542 - protein, 331 aa, Unknown
  Obtained from environmental sample
  DOMAIN (33)...(181): Acyl-CoA dehydrogenase, C-terminal domain
  misc_feature (1)..(331): Xaa is any amino acid
MSCNSTTRPRELIGERQRGLTKYTLWLMNNARLGVAAQGVGIAEAAYREADLYAAKRIQFGAPVRDLPPVFEMLTEMKVAVEAGRALLYETARFVDLKEVLEEYSDKHPEEKGEIIEEKKKYAKLAGLFTPVVKAYATETANKVSNDAIQIHGGTGYMKEFNIERHYRDARITNIYEGTTQLQVVAAIGPVTSGVAQMILDEYDGANYTHGAELLAKVRESRKVFDEALEFAKSCKEHEQFLTYHSRRLVEMATDLIISYLFMRDGNYSERKQKVAEIFITKMVSRIRANRDFIMGENATYLRIIRLSLTLVSRNILLLVALLSSEGKMYA

SEQ ID NO: 69543 - DNA, 486 bp, Unknown
  Obtained from environmental sample
  misc_feature (1)..(486): n is a, c, g, or t
atggttaataaccagccaaacggcgtagtttatacggggaaagtagcatacatatacaaaggtactatgcctccaaatacgagcataacattacttgatggtacaaaagaaattgctgggtatgcttttgaaaactgcaccggacttatcagcataaccataccggatagcgttaccaatattagaaattatgcttttgaaaaatgcaccaatcttaccagtataaccataccgagcagtgttaccaaaataggggggagggctttttggggttgcactaaccttaccagagtaacatttgcaacgggaagcaacataacagaaaaaaactttgaacaagatgcttttcccagtaaaagcatacattatagcgaaacctacggtagcgataatttaaagatagtctacttttcaacaagtacaagcaaggaaggaacatacacgagggaggcaggcggctttgaatggacgtggagtaaatattaa

SEQ ID NO: 69544 - protein, 161 aa, Unknown
  Obtained from environmental sample
  misc_feature (1)..(161): Xaa is any amino acid
MVNNQPNGVVYTGKVAYIYKGTMPPNTSITLLDGTKEIAGYAFENCTGLISITIPDSVTNIRNYAFEKCTNLTSITIPSSVTKIGGRAFWGCTNLTRVTFATGSNITEKNFEQDAFPSKSIHYSETYGSDNLKIVYFSTSTSKEGTYTREAGGFEWTWSKY

SEQ ID NO: 69545 - DNA, 468 bp, Unknown
  Obtained from environmental sample
  misc_feature (1)..(468): n is a, c, g, or t
gtgcgtgtttctttgtgcgttgtgttatgggtgcaagttctagtatcaattccggctgttgtgcaagtcggcgctgttgtttgtgtccatataccccagttatgcgctgttggatttattggtattgtgcgcgtttctttgtgcgttgcgtcatgggaacaagtacctgtttctactcccgttgttgtgcaagttgcggctgtggttactgtccagtttccaaaatcgtgtccgagagcaggtataacattaagggtttcttctttgttgcagattttacattttctttttccgcttcctgtctctgtacaagtcggcgctgttcctgctaactgttcccaatcatgcctgtttgggtctatggctatttcccgcgtttctttgtgcgttgcgtcgttggtacaaattctagtatcaattccgacagttttacaagtcggcgctgttgtttgtatccatgtgtcatag

SEQ ID NO: 69546 - protein, 155 aa, Unknown
  Obtained from environmental sample
  misc_feature (1)..(155): Xaa is any amino acid
MRVSLCVVLWVQVLVSIPAVVQVGAVVCVHIPQLCAVGFIGIVRVSLCVASWEQVPVSTPVVVQVAAVVTVQFPKSCPRAGITLRVSSLLQILHFLFPLPVSVQVGAVPANCSQSCLFGSMAISRVSLCVASLVQILVSIPTVLQVGAVVCIHVS

SEQ ID NO: 69547 - DNA, 2256 bp, Unknown
  Obtained from environmental sample
  misc_feature (1)..(2256): n is a, c, g, or t
atggaaactgaaaaaattgtttttacaggccccgccgcccattgggaagaagccctgccgttgggaaacggcaggctgggggcgatggtcttcggttcgcctgaccgggaaagaatacagttaaacgaagaatcaatctggtccggtctttaccgagaccggaataatcccgccgcaaaagactcgcttgctcaggtaaggcgttttattgacgaaaagcgttttcgggaagcggaagaactatgccttgaaagtttcagcgcaatccctcagaaccagcgggtataccagagcgccggggatctgcttgtcagtttttctcccggcggcggattcggccataatgggtcgggaacacgtggcggccctttgttaaaagacatacaaagttaccgccgcgaactggacattgaaagcgccgtacatacgctttcatttgaatatgacggcgcggtttttacccgcgaatgtttcatttcccggccggcgggacttttagcgctccgtttcagcgccgcctctttggacggtaaaccgctgtccggtaaaatatctttccgcgccgaccttgatcgcggcgttttctccgacaggaaaggaaacacagaagacggcgcttttttatgccgcgacagcgacattcccttttgcgcgatgataaaggctgtacagaagggaggaacacagcgccgccgtggcggttttattacggtggaaaaagccgatgaagcgctactatttttggacatacgcacaggttttagagatgcggattatgccgccgcctgcgccgcgaatataaaccgcgccgcttgtgccggagacattactaaaatatgggaaaatttactggctgaacatattgccgaatacgcttcgtggtacgggcgcttaaaactggaaattgacggcggcgaacacaccgtgcgttattttaatttttgccgttatttgcttatatcgtgcagcaggccggatacgctccccgcccatttacagggattgtggaatcaacatttggatccgccgtggggctgcgattttacgatcaacattaatacccagatgaattactggtccgcctgtatgtgcaatttggcggaaacggaagagccgcttttcgacttattggaacgaatttatcttaacgggaagaaaaccgccgaaataatgtatggctgccgcggttttatcgcccatcataataccgatatttgggccgataccgccccgcgcgattactggatacctgcgtcttattgggtttttggcgcggcgtggctttccctgcatatttttgaacattacgaatattctttagatatagaatttttgcgaaaatatttttaccttttaaaagaatcctgtctgttttttgccgattatcttgttcttaagacggacagggcaggggagacgcgccttgtaatctcgccgtcttcctcgcctgaaaacagttttttgtataacaatgaaacatgcagtctttgcgccggctgtgaaatggacaatcagattctaaggaaattgtttgaagtaacgatacgcgcctcgggaattttagaaatagcagataacgatatcggcttattcagttcgatttacaaacacattccccggcctgttattcactcaaacggaactatccgcgaatggaatgaagaatacgaagaggcggaaccaggtcatcgccatttttcaaatctctttgccctttggcccggcggcacaattacgccggatgaaacgccggaactggcagccgccgcccgaaaaacgctggaacgccgtcttgcccactcaggcgggcatacaggctggagcagggcgtggctggtgaattttatggcgcgtttacgggacgggaaaacagccctggaaaatttagacgccatgttcaaagaatttaccctgcctaatctttttaataacgggcctccttttcagatagacggtaactttggggcattggcgggaattacgcagatgttagtccaaagccgtatccgttatgaaggtgaaagttttacggtcctgttagacatacttcccgccctgcctgaatgttggtcaaaaggcaaaataaaaggagttcgcgcaaaagggaatctggaacttgattttgaatggcaagacaggcggcttaaatctcttgttattcgcaacaaaggaaaatcggcggttcatgttttacttcgcagcagtaacgatcaacgagaattgctgtttgaaccgggaaagactaaaattttctaa

SEQ ID NO: 69548 - protein, 751 aa, Unknown
  Obtained from environmental sample
  misc_feature (1)..(751): Xaa is any amino acid
METEKIVFTGPAAHWEEALPLGNGRLGAMVFGSPDRERIQLNEESIWSGLYRDRNNPAAKDSLAQVRRFIDEKRFREAEELCLESFSAIPQNQRVYQSAGDLLVSFSPGGGFGHNGSGTRGGPLLKDIQSYRRELDIESAVHTLSFEYDGAVFTRECFISRPAGLLALRFSAASLDGKPLSGKISFRADLDRGVFSDRKGNTEDGAFLCRDSDIPFCAMIKAVQKGGTQRRRGGFITVEKADEALLFLDIRTGFRDADYAAACAANINRAACAGDITKIWENLLAEHIAEYASWYGRLKLEIDGGEHTVRYFNFCRYLLISCSRPDTLPAHLQGLWNQHLDPPWGCDFTININTQMNYWSACMCNLAETEEPLFDLLERIYLNGKKTAEIMYGCRGFIAHHNTDIWADTAPRDYWIPASYWVFGAAWLSLHIFEHYEYSLDIEFLRKYFYLLKESCLFFADYLVLKTDRAGETRLVISPSSSPENSFLYNNETCSLCAGCEMDNQILRKLFEVTIRASGILEIADNDIGLFSSIYKHIPRPVIHSNGTIREWNEEYEEAEPGHRHFSNLFALWPGGTITPDETPELAAAARKTLERRLAHSGGHTGWSRAWLVNFMARLRDGKTALENLDAMFKEFTLPNLFNNGPPFQIDGNFGALAGITQMLVQSRIRYEGESFTVLLDILPALPECWSKGKIKGVRAKGNLELDFEWQDRRLKSLVIRNKGKSAVHVLLRSSNDQRELLFEPGKTKIF

SEQ ID NO: 69549 - DNA, 1203 bp, Unknown
  Obtained from environmental sample
  misc_feature (1)..(1203): n is a, c, g, or t
ttggacaggagcaaggctctggcgcttcttaccgagaaaggcgggcttaccacccacaccgcgattattgcgaagagttacggaatccctacattgttcggcattcacgggcttatggacgcggtaaaacaaggccagcttgcggtggtaaacgccgatgaagaaaaagtaattctggagcctgaaaccgaagttgccgccgaatatgaaaaaaaatacgaagcttaccgcagagacaaacaggacgccgacacataccttgtaaaacaagcctgtactcaggatgggacgcggattgacattggtttaaatctttcgggagctttagacgatgaacttcaagcggcttcttttgttgattcagtcgggcttttcagaaccgagtttctttaccttggcagggaattcttgccggacgaagaagagcagatttccgcttacaaaaaggttcttgagtgtttcggagagcggcctgtaatcctgcgtactcttgacataggcggggacaaacagctttcaagcctgaatttaaaacgcgaggaaaatcctttcctgggaaaccggggcgtgcgtttttgtttaagttaccccgatgtttttaagacgcagcttagggcggctttacgcgccggcgtttacggagatatgtggatcatgttcccgatggtaaattccatagacgacatacgaaaagcaaaagagattattgagtccgttcaggaagaacttgaaaaagaagaaaaacccttcggacatattaaaatcggtattatgatagaaacgccttccatcgcgcttatggcggaccttgccgcgtgtgaagtagattttgcgagcataggcaccaatgacctgtgccagtacctgtgcgcggccgacaggatgaacagcgaagtggaaccctattaccagtcttttcaccccgcgatgttcaagctgataaaagaagtgacagccgcttntgaaaaacacggaaagcccatatcaatctgcggagaacttgccgccgaccctcttgcggctcctgtttttgtagggctgggcttaaaaaaactgagcatgggtgtcgcgtcggtcgccgccgtaaaacgcgtgatatgttccataaccgaaaagaaagcctgcgagattgcggataaagttcttgaatgcgcgaccgcggaagaagttatacgtgagttggaaaaaattaagaatttgtaa

SEQ ID NO: 69550 - protein, 400 aa, Unknown
  Obtained from environmental sample
  DOMAIN (1)...(55): PEP-utilising enzyme, mobile domain
  misc_feature (1)..(400): Xaa is any amino acid
MDRSKALALLTEKGGLTTHTAIIAKSYGIPTLFGIHGLMDAVKQGQLAVVNADEEKVILEPETEVAAEYEKKYEAYRRDKQDADTYLVKQACTQDGTRIDIGLNLSGALDDELQAASFVDSVGLFRTEFLYLGREFLPDEEEQISAYKKVLECFGERPVILRTLDIGGDKQLSSLNLKREENPFLGNRGVRFCLSYPDVFKTQLRAALRAGVYGDMWIMFPMVNSIDDIRKAKEIIESVQEELEKEEKPFGHIKIGIMIETPSIALMADLAACEVDFASIGTNDLCQYLCAADRMNSEVEPYYQSFHPAMFKLIKEVTAAXEKHGKPISICGELAADPLAAPVFVGLGLKKLSMGVASVAAVKRVICSITEKKACEIADKVLECATAEEVIRELEKIKNL

SEQ ID NO: 69551 - DNA, 1329 bp, Unknown
  Obtained from environmental sample
  misc_feature (1)..(1329): n is a, c, g, or t
atgactgaatttgtccatctccatgttcattccgattattctctggcggacgccgcggtttcagtttataaactggcggacagggcggaagaattgggaatgacccatattgccctgacggatcacggcaatatgttcggcgcgatggattttatcggcgcgtgtaaagaatatatcgtaattgttgatgacgagaaacagcatgaaaaacggaaaaatccgataaaaccgataattggctgcgaagtttatgtttctccgggttcgcgttttgaaaaaaaaggctcggagagcgaaaataaatattaccaccttgtactacttgtttacagccgcgaaggttattttaaccttgttaaactttgttccctcgcgtatacggaaggcttttattacaggcccagaatagacgaagagctcttgtcaaaatatcacgaagggcttatagcgctttccgcctgcgcgagcggggaaattccaaggcttattcaagccggcaaaattgaagaagcgcaaaagaaggcgctttattaccgcgatctttttggaaaggacgaaaacggaaatccgaatttttatcttgaaatacaggatcacggaattcccgccggatacttaagaggcagtgaattatcacaaaaggatattaacaaaacagccgctgatatctcgcgaaaaaccggtattccgcttgtagcgactaacgacgtgcattaccttgaaaaagatgattatatagcgcatgacgttcttctctgtataggaacaggaaaagtccgcacagaagaaaaaaggaaaagatactacggagatcagttttattttaaaacgggcgacgaaatggcggctcttttcagcgaatatccgcaggcaattacaaatacggtgcttatagcgaacaggtgcaatgcggatattcctaaaatttccgtaaaagaactgcccggctaccttcctgaatttgaaattccgcccggttttgaatcgactgatcagtatttaaagatgctttcagatcagggaattgagcagcgttatgccaaagaaaaagcggaaaacggaaaagaatgggcagaaattaaaaagaggacggaagatgaacttaacacaattattaacatggggtttaccggctattttttgatagtatgggattttatcaaatacgcaagagaccacggaattcctgtaggtcccgggcgcgggtcaggcgcgggttccattattgcgtacgcgctgcgtataacagatattaatccgttaaaatacgacctgctttttgaacgtttcttaaattccgaacgtatttcaatgccggatttgacatag

SEQ ID NO: 69552 - protein, 442 aa, Unknown
  Obtained from environmental sample
  DOMAIN (273)...(442): Bacterial DNA polymerase III alpha subunit
  misc_feature (1)..(442): Xaa is any amino acid
MTEFVHLHVHSDYSLADAAVSVYKLADRAEELGMTHIALTDHGNMFGAMDFIGACKEYIVIVDDEKQHEKRKNPIKPIIGCEVYVSPGSRFEKKGSESENKYYHLVLLVYSREGYFNLVKLCSLAYTEGFYYRPRIDEELLSKYHEGLIALSACASGEIPRLIQAGKIEEAQKKALYYRDLFGKDENGNPNFYLEIQDHGIPAGYLRGSELSQKDINKTAADISRKTGIPLVATNDVHYLEKDDYIAHDVLLCIGTGKVRTEEKRKRYYGDQFYFKTGDEMAALFSEYPQAITNTVLIANRCNADIPKISVKELPGYLPEFEIPPGFESTDQYLKMLSDQGIEQRYAKEKAENGKEWAEIKKRTEDELNTIINMGFTGYFLIVWDFIKYARDHGIPVGPGRGSGAGSIIAYALRITDINPLKYDLLFERFLNSERISMPDLT

SEQ ID NO: 69553 - DNA, 561 bp, Unknown
  Obtained from environmental sample
  misc_feature (1)..(561): n is a, c, g, or t
ttgaaaaaaaactatacaaaggcaaggaagaccgctgcactgtatatcttggctggtttgcccccttccaatgcggcttttgacgaaagcaggaatcagacagcgtcaattctttccgaatatctcgacatacttttaaccgatgaaatacgggaaaaattaagcggtgtatattcaatttccgccggagcttcggtctctacaataccaaaaggcgaggcaaggcttgaaatttatttccagtgcaatccggcgcgcgtaaatgagcttattacggcggttcttgagcgtataacggcagtttccgcaaagccgcttaatcaggatacgtttaataaatcaaaagaggcgatccttaaggagcatgaaaactcaatacagaggaacctgcacatagcccaaagcctggcgaactcgtcggttctttacaacacgcccttaagcagactgaactcaagaccagccgtgataagggcggtgcgccccgaaaacgtacaatccctctgccgggaaataacaacttcaggctctgttcaggtggtaatgtacccggcgaagtaa

SEQ ID NO: 69554 - protein, 186 aa, Unknown
  Obtained from environmental sample
  SIGNAL (1)...(25)
  misc_feature (1)..(186): Xaa is any amino acid
MKKNYTKARKTAALYILAGLPPSNAAFDESRNQTASILSEYLDILLTDEIREKLSGVYSISAGASVSTIPKGEARLEIYFQCNPARVNELITAVLERITAVSAKPLNQDTFNKSKEAILKEHENSIQRNLHIAQSLANSSVLYNTPLSRLNSRPAVIRAVRPENVQSLCREITTSGSVQVVMYPAK

SEQ ID NO: 69555 - DNA, 2097 bp, Unknown
  Obtained from environmental sample
  misc_feature (1)..(2097): n is a, c, g, or t
ttgaacatattgcctttagcggcagttcgcatttttccgggaaaggaattaatagattacctgcgctatttgggaatgggtgtcggcgcggacacaaatgcttatagttggtgcaaagaaactgtttatcactttgatgtccccgtagaaaacaggcagggagttaaatacataccggacagggcgctcgctattcttgacgactggacatacgctgtaaaacttaacccggaagatataaaaagcgaaggccttgtcgttcttgaagaactacgttcaaggttaggtgcaatggaaagggttagaaaaattacccttcctattcttttttcaggttccgcttacgcaaaccgagaagttataggcctgcccgaagtaatagagaacatgacacagcaaaaggcaagaggtttttatgaccgctggtacacaagcgataacatggctcttgtttttgtaggcgactttaacggaaaagcgctggaagcaagccttacgcgtcattttaatatgccggaagcttccagtcccgtaaaccgcccgaaatacgaactgcctccgcccaaaaacggcaattttcaggtagaaattgttacagaccctgaacttgcttccgccagctttatgatctattacaaacaaaagcagggagcgcaaaggggtactatcggctattaccgcgaaaccgtaattgattttttaattgatacaatgctgagtatgcgttttgaggaaacctccgacgatcccgattccgcttcaaccggttcatggggcggcatctggcgttgggctgaaaattcgcgcttttattctattggtacggaacctaaaacaggaaacgctgaaaacgccctgcgggaacttctacttgaaaaagaagccatgcgccgttacgggtttactcaaagcgaattggacagggctaaattaaaccttgtctcttacatggaaaaacagttatcggaaaaagacaggcgggattcgcgttcttatgtcaggactattacctcatattttttatatggggaagatatggctgatattgaatgggagttgaacgccgtaaacgccatacttcctgaaataggattaaaagaaattcaagcggcggtaaaaaaatatttttcttataacgactgtatagtctttttaatggctccgtccgcggaagccggaacccttccttcaaaagaacgaataaaggcgatttttacggaaaccgaaaaggcggcaattaaacccagaaaagacgagtcattgaaagatgaattactggatgccgttccgccgaaaggaagcattacaagcgaagttacggacaaggaaacgggagcggtaattcttacactgagcaacggcgcgaaagtaattcttaaagagacaaaaaacaaaaacaacgagattgttatgtacgctatggcaaggggagggacggtaaacgcttccgataatgaatttatttccgcaaatcttgcttcggaaatgcttgcggcttcagggctgggcccttattcgcgcatagaacttgtaaacaggctggccgggaaacaagtttcaaattctttctgggcatcaagttattacagggggtttcagggttcttccacggcaaaagacataaaaacgctttttgaaatgatatatatgttctttaccaaaatcaaattagacgacagggctgtagccgccatgatcgatcaatataaaacaacccttgcccaccaggaagatgatcctgataattatttttcgcgcgagttaagaaaaataataagcggcaatcatccgcgttttaaaccgctggaacttgccgatttaagcaagatttcaacggaacaggcgttttcatttatcaacaggtgcataaatccggccgattatacctttgtatttaccggaaacctaaagttaaatgaaatgaaagatttagccgcaggctttatagcttcaattccaaacgcgccgtccatgaacacatgggtagatccaagaataacgcgcccggcggatattgaaaaaaaactatacaaaggcaaggaagaccgctgcactgtatatcttggctggtttgcccccttccaatgcggcttttga

SEQ ID NO: 69556 - protein, 698 aa, Unknown
  Obtained from environmental sample
  DOMAIN (129)...(313): Peptidase M16 inactive domain
  misc_feature (1)..(698): Xaa is any amino acid
MNILPLAAVRIFPGKELIDYLRYLGMGVGADTNAYSWCKETVYHFDVPVENRQGVKYIPDRALAILDDWTYAVKLNPEDIKSEGLVVLEELRSRLGAMERVRKITLPILFSGSAYANREVIGLPEVIENMTQQKARGFYDRWYTSDNMALVFVGDFNGKALEASLTRHFNMPEASSPVNRPKYELPPPKNGNFQVEIVTDPELASASFMIYYKQKQGAQRGTIGYYRETVIDFLIDTMLSMRFEETSDDPDSASTGSWGGIWRWAENSRFYSIGTEPKTGNAENALRELLLEKEAMRRYGFTQSELDRAKLNLVSYMEKQLSEKDRRDSRSYVRTITSYFLYGEDMADIEWELNAVNAILPEIGLKEIQAAVKKYFSYNDCIVFLMAPSAEAGTLPSKERIKAIFTETEKAAIKPRKDESLKDELLDAVPPKGSITSEVTDKETGAVILTLSNGAKVILKETKNKNNEIVMYAMARGGTVNASDNEFISANLASEMLAASGLGPYSRIELVNRLAGKQVSNSFWASSYYRGFQGSSTAKDIKTLFEMIYMFFTKIKLDDRAVAAMIDQYKTTLAHQEDDPDNYFSRELRKIISGNHPRFKPLELADLSKISTEQAFSFINRCINPADYTFVFTGNLKLNEMKDLAAGFIASIPNAPSMNTWVDPRITRPADIEKKLYKGKEDRCTVYLGWFAPFQCGF

SEQ ID NO: 69557 - DNA, 693 bp, Unknown
  Obtained from environmental sample
  misc_feature (1)..(693): n is a, c, g, or t
atggcgggcggaaataaacgttattctggctttatattagggggaaaaatgaaaaagaatattttatttatttttttgatgatagccggaatgtgcgtttttgcccagaacggtacaattaaagagatgagcggcacggtggaattaaaagctcccggcgcttcagattttgtgccggcaaaagccggggacaaggtaagccggcaaactgttgtttccacaggcttcaaaagcaccgctttaattgaggtaggaggcgccgtactgactgtaaggccgctgacccgcctgacattaaccgagatcagcgcctcaatgaactcagagacacttgatcttaacctgcaaaccggcagggtgcgtgtggaagtgaatcctcccgcgggcggcaaagccgtcatgtcggtaaaaagccccatcgcgaccgcctctgtacgcggcacaagttttgattttgacacccgaaacctttatgtgaatcgcggcaaggtcagttttaaaggcaaccggggcgccggagtgcttgtaagagcaggttttgcatccgggataaatgacgccggcaaagctgccaacccgattgaaacaaaaaatgttaatcttctgcctccatctcccgtaggatatgaaaccggaggcgccgcgttaagcccgaacataacaggaattattaccattatgtttatttattga

SEQ ID NO: 69558 - protein, 230 aa, Unknown
  Obtained from environmental sample
  misc_feature (1)..(230): Xaa is any amino acid
MAGGNKRYSGFILGGKMKKNILFIFLMIAGMCVFAQNGTIKEMSGTVELKAPGASDFVPAKAGDKVSRQTVVSTGFKSTALIEVGGAVLTVRPLTRLTLTEISASMNSETLDLNLQTGRVRVEVNPPAGGKAVMSVKSPIATASVRGTSFDFDTRNLYVNRGKVSFKGNRGAGVLVRAGFASGINDAGKAANPIETKNVNLLPPSPVGYETGGAALSPNITGIITIMFIY

SEQ ID NO: 69559 - DNA, 771 bp, Unknown
  Obtained from environmental sample
  misc_feature (1)..(771): n is a, c, g, or t
atgagtataagcattgtatgtgaacttgaaaaaaacacctatattaccgacgattattttgttcttgagtttccgtgggaaagtcccgctattaaagccggacaattttttatgttaaaacctatgtttagcagtgtgtttttagcgcgtcctatcagtatttttgaatataatcccaaaaataaaacggttaaatttcttatttgtaaaaaaggcaaaggaacggaagaactttcctttctgcacccgggggataaagttcagctaacgggaccgcttggaaattgttgggcggattttcttcccgaaaacggaaaagccgcgcttgtcggcgggagcgcgggagtcgcgcctcttgcggcgttagtcgcggaaaaacccaattactattttcatttttttgccggttttaagaaaggctttaaagagaaagatcatgagaacgccattgtaggcagcgccgtaaacgcgtctaaatttacaatttccgctgaggacggggggcacgcccttaacggcagaatagtcgattttattttctcgccccaggattttgacgttattttcgggtgcggacctatagccatgatgagcgcgttaaagaaaaaatgcgaagcgcagggtgttccgtgctttttatcaatggaaagccgttttgcctgcggtacgggcgcatgcctgggctgtacaatagccacagccggcggaaaccgcagagtctgcaaagacggtcctattttttcttcccgtgaggtgaattttgatgagtga

SEQ ID NO: 69560 - protein, 256 aa, Unknown
  Obtained from environmental sample
  DOMAIN (6)...(97): Oxidoreductase FAD-binding domain
  misc_feature (1)..(256): Xaa is any amino acid
MSISIVCELEKNTYITDDYFVLEFPWESPAIKAGQFFMLKPMFSSVFLARPISIFEYNPKNKTVKFLICKKGKGTEELSFLHPGDKVQLTGPLGNCWADFLPENGKAALVGGSAGVAPLAALVAEKPNYYFHFFAGFKKGFKEKDHENAIVGSAVNASKFTISAEDGGHALNGRIVDFIFSPQDFDVIFGCGPIAMMSALKKKCEAQGVPCFLSMESRFACGTGACLGCTIATAGGNRRVCKDGPIFSSREVNFDE

SEQ ID NO: 69561 - DNA, 882 bp, Unknown
  Obtained from environmental sample
  misc_feature (1)..(882): n is a, c, g, or t
atgcttaacatagataagttgtttaagagagtggcggaaaagggacatgtttgcgtgggactggatacgtcggcggaatatgttcccgatactgaaagattcaaaactgacagcgacgcttccgcggtgctggcttttaacaaagcgataattgacgcagtctgcgacgtatgcgcctgttttaaggtgcagattgcctattacgaggaaatggggcttgcgggtcttaacgcctacgctgaaacgttaaagtacatacacagtaaggactgtcttgtaatcgccgacataaaacgcggcgatattgcggatacggcagtacgctacgcaaaagcgcactttttcggcgattttgaggctgattttgtcactttaagcccgtatatgggcatggattcaattgaaccgtggctgaaagaagcgaaaaatttcggtaagggcgcgtttgttttaatgcggacaagcaacgccggaatgagagattttgagtatcttgaaatcggcggcggaaaacgtgtatatcattctgtaggcgataaattggcgtctcttgaagcgaatactttgggagaagacggttacaggctttttggagtcgttaccggttgtacggaaagcgatgaagcggcgggaatccgcaaaacttacaaggatctttttttcctgatacccggatacggagcgcagggaggaagcgcgaaaaacgcggctctgctgctgcgaaacggaaacggcggagttgtaaacgcctcaagatcaattatcacctcatggaaggagcagtctgactttagtaaagcggataatctttttgccgccgagtccgcaagacgcgccgtaattaagatgagagatgaaattttaattgaggcaaggaagtga

SEQ ID NO: 69562 - protein, 293 aa, Unknown
  Obtained from environmental sample
  DOMAIN (15)...(267): Orotidine 5'-phosphate decarboxylase / HUMPS family
  misc_feature (1)..(293): Xaa is any amino acid
MLNIDKLFKRVAEKGHVCVGLDTSAEYVPDTERFKTDSDASAVLAFNKAIIDAVCDVCACFKVQIAYYEEMGLAGLNAYAETLKYIHSKDCLVIADIKRGDIADTAVRYAKAHFFGDFEADFVTLSPYMGMDSIEPWLKEAKNFGKGAFVLMRTSNAGMRDFEYLEIGGGKRVYHSVGDKLASLEANTLGEDGYRLFGVVTGCTESDEAAGIRKTYKDLFFLIPGYGAQGGSAKNAALLLRNGNGGVVNASRSIITSWKEQSDFSKADNLFAAESARRAVIKMRDEILIEARK

SEQ ID NO: 69563 - DNA, 546 bp, Unknown
  Obtained from environmental sample
  misc_feature (1)..(546): n is a, c, g, or t
atgagatttccgtggagattgactcggatccaagggcggcgtattttaaacaggcgaaatacggcatgtatgtccgtatggctttgcttgctgaagttttgggggcggaagatgttaaatattgatgagataaaaaacgggatcgttatagaccatataaaagctggattggggattcgtatttttaactggcttaatcttgacaaagttccgtataatgtcgcgttcgtcgcaaatgctaattcacaaagatgcggaaaaaaggatataataaagatagacaatactatttcgattaaccttgacgttcttggattaatcgatccgaatattacggtaagtataatagagaatgagcgtgtgacaaaaaagataaagttacagcttccgcaaaaagtggagaatgtgcttgtctgtaaaaatccgcgctgtataagttctaccgaaaaatatttaccgcatatattttatttggaaaaccccgagcagcgcacataccgctgtgaatactgcgacgaaattatctccgcgggggatttcaaataa

SEQ ID NO: 69564 - protein, 181 aa, Unknown
  Obtained from environmental sample
  DOMAIN (131)...(177): Aspartate carbamoyltransferase regulatory chain, metal binding domain
  misc_feature (1)..(181): Xaa is any amino acid
MRFPWRLTRIQGRRILNRRNTACMSVWLCLLKFWGRKMLNIDEIKNGIVIDHIKAGLGIRIFNWLNLDKVPYNVAFVANANSQRCGKKDIIKIDNTISINLDVLGLIDPNITVSIIENERVTKKIKLQLPQKVENVLVCKNPRCISSTEKYLPHIFYLENPEQRTYRCEYCDEIISAGDFK

SEQ ID NO: 69565 - DNA, 882 bp, Unknown
  Obtained from environmental sample
  misc_feature (1)..(882): n is a, c, g, or t
atggagtttcttttttctctggcagaaaagatagaaaaagacgaaaaatacctaagaaacagcctaaaagggcggcttttagccactttattctttgaaccaagcaccagaacacgccttagttttgaagcggcaatgctccgtttagggggcagttgtctggggtttgcggagcccggttccagttccgcggtaaagggcgaaagtctagccgatacaatccgcatggcggcaagttacgccgacgcgattgttatgagaaatcccaaggaaggcgcggcgctccttgcgagcagatattcggttgttccggttataaacgcgggcgacggggggcatcaccaccccacgcagacgcttacggatcttttaacaatcaggcagcttttgggtaaaatagagaattttaccgtaggtttttgcggcgatctgaagtttggacgcacggttcactcccttgccaaagcgctggcgcgttttccgaatataaaaatgatttttatatcgccgcaggaactggttttgcctgaatatataaagaatcttttaaaaaatcagaatattatatttgaagaaagagaaaatcttgaaaaatccatgccggaattggacgtgctttacatgacccgcgtacaaagggagaggttttttaacgaggatgattatatccgccttaaagatacttatgtgcttaataaggaaaaaatgtccgttggtaaggagaaaatgattgttttacacccgctgccgcgcgtaaatgagatttccgtggagattgactcggatccaagggcggcgtattttaaacaggcgaaatacggcatgtatgtccgtatggctttgcttgctgaagttttgggggcggaagatgttaaatattga

SEQ ID NO: 69566 - protein, 293 aa, Unknown
  Obtained from environmental sample
  DOMAIN (1)...(129): Aspartate/ornithine carbamoyltransferase, carbamoyl-P binding domain
  misc_feature (1)..(293): Xaa is any amino acid
MEFLFSLAEKIEKDEKYLRNSLKGRLLATLFFEPSTRTRLSFEAAMLRLGGSCLGFAEPGSSSAVKGESLADTIRMAASYADAIVMRNPKEGAALLASRYSVVPVINAGDGGHHHPTQTLTDLLTIRQLLGKIENFTVGFCGDLKFGRTVHSLAKALARFPNIKMIFISPQELVLPEYIKNLLKNQNIIFEERENLEKSMPELDVLYMTRVQRERFFNEDDYIRLKDTYVLNKEKMSVGKEKMIVLHPLPRVNEISVEIDSDPRAAYFKQAKYGMYVRMALLAEVLGAEDVKY

SEQ ID NO: 69567 - DNA, 567 bp, Unknown
  Obtained from environmental sample
  misc_feature (1)..(567): n is a, c, g, or t
ttgatatttgcgcgattgttcttctccacccttggctttactcccgactctgcttccattaccgaattgggcattccagtaatagaagatatttcgcaaagttacggaagttggcttaaaccaatcagtaaaaaagacaaacaggacgacgcgcaggctccctctgcgggcaaatctgaaaaagaagagcctgttgtaaagtttagcggagttttctgcatactgggtcttgaagaaagggatatgctcacctcaggcgggggcgctttgctctttgcgatgaacaggaaggaaggaatgttactgcgcaatttcgccgggttagctgaagagtattttatgcccgacattaattcggcgcttgccattgttcaatttaaagaactgcaccgcaatatggcgaggcggcatgaaatcgcgcaagtttatattcaagcgagtctgaggactaggcataaacgttttatcccaatcaatgacggcgaatattgcaattattcattttcgcttgtcttggaaacggggcttaaagacgtaacggcttacgccaagaaaaaaagaaattga

SEQ ID NO: 69568 - protein, 188 aa, Unknown
  Obtained from environmental sample
  misc_feature (1)..(188): Xaa is any amino acid
MIFARLFFSTLGFTPDSASITELGIPVIEDISQSYGSWLKPISKKDKQDDAQAPSAGKSEKEEPVVKFSGVFCILGLEERDMLTSGGGALLFAMNRKEGMLLRNFAGLAEEYFMPDINSALAIVQFKELHRNMARRHEIAQVYIQASLRTRHKRFIPINDGEYCNYSFSLVLETGLKDVTAYAKKKRN

SEQ ID NO: 69569 - DNA, 849 bp, Unknown
  Obtained from environmental sample
  misc_feature (1)..(849): n is a, c, g, or t
atgggtaagaaagttattctgttagttaatatccacaaaaaaaacgcggagcaggttgcgggcgctatacaaaccgaattggaaaaacgcggagcggaagttacgtttttttcttttgacggcaagccgaanaaactgcccggcaaaaagtgggacatagctttctcgcttggcggcgacggaaccgtgctgtatacagcgcgcaatcttgcgcccttgggcgtgcctattctgcctgtcaatcttggaaacttagggtttatagcggaaataaataaaaaagactggctggacgttttcttaaaatgggaaaaaggcggaattactccggcgcatagatgtatgctggatatttccgttgagcgtaattctaaaataattatgaataatgtttgtcttaacgacgccgttatttcctattcggaaaaagcgaaacttataaaacttgatgtgcgtatcaataaagacactgcgttaggctcttacagatgcgacgggcttgttatcgctactcccacaggttctaccgcctattcaatggcggcgggcggacccattttagaccccgaaatggaagctatgatacttaacccgatttgtcccttcgctctgtcaaacagaccgttagtgcttccttcccgccaaactcttaaaataaccgtcgccgacgaacaaagatcggaagttcttttaacagttgacggacaggataccttcccgcttgaatgtcaggatgtaatttatattaagcaggcttcatacggagcggaattaatttttaacggacggtcaatgtattatcaggcgttaagaactaaacttttctggtcaggggataccaatgcttga

SEQ ID NO: 69570 - protein, 282 aa, Unknown
  Obtained from environmental sample
  DOMAIN (4)...(262): ATP-NAD kinase
  misc_feature (1)..(282): Xaa is any amino acid
MGKKVILLVNIHKKNAEQVAGAIQTELEKRGAEVTFFSFDGKPXKLPGKKWDIAFSLGGDGTVLYTARNLAPLGVPILPVNLGNLGFIAEINKKDWLDVFLKWEKGGITPAHRCMLDISVERNSKIIMNNVCLNDAVISYSEKAKLIKLDVRINKDTALGSYRCDGLVIATPTGSTAYSMAAGGPILDPEMEAMILNPICPFALSNRPLVLPSRQTLKITVADEQRSEVLLTVDGQDTFPLECQDVIYIKQASYGAELIFNGRSMYYQALRTKLFWSGDTNA

SEQ ID NO: 69571 - DNA, 1725 bp, Unknown
  Obtained from environmental sample
  misc_feature (1)..(1725): n is a, c, g, or t
atgcttgaagagctttcgattagaaattacgctttaattgattcaatcacgcttaatttccgccgaggctttaatgttcttacgggcgaaacgggagcgggtaaatcgataattgtcggctcgctgagttttttaatgggggctaaggcggagatagacgttatccgctccggatgtgaagaagccgcagtttcggcggttatatccctgaataaaaacaacgcggacgccaacgaatggcttaaagcgcgcgacattgaatgtgaagaagacaccgttattgtgcgcagaaatattaaaacatcgggcaggggttctgtctttattcaaaatattcctgtaacgcagaaggatttatcggaatttatggggctgttattcgatcttcacggacagcataaccacgagtctcttttgcgcaaggaaagccaccgccgctaccttgataactttgcggggatagagaacgaagttaaagaatttacagctctttttttggaactgacggacaagcgcaaaaccatggaagcttcgttgaagagcgaacatgagagggaagaaaggcttgaaattttaaattatgccgtagatgagattgataaagcggctgtccatgccggggaaatccgcgaattggaaaacgaggcgcagaaattatcggactttgaaaaattggcgggttttataaataccgccgcgtcttgttttacagacggagaacaatcggcgttaagccttactcgcagggctaaaaacgccctggacagcgcctcctcggtggattcttctcttggggaaataaacaggcggtttgaaaacctgtactacgaagcggaggatattgcgggagaattccgctcttacaaggaaggtcttgcctttgatccgcaaagactggaagaagtaaatgaaagacttgcgtttttgaataaattaaaaaagaagtacgcaaaagacagccttgccggaaatgaggaagaggctattttattgtataaaaccaacgcgcaggcggaaattgaagcccttagcggcgcggaagaaaacaggggcaagttaaaagaagcaatcagcgttttggaaaaaaagatagtttcaaaagctcagggtttaagggaaaaaagaaccgccgcaagcgcgaaattaagccagcttataaccgagatattaaaaaatcttggaatgccgaacgcccgttttcaggcggcggttgcgccaaaacaaaatgaaggacagactacatttggaccttacggcgcggaagaaatagaatttttaatttccgccaatacaggcgagccgcttaaagatttggcaaaaatagcctcaggcggagagctttccagagtgatgttggcgattaaaaccgctcttttgtccgatgcccgccgtgacgacgaaagcgttgaaaccctgatttttgacgagattgacgcgggtattggcggtgaagttgcgcttaaagtaggcgagtatcttgtaaaaataggcaaatttaagcaaattttttgcgttacacatctagcgagtatcgctgttcgtgccgataatcattttaaggtagaaaaaagaaccgaaggcggcagaacctacaccggaatcgggccgttaagcgccgatggacggagaaaggagattgccaggatgttggcgggcgacgcgggaacagccgcgattgcccatgccgacgatttgattcagaaatacggaaaacggagcgattaa

SEQ ID NO: 69572 - protein, 574 aa, Unknown
  Obtained from environmental sample
  DOMAIN (1)...(530): RecF/RecN/SMC N terminal domain
  misc_feature (1)..(574): Xaa is any amino acid
MLEELSIRNYALIDSITLNFRRGFNVLTGETGAGKSIIVGSLSFLMGAKAEIDVIRSGCEEAAVSAVISLNKNNADANEWLKARDIECEEDTVIVRRNIKTSGRGSVFIQNIPVTQKDLSEFMGLLFDLHGQHNHESLLRKESHRRYLDNFAGIENEVKEFTALFLELTDKRKTMEASLKSEHEREERLEILNYAVDEIDKAAVHAGEIRELENEAQKLSDFEKLAGFINTAASCFTDGEQSALSLTRRAKNALDSASSVDSSLGEINRRFENLYYEAEDIAGEFRSYKEGLAFDPQRLEEVNERLAFLNKLKKKYAKDSLAGNEEEAILLYKTNAQAEIEALSGAEENRGKLKEAISVLEKKIVSKAQGLREKRTAASAKLSQLITEILKNLGMPNARFQAAVAPKQNEGQTTFGPYGAEEIEFLISANTGEPLKDLAKIASGGELSRVMLAIKTALLSDARRDDESVETLIFDEIDAGIGGEVALKVGEYLVKIGKFKQIFCVTHLASIAVRADNHFKVEKRTEGGRTYTGIGPLSADGRRKEIARMLAGDAGTAAIAHADDLIQKYGKRSD

SEQ ID NO: 69573 - DNA, 813 bp, Unknown
  Obtained from environmental sample
  misc_feature (1)..(813): n is a, c, g, or t
atggcgaagactaccgatcaagatcgggcattgtaccacgagaaggctaaaatttatgtagcaatgaccaaggcgttattggatactgaaaaaaaacttcttgtagaagcaaaaaaaaacacacctaattctcctattcaaaaattggctctcgccgatgaaatgcttaatttggcttcgtattatatcgcgataaacggattgtctcaggcggttcttaaatcaaaaaatgaggaagccttgaacgacgcgagaaaatcgctttacaaggcggtaatttaccttgaagaagttgtaagtaattatatagacgctccattttctgattatgcggaaaaattaacggcgatagaatcatacaatcaggatcagaggtatcatttaatttgtaagatgggttttgctatagatatgctggagcaggcttacggcgacaattcaaaatggagatggacatttgtcgatcttgagggacgttttgccgtaaccgcaaagaatatacttgatttaaaaaatatttacgagaacatggctcccggagcggaatactatgattctaccgtgtatcatcttagattggtaaaaaaacttatctcgcaggcggcagatcgttaccgtgaaaaatacgagttgagcacggggcaaattcttgattttaaaactgggataaatttccttggcgcgttacgccgtttgcacattgtcctgtccgaaagcgaagaagctaatgaagtaaaaaagaaattggcgatatggtcaacaaaacttgaaaccgatcataaaaaacaagaagaagccaaaaagagaacatga

SEQ ID NO: 69574 - protein, 270 aa, Unknown
  Obtained from environmental sample
  misc_feature (1)..(270): Xaa is any amino acid
MAKTTDQDRALYHEKAKIYVAMTKALLDTEKKLLVEAKKNTPNSPIQKLALADEMLNLASYYIAINGLSQAVLKSKNEEALNDARKSLYKAVIYLEEVVSNYIDAPFSDYAEKLTAIESYNQDQRYHLICKMGFAIDMLEQAYGDNSKWRWTFVDLEGRFAVTAKNILDLKNIYENMAPGAEYYDSTVYHLRLVKKLISQAADRYREKYELSTGQILDFKTGINFLGALRRLHIVLSESEEANEVKKKLAIWSTKLETDHKKQEEAKKRT

SEQ ID NO: 69575 - DNA, 573 bp, Unknown
  Obtained from environmental sample
  misc_feature (1)..(573): n is a, c, g, or t
gtgccgaaacacattgacgaagaaaaaataaacgccgccgtcgcccccgaaaaagacgtggattgctttcatcctgtttcggttggaaatttgatactggacagacccgggtttttgccgtgtacgccgcatggcgttcttgtttttctaaaagagtataatatccccgtctccggcgcgaatgttgtggtagtgggaagatcaaacattgtggggaaaccgctagcaaatcttttaatacgccgtgaatataacgcaaccgtaaccatttgccacacaggcacaaaagaccttgccagccatactttgcaagcggacattttaatagcggcggcagggaaagcgggatttataaaacctgaaatggtaaaagaaggagcggcagttattgatgtgggaataaaccgtgtgcctgattcatcaaccgagaaaggctatagagtttgtggcgatgtcgatccctcagtagcggaaaaagcggcgttttttacgccagtgcccggcggcgtaggactgatgaccgtcgcaatgcttttgcaaaatgttgtagaggcggcggaaaggagtttgtaa

SEQ ID NO: 69576 - protein, 190 aa, Unknown
  Obtained from environmental sample
  DOMAIN (24)...(190): Tetrahydrofolate dehydrogenase/cyclohydrolase, NAD(P)-binding domain
  misc_feature (1)..(190): Xaa is any amino acid
MPKHIDEEKINAAVAPEKDVDCFHPVSVGNLILDRPGFLPCTPHGVLVFLKEYNIPVSGANVVVVGRSNIVGKPLANLLIRREYNATVTICHTGTKDLASHTLQADILIAAAGKAGFIKPEMVKEGAAVIDVGINRVPDSSTEKGYRVCGDVDPSVAEKAAFFTPVPGGVGLMTVAMLLQNVVEAAERSL

SEQ ID NO: 69577 - DNA, 1329 bp, Unknown
  Obtained from environmental sample
  misc_feature (1)..(1329): n is a, c, g, or t
atgaaattgaaatatttttttgaaacttacggttgtcagatgaacagcgccgaatcggcggcattggctcttgtttgcaaagaacgcggttgggcgcaggctgaaaacagcgaaggcgcggatcttattttgcttaacacctgctccgtgcggctgacggcggaaaaacgcgcccttggtcgtatcgctgattacgccggaattaaaaagaaacaaaaccgccgctttacgctggttgtcgccggttgtatggcggaaaggttaggtgaaaagctaaaagaaaaatatccgcaggtagattatgttatgggaacatcagcccgttctgtttttcccctgatacttgaagctgtcgaaaacggagtaaaagccgagcttgatctaaacgaaaaacccgttttctctttttccgattcgcacatggaagaaggacagttccgcagttttgtcccaatcatgcacggttgtaacaatttttgctcttactgcattgttccgtatgtgcggggcagggaagtctcccgcgacccgcaaaatatcgcgcgggaaatcagtcttgtgggcgagagaggtgtgcgtgaaattaccctcttgggacagaatgtaaacaattaccgttgggataatatcgactttgccgctcttttaaaacttgccgccgacgaagcagaaaaaagcggggtaaaatggatacgcttcctttccgctaatccgggaaatttttcccgcgatacaatacaggttatggcttccaataaagttttttgccgccatctgcatctgcccgtccagcatggatcggacagcgtgttaaaagcgatgaaccgaggttatacggcgcagagatttctggaattggtcagggaaatccgagccgcaatgcccgaaattaccctatccacggacattttagtcggtttccccggcgaaaccgaggaagatgtggagcagacgctccagttaatggaagaaatcgaatttctttatgcgtatatgtatcattttaacccccgagaaggcacaaaagcctttgaattccccgacagaatagacgaagaagtcaaaaaagagaggctagagagggtgatagccctacagcaaaaaatcacaaatcggctgttgaaggcaagaatcggcagtacagaaactgttttaatagaggggatctcccgaaaaaatgccgatgaattaataacaaggacagaaaaagacgaaatggctgtcgttcccggtcataagtcgatgataggctcctttggcaagcttgtcctgtccggattgaaagggaatacatttagatcaaaggagatattatgccttggagattga

SEQ ID NO: 69578 - protein, 442 aa, Unknown
  Obtained from environmental sample
  DOMAIN (150)...(322): Radical SAM superfamily
  misc_feature (1)..(442): Xaa is any amino acid
MKLKYFFETYGCQMNSAESAALALVCKERGWAQAENSEGADLILLNTCSVRLTAEKRALGRIADYAGIKKKQNRRFTLVVAGCMAERLGEKLKEKYPQVDYVMGTSARSVFPLILEAVENGVKAELDLNEKPVFSFSDSHMEEGQFRSFVPIMHGCNNFCSYCIVPYVRGREVSRDPQNIAREISLVGERGVREITLLGQNVNNYRWDNIDFAALLKLAADEAEKSGVKWIRFLSANPGNFSRDTIQVMASNKVFCRHLHLPVQHGSDSVLKAMNRGYTAQRFLELVREIRAAMPEITLSTDILVGFPGETEEDVEQTLQLMEEIEFLYAYMYHFNPREGTKAFEFPDRIDEEVKKERLERVIALQQKITNRLLKARIGSTETVLIEGISRKNADELITRTEKDEMAVVPGHKSMIGSFGKLVLSGLKGNTFRSKEILCLGD

SEQ ID NO: 69579 - DNA, 1377 bp, Unknown
  Obtained from environmental sample
  misc_feature (1)..(1377): n is a, c, g, or t
gtgaaccttctgccntacactgtgagtttctacagcattggcgggagcgttgtgccaagccagtctgttacttatgcttccgttgcgnctagtcccacggatcctgtgagaaaaggctatgagtttatgggctggtatagcgataccagtttgacagaagagtatgattttgcaagcccggtgagcggcaacgtggccctgtacgcgaaatggagttcagttgtaaacgggataaggcttaacaaatccgcccttaacctgttcgtcaatgaaaaagaaacgcttaacgtttcgattaacaccggcaacgcgctgttcgaggcggtaacatggagttcgggcaacacctcagtcgcaaccgttgaacagaacggtacggtcaccgccgttggaaccggaaccgcgattatctgggcatcgacaggggtcggcttacagaaggctcagtgcgaagtaacggtgaccagcgtcatatccgccatagcgggggtaactatcccggcaatcggcaggatccccgcaacggcaattaccgaaacggagcagtacaccggaaccgttgagtggaaccccaaggataatccgtttaagtttgatgttgtatatacggcaaccattacccttacgtcaaaaaccggttacagtctgcaaagagtaccggcaaacttctttaccgttgcagggacagcgtcagtcagcaatgtcacgggatcaggcattgtcacggcggtattcccgccggcagccgccatgaataacagcgatgaagaattacagacatatttgtcgggccttccggccaataccgccgacactccctattttattgcgcttaacgcggacagccttgccaatgtcggaaacatacttaaagacaaccctacaaaatacgtcacccttgacctttccggcagtacaataaatgaaattcagtcttatgctttttatgaagaatattatgatagtgcgcttgttagttacccttgttactttcttaccggcataatcatgccagacagcgttaaaagcattgggaataatgcttttcgtggctgcgaaaaccttaccagcgtaacaataggggagaacgtcagtaccattgggaacaatgcttttcgtggctgtgtaagccttaccagcgtaactatacccgacagtgttaccagcattaagaatgaggcttttgctttctgcgaaaaacttaccaccgtgacttttttaggcaacaacttaactacgaacagttttgcctataacgcgttcttaggcaacttaagggaaaattatatatcatcaagcacaaatcaaggaaattctggaacatataccacaaaagcgcctgtaaactatgattcaacatggacaaaacagccgtag

SEQ ID NO: 69580 - protein, 458 aa, Unknown
  Obtained from environmental sample
  DOMAIN (74)...(152): Bacterial Ig-like domain (group 2)
  misc_feature (1)..(458): Xaa is any amino acid
MNLLPYTVSFYSIGGSVVPSQSVTYASVAXSPTDPVRKGYEFMGWYSDTSLTEEYDFASPVSGNVALYAKWSSVVNGIRLNKSALNLFVNEKETLNVSINTGNALFEAVTWSSGNTSVATVEQNGTVTAVGTGTAIIWASTGVGLQKAQCEVTVTSVISAIAGVTIPAIGRIPATAITETEQYTGTVEWNPKDNPFKFDVVYTATITLTSKTGYSLQRVPANFFTVAGTASVSNVTGSGIVTAVFPPAAAMNNSDEELQTYLSGLPANTADTPYFIALNADSLANVGNILKDNPTKYVTLDLSGSTINEIQSYAFYEEYYDSALVSYPCYFLTGIIMPDSVKSIGNNAFRGCENLTSVTIGENVSTIGNNAFRGCVSLTSVTIPDSVTSIKNEAFAFCEKLTTVTFLGNNLTTNSFAYNAFLGNLRENYISSSTNQGNSGTYTTKAPVNYDSTWTKQP

SEQ ID NO: 69581 - DNA, 957 bp, Unknown
  Obtained from environmental sample
  misc_feature (1)..(957): n is a, c, g, or t
atggccgaggttatggcacacagaattaacgcgctgaataaggcgcaggcgtaccaactggcggatattaccaaaactccgccgcaattcggggcgattacaccgcgctggctgacacgttttctggaattcaaaggtctggaagccggcatctaccgcgtaaataaagtggttgagggggaaacgcctcttgatgttttatgctcgtcggaaaaaaagagcgcggagattcccgaagggtatgtacagtaccagcagaagccgagggaatacatcctcaactcaatttctaccattataaacgtggatacagtggtggaggatgtattttcttcgccctatgaccagacaaaagaacagcttcatctggcgattgaaagccttcgcgaacggcaggagagtcagattatcaataacgacgattacggcctgttaaaaaatgttcccgcaggccagcgcataacgcccggaaataaagcgggttcgcccatgcccgatgatctggacgaattgctttcaaaagtgtggaaagagccgtcgttcttcctcgcgcacccgagggctgtcgccgcttttcagcgtgaatgtacgcgcaggggtgtccctcctgttaccacatcccttgtcggcggcacgtttattctgtggcgcggcattccgatcatacctacggataaactgctggtggacggcttgaaaaaccccaagagcaagagcggcaagaccaatattctgctggtgcgctcaggcgaagcgaaacgcggagttatcggcctgtaccagacaggcgtgcagaacgaacaaggcagaggactctccgtgcgtttcaggggagtggacaacaagggccttgcgtcctatctcctgtcgctgtattgctcagccgctattctttcagatgacgccatagccgttcttgaagatgtggaagtgggtaactattatgactatacctga

SEQ ID NO: 69582 - protein, 318 aa, Unknown
  Obtained from environmental sample
  misc_feature (1)..(318): Xaa is any amino acid
MAEVMAHRINALNKAQAYQLADITKTPPQFGAITPRWLTRFLEFKGLEAGIYRVNKVVEGETPLDVLCSSEKKSAEIPEGYVQYQQKPREYILNSISTIINVDTVVEDVFSSPYDQTKEQLHLAIESLRERQESQIINNDDYGLLKNVPAGQRITPGNKAGSPMPDDLDELLSKVWKEPSFFLAHPRAVAAFQRECTRRGVPPVTTSLVGGTFILWRGIPIIPTDKLLVDGLKNPKSKSGKTNILLVRSGEAKRGVIGLYQTGVQNEQGRGLSVRFRGVDNKGLASYLLSLYCSAAILSDDAIAVLEDVEVGNYYDYT

SEQ ID NO: 69583 - DNA, 1467 bp, Unknown
  Obtained from environmental sample
  misc_feature (1)..(1467): n is a, c, g, or t
ttgaagatgtggaagtgggtaactattatgactatacctgacggttacggcttgcctgatccggaagaacttgaaaagtgggcgctgccctattttcccgaacttcaggaaaaaaagtccggtaaaaacgaagacgcccaaaccgcgtactctcctgttgtcgcgtcatataaggatgtgtctgtcaaagacgcgcccgatatcgctcctccttccgttggggaatcttctaaaatctctccgttggacacaggcggctttgacgtaaaccgcatacggcaggattttcccatcctgaacgaaaaagtcgccggaggcaaaccactggtctggcttgacaacggggcgacaacgcaaaaacccaacgccgtaatagaccgtatctcgtatttttacaggcacgaaaattcaaatgtccacaggggcgcgcacgagcttgcggcccgctccaccgacgcttacgaagcagcgcgggaaaccaccgcgaaatttttaggcgcgccgtcaaaggacaatatcgtgtttgtgcgcggaacaacggaaggcattaaccttgccgcccaaagttacgtgaaacccctgctctcccccggcgatgaaatcatactcactatacttgaacaccatgccaacattgtcccctggcagatgatagcgcaggagacaggcgcgctgataaaagtcgctcccgttgacgataccggtcagattattctgcccgaatacgcgcggcttttctgccgccgcacaaaatttgtttccgtaactcatgtttcaaacgctcttggaaccattacccctgttagggaaatgattcaaatcgcgcacgcaaacggggtgcgaatccttgtagacggggcgcagtctgtcgcgcatacgccgcttaacgtaaccgagttggacgctgatttctttgtcttctccggccataaaattttcggccccacaggcataggcgcgctgtacggaaagtcggacgcgctagaagaggcaaagccgtatcagggcggcggaaacatgataaaagacgttacctttgaacgcactgtatacaatgacgccccggtcaagtttgaagcgggaacgggcaatattgccgacgccgtaggccttggcgccgctctggattatgtttccggcataggaatagcgaacataagcgcctacgaacacgcgctgttaaattacgcgacaggcgagctgaaaaaaataaacggcttgcatcttatagggaccgccgccgaaaaagcaagcgtcctgtccttcgttctcgacaacgcaagcgtagaacaggtaggcaaacacctggcaagcaaaggaatcgccgtccgcgccggccaccactgcgcccagccaatcctgcgccgtttcggccttgaagccacagtacgcccgactatagcgttttacaatacagcggaggaaattgataagttagtttgcgctgtgaaggaaatagcaatataa

SEQ ID NO: 69584 - protein, 488 aa, Unknown
  Obtained from environmental sample
  DOMAIN (107)...(483): Aminotransferase class I and II
  misc_feature (1)..(488): Xaa is any amino acid
MKMWKWVTIMTIPDGYGLPDPEELEKWALPYFPELQEKKSGKNEDAQTAYSPVVASYKDVSVKDAPDIAPPSVGESSKISPLDTGGFDVNRIRQDFPILNEKVAGGKPLVWLDNGATTQKPNAVIDRISYFYRHENSNVHRGAHELAARSTDAYEAARETTAKFLGAPSKDNIVFVRGTTEGINLAAQSYVKPLLSPGDEIILTILEHHANIVPWQMIAQETGALIKVAPVDDTGQIILPEYARLFCRRTKFVSVTHVSNALGTITPVREMIQIAHANGVRILVDGAQSVAHTPLNVTELDADFFVFSGHKIFGPTGIGALYGKSDALEEAKPYQGGGNMIKDVTFERTVYNDAPVKFEAGTGNIADAVGLGAALDYVSGIGIANISAYEHALLNYATGELKKINGLHLIGTAAEKASVLSFVLDNASVEQVGKHLASKGIAVRAGHHCAQPILRRFGLEATVRPTIAFYNTAEEIDKLVCAVKEIAI

SEQ ID NO: 69585 - DNA, 699 bp, Unknown
  Obtained from environmental sample
  misc_feature (1)..(699): n is a, c, g, or t
atggaaatagatcaagagatagaacaaatcgcggcggaattgttaagcgattttcagaagaagcgcgattttgccaagcagccggtaaaatcggtcataatagaaattatcagtaaattgcatcatcttttgtttccgggaatttttgaaagcgtattatcgggcggttccgcgaaaaataaactaaaccttatgcttgaggaagtttccaatgatttggccgcgcagacaagactggctttgcgttatgatctgcgctataaagacacagaacaggacgagattgataaaaaagcgtgggaaataacgcgccaatttattttaaagattccttcaataaaggattttcttgaaaaagacattgaggcggcttacagcggagacccggccgcttacagcaaggcggaaattgtcatatcatatcccggtatttacgcaacaatggtttacaggatagcgcatgaactttacctgctgtcagtgcctcttatccccagaattatgagcgaatacgcgcacagcgcccacgggcatagacattcatcccggagcggctataggcaagtatttttttatagaccacggcacaggtattgtcataggcgagaccgcaattatcgggaacaacgtaaaattgtatcagggagtaacccttggagccttgtccacaaaaggcggacagagcataaagggcgttaa

SEQ ID NO: 69586 - protein, 232 aa, Unknown
  Obtained from environmental sample
  misc_feature (1)..(232): Xaa is any amino acid
MEIDQEIEQIAAELLSDFQKKRDFAKQPVKSVIIEIISKLHHLLFPGIFESVLSGGSAKNKLNLMLEEVSNDLAAQTRLALRYDLRYKDTEQDEIDKKAWEITRQFILKIPSIKDFLEKDIEAAYSGDPAAYSKAEIVISYPGIYATMVYRIAHELYLLSVPLIPRIMSEYAHSAHGHRHSSRSGYRQVFFYRPRHRYCHRRDRNYREQRKIVSGSNPWSLVHKRRTEHKGR

SEQ ID NO: 69587 - DNA, 300 bp, Unknown
  Obtained from environmental sample
  misc_feature (1)..(300): n is a, c, g, or t
ttgtatcagggagtaacccttggagccttgtccacaaaaggcggacagagcataaagggcgttaagcgccatcctacaatttgcgataatgttacgatatactcgggcgcgagcattttaggaggggacactatcataggcgaaggcgttgtaataggcggaaacgcttttgtaatacggtcggttccggaaaaaacccgcgtaagcgtaaaaaacccggaattgcagtttaagtccagcggcaatatttcttcacacatagaattggatcagattgacttctggcattatgatatttag

SEQ ID NO: 69588 - protein, 99 aa, Unknown
  Obtained from environmental sample
  misc_feature (1)..(99): Xaa is any amino acid
MYQGVTLGALSTKGGQSIKGVKRHPTICDNVTIYSGASILGGDTIIGEGVVIGGNAFVIRSVPEKTRVSVKNPELQFKSSGNISSHIELDQIDFWHYDI

SEQ ID NO: 69589 - DNA, 435 bp, Unknown
  Obtained from environmental sample
  misc_feature (1)..(435): n is a, c, g, or t
atgaaaaaagccttcttttttttgttattaattttttctttttacggcgtctgtttttctcaaactgataataccgtaaatgttattgtagaaattaacaatattgtcgctaacggcggaaaagtttatttggtcgttttttttacagaagaaagttttaagaaagaaaaaccggatctggcggttgaaataccgtccgataaatcctttgcaataaaagaaggatcattaccgcgcggggaatgtgttttatttgtatttcaggacgcaaataacaatataaaacttgattgcggactttttgggattccaaaagaaaaattcggcatatccaattattttgggaaaggaattccttcaagaaattttgataaacaaaaaataatgatcgatgaaaacaccggaataatagttcttggtttgtataaattttaa

SEQ ID NO: 69590 - protein, 144 aa, Unknown
  Obtained from environmental sample
  SIGNAL (1)...(20)
  misc_feature (1)..(144): Xaa is any amino acid
MKKAFFFLLLIFSFYGVCFSQTDNTVNVIVEINNIVANGGKVYLVVFFTEESFKKEKPDLAVEIPSDKSFAIKEGSLPRGECVLFVFQDANNNIKLDCGLFGIPKEKFGISNYFGKGIPSRNFDKQKIMIDENTGIIVLGLYKF

SEQ ID NO: 69591 - DNA, 1734 bp, Unknown
  Obtained from environmental sample
  misc_feature (1)..(1734): n is a, c, g, or t
ttgttgccggtgtgccgccgcgacatggacgagcgcggctgggaacagtgcgatttcatctttgtttccggcgacgcttatgtagatcacccttcttttgcggcggcgcttttgtgccgcactctggaagcggcgggattccgcgccggaataattcctcaacctgattggaaagacccctcttcatatacaattctgggacgaccgcgtctcgcttttttggtcggcgcgggcaacatggattccatggtcgcgcattataccgccgcaaaacgcaagcgctccgacgacgcgtattcgccgacaggaaaaagcggactgcggccggaccgcgccactttggtttatgtcgagggaatcaggcgcgcgtataaggatgtgccggtaattatcggcgggatcgaggcaagcctccgccgctttgcccattatgattactggtctgacactgtgcgccgctcaattctgcttgattcaaaagcggatattttggtctatgggatgggagaaaaacccttgcttaacatagcgcgccggttaacggaaggtgaggcaattggcagtataacaaatgagaggggaacctgcgtccgcgttcacggaagagccgcggttgataaaggcaaaaccgaacaatggaaggacgcgtgctttctgccgggatatgaggcggtaaaaggtaaagacgaggcttctttattcgcatacgccgaacactttatggcgcagaaacaaaactccgatccgttaagcgcaaaaccgctggcggaggaaaacgatggggatcgctgggttattcaaaatcctcccgctctgcccctctcaacaaaagaactggataatttgtacgagcttccctttacgcgaaaagcacatcctatgtatgacgcgcaaggcgggataaacgcgcttaaggaagtttccttttcattgatttcaagccgagggtgttacggcggctgttctttttgcgcgattaccgctcatcaggggcgggctgttgcagggcgcggcagagacagcctgctccgcgaagcgcgcgctcttgccgcgcgtcccgactttaaaggatatatccacgatgtgggcggacctaccgctaactttttccggcctgcctgtgataagcaggagcgcggcggtttttgcgcggacagggaatgtctgtatcctcaagcctgcccgaacttaaaagcggatcacagtcagtatattaaaacattaaaagcgctgagtaaaattaaacgcgttaaaaaagtatttatccgttcaggtctgcgcttcgattttattcagcatgataaaaaatacgggaaagaatttttggaagacttgtgccgattccatgtaagcgggcagttaaaagtcgcgccggaacatatctgcgaagatgtgcttgaagcgatgggcaaatgcccccactcaatttatgaagaattcagggaagaatttgcggcaataaacgagaggcttgggatgaaacagtacttgctgccgtattttataacttcccacccgggcgcgggcatgaaagaagcggaagaacttgcgcggtatttgaaacaaacgcgctttgtgcccgaacaaacgcaggatttttaccccactccgggaactctgtctacggtgatgtaccatacagggctcgatcccagaacaatgaagcctgtttatgttgcgaagggagaaaaagaacggcgcaaacaaaaagaattactgcgagaaaagaaataa

SEQ ID NO: 69592 - protein, 577 aa, Unknown
  Obtained from environmental sample
  DOMAIN (311)...(520): Radical SAM superfamily
  misc_feature (1)..(577): Xaa is any amino acid
MLPVCRRDMDERGWEQCDFIFVSGDAYVDHPSFAAALLCRTLEAAGFRAGIIPQPDWKDPSSYTILGRPRLAFLVGAGNMDSMVAHYTAAKRKRSDDAYSPTGKSGLRPDRATLVYVEGIRRAYKDVPVIIGGIEASLRRFAHYDYWSDTVRRSILLDSKADILVYGMGEKPLLNIARRLTEGEAIGSITNERGTCVRVHGRAAVDKGKTEQWKDACFLPGYEAVKGKDEASLFAYAEHFMAQKQNSDPLSAKPLAEENDGDRWVIQNPPALPLSTKELDNLYELPFTRKAHPMYDAQGGINALKEVSFSLISSRGCYGGCSFCAITAHQGRAVAGRGRDSLLREARALAARPDFKGYIHDVGGPTANFFRPACDKQERGGFCADRECLYPQACPNLKADHSQYIKTLKALSKIKRVKKVFIRSGLRFDFIQHDKKYGKEFLEDLCRFHVSGQLKVAPEHICEDVLEAMGKCPHSIYEEFREEFAAINERLGMKQYLLPYFITSHPGAGMKEAEELARYLKQTRFVPEQTQDFYPTPGTLSTVMYHTGLDPRTMKPVYVAKGEKERRKQKELLREKK

SEQ ID NO: 69593 - DNA, 387 bp, Unknown
  Obtained from environmental sample
  misc_feature (1)..(387): n is a, c, g, or t
ttgtgcccttacgggcaccgggggttcgaatccccctctctccgtccggtattaggagagatgaccgagcggccgaaggtgcacgattggaagtcgtgtgtacccggaagggtaccgagggttcaaatccctctctctccgttaatttatttaaggagtgtatttatggaagaacaagtaagagccgcgttggaaaatgtacggccgtctttgcaggcagacggcggagatgttgagtttgtctctgtagacgacgaaggaaccgtttcggtaaaacttaccggggcttgcggtcactgcccgatgtctcagatgacccttaaaatgggaatcgaaaattacctcaaaaaggaaataccccaagtcaaagccgtcgtcggtatctga

SEQ ID NO: 69594 - protein, 128 aa, Unknown
  Obtained from environmental sample
  DOMAIN (56)...(128): Domain of unknown function DUF59
  misc_feature (1)..(128): Xaa is any amino acid
MCPYGHRGFESPSLRPVLGEMTERPKVHDWKSCVPGRVPRVQIPLSPLIYLRSVFMEEQVRAALENVRPSLQADGGDVEFVSVDDEGTVSVKLTGACGHCPMSQMTLKMGIENYLKKEIPQVKAVVGI

SEQ ID NO: 69595 - DNA, 612 bp, Unknown
  Obtained from environmental sample
  misc_feature (1)..(612): n is a, c, g, or t
atgcgggaaaacggccttaacgcgcgaaaaagcaggaagcatgtcccgacgacggactccaaccatgcctttgcagtctttgaaaacatactgtcccgggagttttatgccgaatccggcggcgcaaagtgggtttcggacattacctatctgcgcacggcaaacggctgggtgtatctgaccatagtgcttgacctgtacgacagaaaagcaataggctgggcgcttagccttggcatggaggcttctgagaccagcattgccgctttggaaatggcggtcaaaagccggagccctcaatgcggcctgatattccattcggacaggggcgtacagtattgcgcccaatccttccgcgacgttttgcgggaaagctgtccggatgcccgtcagagcatgagcaggaagggcaattgctgggacaacgcgtgcgccgaatcgtttttcaaaacgctgaagagggaactggaaacattggacggcaggcattcggaggctgaagtcaggcaatcggtatttttctacattgaggcgtattacaatcgcatccgcatgcattcggcgcttgactatgtagcgcctaacgtgtttagcttaggcacccccgcttaa

SEQ ID NO: 69596 - protein, 203 aa, Unknown
  Obtained from environmental sample
  DOMAIN (36)...(199): Integrase core domain
  misc_feature (1)..(203): Xaa is any amino acid
MRENGLNARKSRKHVPTTDSNHAFAVFENILSREFYAESGGAKWVSDITYLRTANGWVYLTIVLDLYDRKAIGWALSLGMEASETSIAALEMAVKSRSPQCGLIFHSDRGVQYCAQSFRDVLRESCPDARQSMSRKGNCWDNACAESFFKTLKRELETLDGRHSEAEVRQSVFFYIEAYYNRIRMHSALDYVAPNVFSLGTPA

SEQ ID NO: 69597 - DNA, 357 bp, Unknown
  Obtained from environmental sample
  misc_feature (1)..(357): n is a, c, g, or t
atggggaagaaaagtacagaacggcgtgtttacacgaaggaattcaaagccgaggcggtagcgttggccgagaagaaagaaaaaccggtaagccggatcgcggcagatttggggatcaacgagaatatgctgcgccgatggatgcaggcttctcgggagtcggcgggaagcggcctgcaagcgttcccaggccacgggcggccaaaggatgcggagcttgcccgcctgcggaaagagaacaaagcgctcagggaggcaaatgaaatcctaaaaaaagcggcggtcatcttcgcgcagggngaccccagtaatggcgtatcatttcatgaaagcgaaccaggaccggtacgccgttaa

SEQ ID NO: 69598 - protein, 118 aa, Unknown
  Obtained from environmental sample
  DOMAIN (8)...(90): Transposase
  misc_feature (1)..(118): Xaa is any amino acid
MGKKSTERRVYTKEFKAEAVALAEKKEKPVSRIAADLGINENMLRRWMQASRESAGSGLQAFPGHGRPKDAELARLRKENKALREANEILKKAAVIFAQGDPSNGVSFHESEPGPVRR

SEQ ID NO: 69599 - DNA, 369 bp, Unknown
  Obtained from environmental sample
  misc_feature (1)..(369): n is a, c, g, or t
atggcatatggcattgattttattaaaagggcagtggcttacagacaagaagggcattcctttgctcaattacgcgaggcatctgctatctcgtccgcgacatattacgactgggaagctaagctaaataacgggcattttgatatagttgtcaaacgcgagcgccatcgcaaaatagacaaagaagcgcttataaaggcagtagcggaaaaacctgacgctttccttaaggaatatgcggaacaattcaattgtacggcgactgccgtctactacgcccttgaaaaactcaatataacgcgaaaaaaaagacctttacctattctgaaaaatccgagcaagagcgtgcggagtttgtcgcaaggctaa

SEQ ID NO: 69600 - protein, 122 aa, Unknown
  Obtained from environmental sample
  DOMAIN (1)...(118): Transposase
  misc_feature (1)..(122): Xaa is any amino acid
MAYGIDFIKRAVAYRQEGHSFAQLREASAISSATYYDWEAKLNNGHFDIVVKRERHRKIDKEALIKAVAEKPDAFLKEYAEQFNCTATAVYYALEKLNITRKKRPLPILKNPSKSVRSLSQG

SEQ ID NO: 69601 - DNA, 402 bp, Unknown
  Obtained from environmental sample
  misc_feature (1)..(402): n is a, c, g, or t
ttgccgcagtgtatacgcagcgacaacggcccgccgttcgccagcgcgcttaatttctgggggttgtcgaaattatcggtgtggtggatgacgctgggaatacagcttgaccgcgacgattccgggcatcccgaacagaacggcgggcatgaaaggatgcaccgtgacatgaagactgaactgcaggggcagattgacggatcgcttaacgaacaccagaaagtgtttgatcagtggcgaaaagattttaacgaagtgcgtccgcatgaagctcttgatatgaaagtgcccgccgacatttacacaaaatctaaaataaaatttattaacgaaaatgtcgaacacagatacgggaggggttttaaagtcagggttgtcaacgacaggggggtattaatttaa

SEQ ID NO: 69602 - protein, 133 aa, Unknown
  Obtained from environmental sample
  misc_feature (1)..(133): Xaa is any amino acid
MPQCIRSDNGPPFASALNFWGLSKLSVWWMTLGIQLDRDDSGHPEQNGGHERMHRDMKTELQGQIDGSLNEHQKVFDQWRKDFNEVRPHEALDMKVPADIYTKSKIKFINENVEHRYGRGFKVRVVNDRGVLI

SEQ ID NO: 69603 - DNA, 1428 bp, Unknown
  Obtained from environmental sample
  misc_feature (1)..(1428): n is a, c, g, or t
atgaaatgggaaaccgtaatcggtcttgaaattcataccgagctttcgacaaaatcaaaaattttctgcggctgtacaaccgcctacggcggagagccgaacacccacgtctgccccgtttgctcaggaatgcccggcactctgcctgtgctgaaccgcgccgtgcctgaatacgcgatgaggcttgggctcactcttaactgcgagattacaaggctcagcaagtttgacagaaaaaattatttttacccagatcttcccaacgcgtatcagatatcccagctttacgccccgatttgccgcaacggttatcttgaaattgaagttgaaggaaagaaaaggaaaatcggtattcacgagatacacatggaacaggacgcgggaaaacttgttcacgacccgaagggaaacaattctttcatggactttaacaggtgcagcgttccgcttttggaaattgtatccgagccggatttgcgaagttccgccgaagtaatcgcctaccttgaaaaaatgcgcgagacgcttctttatcttgatatcagcgactgcaaaatgcaggaaggctcaattcgcgccgatgtcaatttgtccattcgccccttcggcggagaacttggcacgcgcaccgagacaaaaaacatgaactcatttaaggcgatagcgcgagctattgaatatgagacggaacgtcagattgaaatacttgaggacggcgggaaagttgttcaggagacacgcaggtgggacgacgaaaaaggcctctcctacggaatgcgttccaaagaaaacgcgcaggattaccgctatttcccggagcctgatcttctgccgcttcacattgacgacgcttggattgagagtgttaaatcaaatatgccggaactcgctcagcaaaagcgcgagcgttatgtccgcgactggggtatttccgaatccgcggctgtcgttcttacagttcacaaaaagatttccaacttgtttgagatcgtctcacaaaaaagcaaccagccgcaggaagccgcgaatttgatcacgggcgaaattatgcggctgatgaacaacgccaatttacttcccgaagacctttccatagacgcggataaattatcggctctcatcggttttgtcgcgggcggaaaaattaaccgcagcgcgtacaaggagacagtcgaagcggtattcacggacaatgttgatcctgaaaaatatatcgcggaaaagggacttatgatggtcagcgacgacaacgccgtaatggaagcggtaaaagctgtgttagcggaaaatgccggtgttgttgattcatggcgcggaggaaagacacaggtttttggtttcctgatgggacaggttatgaagaaactgggcaaggggggaaatccggagattgcgaagaaggcgctggaagaggcgttgaaaggatag

SEQ ID NO: 69604 - protein, 475 aa, Unknown
  Obtained from environmental sample
  DOMAIN (256)...(324): PET112 family, C terminal region
  misc_feature (1)..(475): Xaa is any amino acid
MKWETVIGLEIHTELSTKSKIFCGCTTAYGGEPNTHVCPVCSGMPGTLPVLNRAVPEYAMRLGLTLNCEITRLSKFDRKNYFYPDLPNAYQISQLYAPICRNGYLEIEVEGKKRKIGIHEIHMEQDAGKLVHDPKGNNSFMDFNRCSVPLLEIVSEPDLRSSAEVIAYLEKMRETLLYLDISDCKMQEGSIRADVNLSIRPFGGELGTRTETKNMNSFKAIARAIEYETERQIEILEDGGKVVQETRRWDDEKGLSYGMRSKENAQDYRYFPEPDLLPLHIDDAWIESVKSNMPELAQQKRERYVRDWGISESAAVVLTVHKKISNLFEIVSQKSNQPQEAANLITGEIMRLMNNANLLPEDLSIDADKLSALIGFVAGGKINRSAYKETVEAVFTDNVDPEKYIAEKGLMMVSDDNAVMEAVKAVLAENAGVVDSWRGGKTQVFGFLMGQVMKKLGKGGNPEIAKKALEEALKG

SEQ ID NO: 69605 - DNA, 1464 bp, Unknown
  Obtained from environmental sample
  misc_feature (1)..(1464): n is a, c, g, or t
atgtttggaactgcaatagaaatatcggcggcgattaaaacaaaaaaaatcagcgttgccgaagcggcaagcgcgtatatagaaaaagttgaaaaaaacgacaaacaatttaacgcatttctggcgctgtcaaaagagagcgcccttaaacgcgcgcttgaaatacaggcgctcattgacaaaggggaggagctttcgccgctggcgggaacgcctatcgccctgaaggacaatatttctacaatagggcttgaaaccacctgcgcgtcaaaaattcttacgggttataaacctgtattcaacgcgacaataaccgaaaaacttgaacgtgccggaatgatcgttatcggaaaactcaacatggacgagttcgctctcggcggctcaagtgagacgggggcgttcggcgcggctcataatccgtgggatacaacgcgggtctgcggcggttcatcgggggggagcgccgccgcggttgcatccggagaagcgccgattacgctcggcacagacacgggcggaagcatacgccagccctgctctttctgcggcgttacgggcattaagcccacttacggctctgtttcaagatacggaattgtcgctttcgcctcatcgttggatcaggcggggcctataggacaaaacattgaggactgcgccgcgcttttatcgatcatttcgggggcggacgaaaaagacagcacctgcgtcatgaaagaaccgtttgatttcagcgggcggcgcgaggatatgaaaggcgtaaaaatcggcttgccgaaaaattatcttgccggcggcatagaggatgaagtaaaagccgctgttctcgccgcggcaaaagaatttgaatcggcgggagctgtcgtcgaagaatttgaaatgccgtttatggattacatgatccccacttattacatcatcgccgccgccgaagtgtcgtctaacctttcaaaatacgacggtcttaaatacggctaccgcagtcctaacgcgaaaacgctctccgaagtctaccggctctccagaagcgaaggtttcggaatggaagcaaaaagaagaatcatgctcggctcgtttgttttgtcatccggttactacgacgcctactacaaaaaggctctgcaggcgcgcgcgcttcttaaagacgcttacaataaattgttcggacgttttgacataatactctcacctaccgcgccaactacggcgtataagttaggtgacaatatcggcgacccggtaaaaatgtacatgggagacatttacacagtttcgatcaatcttgcgggacttcccgccgccgccctcccctgcggctttgacaaacaaggtttgccaatcggtttccagttaatcggagacgctttttcggagaacaaaataataaacgcggcgcgtgtttttcaaaaccggacagatcatcataaaaagaaaccttctattaacggaggtgtaaaatga

SEQ ID NO: 69606 - protein, 487 aa, Unknown
  Obtained from environmental sample
  DOMAIN (21)...(463): Amidase
  misc_feature (1)..(487): Xaa is any amino acid
MFGTAIEISAAIKTKKISVAEAASAYIEKVEKNDKQFNAFLALSKESALKRALEIQALIDKGEELSPLAGTPIALKDNISTIGLETTCASKILTGYKPVFNATITEKLERAGMIVIGKLNMDEFALGGSSETGAFGAAHNPWDTTRVCGGSSGGSAAAVASGEAPITLGTDTGGSIRQPCSFCGVTGIKPTYGSVSRYGIVAFASSLDQAGPIGQNIEDCAALLSIISGADEKDSTCVMKEPFDFSGRREDMKGVKIGLPKNYLAGGIEDEVKAAVLAAAKEFESAGAVVEEFEMPFMDYMIPTYYIIAAAEVSSNLSKYDGLKYGYRSPNAKTLSEVYRLSRSEGFGMEAKRRIMLGSFVLSSGYYDAYYKKALQARALLKDAYNKLFGRFDIILSPTAPTTAYKLGDNIGDPVKMYMGDIYTVSINLAGLPAAALPCGFDKQGLPIGFQLIGDAFSENKIINAARVFQNRTDHHKKKPSINGGVK

SEQ ID NO: 69607 - DNA, 693 bp, Unknown
  Obtained from environmental sample
  misc_feature (1)..(693): n is a, c, g, or t
atgccgacggtaaaacggatgatggctcaaggcgcatggacacttaccgcgcaatccgtaaaacccaatatcagctggccgaactggacttctattttttacggtactcagccggaacaacgcaataaagaagaatttccctcgatttttacgattttaaaaaataacgaaatggcaaaaaaatctgtctttttttatgactgggatgaactgctgaaaatatacaatgttgatgcggtagatatacaaaaaataaattccggtattgaatccgccgaaaaaattgcatcatatataaaagaacaaaaacctgtttttacagcgatatcgttcgatgaaccggatcatgtaggccacgcaaaaagctggggctctgcggccttttacgcaaaacttgaggaaatagacaatataattgccgaaattgaactggcagttaaagacgcgggaatctatgacagtacggtgttcgttctgtccgctgatcatggcggcgcttttaaagggcatgaaggttattttccaaaacattacaaaattcccatgatattttatggcagcggaataaaagaaaggtttgaaataatttcccatgttaatatttacgacattactcccactatggcggcgctcctgggcatggaaattccccctgaatggacagggcgaattttatatgagatttttaaataa

SEQ ID NO: 69608 - protein, 230 aa, Unknown
  Obtained from environmental sample
  DOMAIN (85)...(201): Metalloenzyme superfamily
  misc_feature (1)..(230): Xaa is any amino acid
MPTVKRMMAQGAWTLTAQSVKPNISWPNWTSIFYGTQPEQRNKEEFPSIFTILKNNEMAKKSVFFYDWDELLKIYNVDAVDIQKINSGIESAEKIASYIKEQKPVFTAISFDEPDHVGHAKSWGSAAFYAKLEEIDNIIAEIELAVKDAGIYDSTVFVLSADHGGAFKGHEGYFPKHYKIPMIFYGSGIKERFEIISHVNIYDITPTMAALLGMEIPPEWTGRILYEIFK

SEQ ID NO: 69609 - DNA, 672 bp, Unknown
  Obtained from environmental sample
  misc_feature (1)..(672): n is a, c, g, or t
atgatggccgagggacatttaaggggtggtaccggccttacccgcataacaatacccagcagcgttaccgaacttgggaatggcacctttgagaattgtaccggccttaccagcgtaaccttgccggatggctttatcggccttgggcaggacgcttttaatggctgcaccagccttacccgcataaccataccgaacagcgttacagtcattagagatatggcttttgccagttgcacaagccttaccagcgtaaccatacccaacagcgttaccgaacttggttatggatcttttttcaactgtaccggtcttaccagggtaaccatagggagcggcattaccaacattggaaatattgtttttagcggttgtaccagccttaccagcttaaccatacccgccggcgttaaaagtattggagggggagctttacaaggctgcatcagccttaccagcgtaacctttcaaggcaaggttgataaattcgatttcggcgcggttggcaacaagacccctccgccgccgcctgtagacagagaaggaaatgttatagcgcagatagggaatggtagttacatcggcgatttacgggaaaagtacgttgcggaaggcggagggccgggaacgtataagagagaaagcggcggattagagtggactaaacagtaa

SEQ ID NO: 69610 - protein, 223 aa, Unknown
  Obtained from environmental sample
  misc_feature (1)..(223): Xaa is any amino acid
MMAEGHLRGGTGLTRITIPSSVTELGNGTFENCTGLTSVTLPDGFIGLGQDAFNGCTSLTRITIPNSVTVIRDMAFASCTSLTSVTIPNSVTELGYGSFFNCTGLTRVTIGSGITNIGNIVFSGCTSLTSLTIPAGVKSIGGGALQGCISLTSVTFQGKVDKFDFGAVGNKTPPPPPVDREGNVIAQIGNGSYIGDLREKYVAEGGGPGTYKRESGGLEWTKQ

SEQ ID NO: 69611 - DNA, 327 bp, Unknown
  Obtained from environmental sample
  misc_feature (1)..(327): n is a, c, g, or t
atgaaatacttaatttatccggcgcttgccgcggccttcattttcggctgcgccaaccttaaaaccggaaatgtggccttttatgaaggttccgcaatgggataccgggggatgatccatgtgcgggtgggaatggaaaacggggctattacggagattgccgtaatagaatccgctgaagatccggctattggcgggacggctattgaggaattgacagaccttgcgctgatgtacaacaccacggaaatagacgcggtttccggggcaactgaaacaagcaggggttttcttgaagctgtcgaaaatgctatatttagcccatga

SEQ ID NO: 69612 - protein, 108 aa, Unknown
  Obtained from environmental sample
  SIGNAL (1)...(20)
  DOMAIN (34)...(108): FMN-binding domain
  misc_feature (1)..(108): Xaa is any amino acid
MKYLIYPALAAAFIFGCANLKTGNVAFYEGSAMGYRGMIHVRVGMENGAITEIAVIESAEDPAIGGTAIEELTDLALMYNTTEIDAVSGATETSRGFLEAVENAIFSP

SEQ ID NO: 69613 - DNA, 345 bp, Unknown
  Obtained from environmental sample
  misc_feature (1)..(345): n is a, c, g, or t
atgagcgattgtattttttgcaggatcataaagggggaaatccccgctaaaaagatctatgaagacgatgaaatgctcgcgttccatgacatcacgccgatggcccccgtgcattttctgcttatccccaaaaaacacattgataacctgctctttttagacgaggcggacgccgcccttgtaggcagattgctttacaaagcgaaagagctggctaaagagcaggggtgtgaggaaaacgggggacgttttgttatcaacgccaaaatacacggcggtcagagtgtcgatcatctgcatattcattttttgggcggcgctcagcttggtttgtctcttggttga

SEQ ID NO: 69614 - protein, 114 aa, Unknown
  Obtained from environmental sample
  DOMAIN (4)...(109): HIT domain
  misc_feature (1)..(114): Xaa is any amino acid
MSDCIFCRIIKGEIPAKKIYEDDEMLAFHDITPMAPVHFLLIPKKHIDNLLFLDEADAALVGRLLYKAKELAKEQGCEENGGRFVINAKIHGGQSVDHLHIHFLGGAQLGLSLG

SEQ ID NO: 69615 - DNA, 1059 bp, Unknown
  Obtained from environmental sample
  misc_feature (1)..(1059): n is a, c, g, or t
atgaatactcaaatatcggtcttgggcgcgggagcctggggaacggcaatagcaaaagtcattgccgaaaaagataaagatgtcgttatctggagttatgagacagaagtaagggacgatataaacaaaaaaaggcgaaattcaagatttttacccgatgttgaactgccaaagtcattaaaagcaacgtcaaatgtcgaagaagccgtagaaggcaaagactttctgattttcgcggttccgtctttgttcctgctggatacattgaaaaaaaccctttccgtaaattccataagagagggaaaaaccgttattgccgtactaacaaaaggcttcctgccttccgaaaacggtccccggctgattcttgaaacaatggaagattacctgcccggttttttccatcattcccttgtctacatttccggtccaagccatgccgaggaagtatcgcgtggaaaattgacagggcttattgccgcaagcgaaaacgcaaaaaactctatccgttttagggatttattaagaagccagcagttactggtctattcatcgcttgatgttaggggagtacaggttgccgcggcgacaaagaatgttatagcgatcgcgtttggaatgctggacgcgatgaagtccatggcaaaattcgatacattcggcgacggaaccgattcgcttttgcttgcggcgggattaaacgagatacagcttcttggcaaagcattaggcgcaactcaccctgaaacatttacatctatttccggcattggcgatttagacgtaacttgccgttcggtctttggaagaaacaggcgtttcggcagggaaataatcgaaaagaatattcttaaaccgtataaaaatattgatgaacttttagcccgaatcggagaaatcggttatttaccggaaggagtagccgcggcgaagtacgtccgtgttcttgccgagaagcacaaacttaaaatgcctatttccattgggataggcaagctgttgaacagagaaattgaaccgcatgaatttataaaaaaatctatcagcggattgggctaa

SEQ ID NO: 69616 - protein, 352 aa, Unknown
  Obtained from environmental sample
  SIGNAL (1)...(18)
  DOMAIN (186)...(347): NAD-dependent glycerol-3-phosphate dehydrogenase C-terminus
  misc_feature (1)..(352): Xaa is any amino acid
MNTQISVLGAGAWGTAIAKVIAEKDKDVVIWSYETEVRDDINKKRRNSRFLPDVELPKSLKATSNVEEAVEGKDFLIFAVPSLFLLDTLKKTLSVNSIREGKTVIAVLTKGFLPSENGPRLILETMEDYLPGFFHHSLVYISGPSHAEEVSRGKLTGLIAASENAKNSIRFRDLLRSQQLLVYSSLDVRGVQVAAATKNVIAIAFGMLDAMKSMAKFDTFGDGTDSLLLAAGLNEIQLLGKALGATHPETFTSISGIGDLDVTCRSVFGRNRRFGREIIEKNILKPYKNIDELLARIGEIGYLPEGVAAAKYVRVLAEKHKLKMPISIGIGKLLNREIEPHEFIKKSISGLG

SEQ ID NO: 69617 - DNA, 2076 bp, Unknown
  Obtained from environmental sample
  misc_feature (1)..(2076): n is a, c, g, or t
atgggtattaacgtaggcatagaccttggaacaacttattccgctgtcgccgtgtttgacgacgcggcgggacaggtaaagattttaaaaaattccgatgacaaaacttgtacgccgtctgttacgcatattgaaaacggaaaagtaaaaatcggcgacgaggcaaaacagcttcaggcatcgggcgatttaaacgccgccgctttttacaaaagcatgatgggcgagaaaggttacacgctttatcttgacggcaaagaatattcgcccgaggagttgtcggggctttaccttcgcgaattaatacgcgacgtatcggaacataacaatgttaaagtagacgccgcggtaataacatgtccggcctattttaacgaatcgcagcgccttgcaacgttaaacgccggtaaaaaagcgggattcaaggtgcttaaagtaataaacgagccgaccgcggctattatcgcttacggtttaactgatgccggaaaaaagaatgttatggtttacgacttaggcggcggaacattcgacgttacaatcgccgaagtagacggtaccagagtgaaagttttaactactaacggcaaccatcaattaggagggaaaaactgggacgcggcaatagccgatgaactaaaacaacgtttctttgacgaatataacgtaaacattgaggataatcccgaagatttttatcaacttaaagtgcaatgtgaagaaattaaaaaaaggcttactaatatcagttctaccacggcggtcgttcaaagccagggttatacgggtaaatacgaaataacccgcgaatttttcgattccgccacatacagccttttaaatgagacgagtcttttaattgacagatgtttttcggaacttggcggtggattttcctggaaaaatcttgatgaagttgttctggtcggcggctcgacaagaatgccgcaggttaaagaatttgttaaacgtgagtacggacgcgaacctgtaacaaaaaatattgacgttgataccatagtcgcggccggcgcggcaatgcaggcaaaactatgcgttgaaaacaagcttgttcttggcggggtttcctccggaacaagcccggcggctttgggcggaagcgagaaaaaaaggcttgttatcaccggaagcgatattcaggatataacttcgcacagcctcggaatgcttgtcctttcaaaagacgaaaagacttataaaaacagcgttattataaaaaagaacagtccgttaaacaccgaattcggcaatgaatatcattttgccggaaatgaaatggacgtgtttgttttgcagggagaatccgatgagccccgcgattgtacgatcctttataagtattgcgtgtccggttttgcaaaaggcaaaaagaccgattttactctctattttgaatataaccagaacggagttgtagatgtacgcgtcgacgcgaaggacggaacggtcctaaaggtggtaaaatccgatgtcaatgaaacaatagacgaagttataaacaggctgctgcgcgaaagggaagagcggaaacgcaaagcttccgctgaaattatgtttatggttgacacatccggctcaatggacggtaatcccatagagcaggcgcgtaaagcaatcaggaattttgtaaaagaaatagatttatcaagattcagcgtgtcaatagttaattttgccgaaacttgcagatttgagtgttctaactcaaacgacacaagacagatagaaagagctatatcagcgttagataccggctcatgcggaggcggcacttcggcaacccctctcggttcttatggcaatagatttgccaaacaggataaccgtattatcgttgttttaaccgacggcgcatgggcggatcaatctcaggaagaatccgccgccaataggttgaagaacgacggcattattatttatgctacgggatttggcgacgctgatgaaagattcttaaacaggattgcgtccgacggatgcgggcaaaaaatagatttaaataaactaagcgatacttttgtggaaatcgcgggcagcatagcgacggaaaaatag

SEQ ID NO: 69618 - protein, 691 aa, Unknown
  Obtained from environmental sample
  DOMAIN (2)...(357): MreB/Mbl protein
  misc_feature (1)..(691): Xaa is any amino acid
MGINVGIDLGTTYSAVAVFDDAAGQVKILKNSDDKTCTPSVTHIENGKVKIGDEAKQLQASGDLNAAAFYKSMMGEKGYTLYLDGKEYSPEELSGLYLRELIRDVSEHNNVKVDAAVITCPAYFNESQRLATLNAGKKAGFKVLKVINEPTAAIIAYGLTDAGKKNVMVYDLGGGTFDVTIAEVDGTRVKVLTTNGNHQLGGKNWDAAIADELKQRFFDEYNVNIEDNPEDFYQLKVQCEEIKKRLTNISSTTAVVQSQGYTGKYEITREFFDSATYSLLNETSLLIDRCFSELGGGFSWKNLDEVVLVGGSTRMPQVKEFVKREYGREPVTKNIDVDTIVAAGAAMQAKLCVENKLVLGGVSSGTSPAALGGSEKKRLVITGSDIQDITSHSLGMLVLSKDEKTYKNSVIIKKNSPLNTEFGNEYHFAGNEMDVFVLQGESDEPRDCTILYKYCVSGFAKGKKTDFTLYFEYNQNGVVDVRVDAKDGTVLKVVKSDVNETIDEVINRLLREREERKRKASAEIMFMVDTSGSMDGNPIEQARKAIRNFVKEIDLSRFSVSIVNFAETCRFECSNSNDTRQIERAISALDTGSCGGGTSATPLGSYGNRFAKQDNRIIVVLTDGAWADQSQEESAANRLKNDGIIIYATGFGDADERFLNRIASDGCGQKIDLNKLSDTFVEIAGSIATEK

SEQ ID NO: 69619 - DNA, 2019 bp, Unknown
  Obtained from environmental sample
  misc_feature (1)..(2019): n is a, c, g, or t
atggaagacagcagaacaacggaagaacttaaaaatccggactataattattatttcgcctatgtaattgatcccgctgaaaaagatggaaaaaagattgaagcggctatggcaacgcgtaaaaattcttttacgcaggggactgtcgttcagcgaagattgaaagatttatataccgaagccgtcaagataatgaccgataaagctcttagggagaaagagtttgaaaacgcaaaaaaattcaaattagaaacggctgaaaaagcaatcgtcgcgattgtaagagggcgcggcgctatatataaaagcgatttaataaaaatggctgatgcaagcggcaagtggataacggcggacgatatagaaaaaaagattgcgtacttaatgcagcaaggcgcaaagctggttgacgatacaaaaagaagcctggattttttaacctatgataaaatagaaaagttcttaaaaacagtaggtaaaaataatttatacgatttgttgggcgcggcgccaaacgcgtctgtcagttctctgcagagcgcggtaacaactgtatacaatgccgttggcggaaagactgatcctaaatccaccgccacgaatggagtatgcggcgaggcaaaaaaaatatttaaagatgataaatcaaagaattactacgatatttaccttgcaacaaaggatatttgggatgaattttcattacggcgcagcacaggcatttcagagatggaacttaaggaatttctggattattccgaaaaagccaagattgcgttaaaagcattaaatataaacgatgttgattatatagaagttcttttagctgaaggtctcagtaattttcgtattgccgtagccggagggcaagaacggggaatagaccttgaaaattgtccttattgcggtatggcttacgcaaataacgacaatccgaagacctgtccgcattgccaccagccgttggaaatcatgtgttggaattgcggaggcaaggctccttatacggtaaagaaaaatacctgcccgtcctgcggagcgactaaagaacacaacgcgcgttttgatataattgttaagaaaatagacagtttgctggttcaaccggatgtttcgataacggatataaaaacggaacttaataacctgaaaaacatcttgccggattataacaaagcaagcgcttcaaaattagcgaaaaaagccgccgaatatcaggaagttattgataaaaaagacagagaagaagaaactgtcggcaaggcatataaagatgaatacgagaaaatacaggaattggttaacttaaagaaatatatgtccgcctccgcggcggttaaaacgcttaaaaacaaatatcctaaatataatgtaacaaaaacggacgcgctttccgcgacaatttcttccgtggtatcgcgggttacgcagcatgcggaaaaagcaaaaacattaaccgcccagaataacgaagaagccgcgataaacgaaattgcggcggcccttgatttatctacggactatattgaagccaatcaaataatttcgaaattccctcccaaagcgccggagagcgtgaacgcgcaaattaaagtgaattccgccttaattacatgggttcagaataagccgcaaaagttggttacatattctgttatacgtaaaaacggttcgcgtccgacatcaataaacgacggcactgttgtggcaagcgaacttggcataaacttctttgaagataaaacgattgtttccgatacgccttattattacgcggttttttcttcgcgtttaggcataaattcaactgttgttttctgcgcagcgccggttattacctactttgacgtttcgaatatacggcaggaaattatatcggggaaaatagttgtaaagtgggaagctcctttaaatgcaaacgaaatagaagtaataagaaaaaaaggacttacgccgtccgcgggacgcgaagaacggcaagaaaatcctgttaaaggcatggatcttttgaagacgtga

SEQ ID NO: 69620 - protein, 672 aa, Unknown
  Obtained from environmental sample
  misc_feature (1)..(672): Xaa is any amino acid
MEDSRTTEELKNPDYNYYFAYVIDPAEKDGKKIEAAMATRKNSFTQGTVVQRRLKDLYTEAVKIMTDKALREKEFENAKKFKLETAEKAIVAIVRGRGAIYKSDLIKMADASGKWITADDIEKKIAYLMQQGAKLVDDTKRSLDFLTYDKIEKFLKTVGKNNLYDLLGAAPNASVSSLQSAVTTVYNAVGGKTDPKSTATNGVCGEAKKIFKDDKSKNYYDIYLATKDIWDEFSLRRSTGISEMELKEFLDYSEKAKIALKALNINDVDYIEVLLAEGLSNFRIAVAGGQERGIDLENCPYCGMAYANNDNPKTCPHCHQPLEIMCWNCGGKAPYTVKKNTCPSCGATKEHNARFDIIVKKIDSLLVQPDVSITDIKTELNNLKNILPDYNKASASKLAKKAAEYQEVIDKKDREEETVGKAYKDEYEKIQELVNLKKYMSASAAVKTLKNKYPKYNVTKTDALSATISSVVSRVTQHAEKAKTLTAQNNEEAAINEIAAALDLSTDYIEANQIISKFPPKAPESVNAQIKVNSALITWVQNKPQKLVTYSVIRKNGSRPTSINDGTVVASELGINFFEDKTIVSDTPYYYAVFSSRLGINSTVVFCAAPVITYFDVSNIRQEIISGKIVVKWEAPLNANEIEVIRKKGLTPSAGREERQENPVKGMDLLKT

SEQ ID NO: 69621 - DNA, 759 bp, Unknown
  Obtained from environmental sample
  misc_feature (1)..(759): n is a, c, g, or t
atgcgaatactgctgacaaatgacgacggaatatcttctccaggaataaggttgttcgcaaaagctttacgcgactcaggacacagggtttttacggtcgctcctcataataaccgttcaggctgttcacattccattgaatttctaaaaggcccgttaagattatcggaaattgaagaagacacatggtcgtgcgcgggcacgcccgtggactgcgttataaccgcccttttgggagggattcccgaaatctgtatttccaccgaaggaaccgcgctcaatatggaaagagcgcctgatctgatcctgtccgggattaacgccggagcgaatttgggaactgatattatctattcgggaacagcgtccgccgcaaggcagggcagtttcttcgggataccgtccgtggcgttatctttggtcgaaaatgaccttccctggcagtgggaatcggctatttcttatatcacggagaagcttgttttaattatgggttactggaaatccggcgcttttgtgaatgtaaattttccaaatattgaaaaaaaacctgcgatgcttgttccttcttttccttctatgagatattataatgataggataattactttcatatccccaagcggaagcaggtattgcttcgcgaaaccggggaaggttgataacatacctgaggaaggttccgattgggatgaggttataaaagggaacgccgcgttttctgtggttatgtctcaaccggcaatcgcggcgggataa

SEQ ID NO: 69622 - protein, 252 aa, Unknown
  Obtained from environmental sample
  DOMAIN (1)...(201): Survival protein SurE
  misc_feature (1)..(252): Xaa is any amino acid
MRILLTNDDGISSPGIRLFAKALRDSGHRVFTVAPHNNRSGCSHSIEFLKGPLRLSEIEEDTWSCAGTPVDCVITALLGGIPEICISTEGTALNMERAPDLILSGINAGANLGTDIIYSGTASAARQGSFFGIPSVALSLVENDLPWQWESAISYITEKLVLIMGYWKSGAFVNVNFPNIEKKPAMLVPSFPSMRYYNDRIITFISPSGSRYCFAKPGKVDNIPEEGSDWDEVIKGNAAFSVVMSQPAIAAG

SEQ ID NO: 69623 - DNA, 447 bp, Unknown
  Obtained from environmental sample
  misc_feature (1)..(447): n is a, c, g, or t
atgacgcttgcctatatttatataacaaccaaacgcgttaaaatggctgaatatgagcttgaaaaattgcaatcaagcggtatggaatccccgttactctacaacacccttgcctatgccgcgtggcttcaaaaaagacatacagccgcgatagaactctacgaaaagacccttgaaattgattcagataacgcgaccgcgttgaattgtatgggctatatacttgccgatacgggattagatgtcatgcgcgcgcttcgtctttgcagaaaggcggtggactttaaaccccaaaacgcggcgtaccttgattccctaggctgggcttactacaaaagcggcgaacctgtggaagcgcgcacatggctccgcagggcgcttgatatcgctcccgaagaagaagaaataaaaaggcactttaaaacagtaacaggagaaaaaccttga

SEQ ID NO: 69624 - protein, 148 aa, Unknown
  Obtained from environmental sample
  DOMAIN (31)...(64): Tetratricopeptide repeat
  misc_feature (1)..(148): Xaa is any amino acid
MTLAYIYITTKRVKMAEYELEKLQSSGMESPLLYNTLAYAAWLQKRHTAAIELYEKTLEIDSDNATALNCMGYILADTGLDVMRALRLCRKAVDFKPQNAAYLDSLGWAYYKSGEPVEARTWLRRALDIAPEEEEIKRHFKTVTGEKP

SEQ ID NO: 69625 - DNA, 354 bp, Unknown
  Obtained from environmental sample
  misc_feature (1)..(354): n is a, c, g, or t
ttgagaaaaacttttattttttcagcgttttttcttgttatttccgctttatacgcgcaggaagcccccattcgtcccggacccgttacaggcggcaccggtcccgccgctctttccgccgcagatgaattcaggcttggcgtgcatgcctataatcgattttcgtataacgaggcgctttattcttttgagcgcgctctggctttccgccccgattcgccgctgattcttgactgggttggaagagcgtattatcgttcgggttttgaggaaaccgctgtattgttgtggcgggcggctcttgatctttacggcagaacacgggcgttggaatgctgctcggcgcgcggatag

SEQ ID NO: 69626 - protein, 117 aa, Unknown
  Obtained from environmental sample
  SIGNAL (1)...(19)
  misc_feature (1)..(117): Xaa is any amino acid
MRKTFIFSAFFLVISALYAQEAPIRPGPVTGGTGPAALSAADEFRLGVHAYNRFSYNEALYSFERALAFRPDSPLILDWVGRAYYRSGFEETAVLLWRAALDLYGRTRALECCSARG

SEQ ID NO: 69627 - DNA, 783 bp, Unknown
  Obtained from environmental sample
  misc_feature (1)..(783): n is a, c, g, or t
gtgcatttacgaaggctattcagttttgcgttaaataaacccatatccggttatatacgtccccgtaaactgtcagaaagccttaatgatctgttacatacagataaaaatattcttgatatagcgcttgaatacggctttggttatgagaattcatacagcaggtcatttaagcgtgaattcggcatatcgccggacaatttacgcaagtcaagacagattttaaaaatacagcctcccttacatctttttgatgaaaacaaggtagatgataatgctttttggggtcctgaatttgtaattgttccgcagtttcacataatagggaaaccacatcatatgccttttgaaatatccctaaaaacagcccccaatgccgcaaaactcttttgggcgaatgaacgccgccatattaaaaaggcgataaatcccgatgtttatatcggttatacccacaaaattaaccatgaaaaaaagtattccgaatatttgccttcggttcaggtacgagatttatacgatgttccccacggtttgaccagtacaactttcaatacttcaatgtgcgcgcgttttcgttttattggacaacatcaaaatattgacattaacgaagaaacagctaacaaaatgtacagtgtaatcaggaaatatgttaatgctgagaattctaattataatctgaacattgacaaagtatattttgaaagaatagattggaataaatataacgggaatttctttcaagttgaatgttttatccctgtaacggaaaaaacatga

SEQ ID NO: 69628 - protein, 260 aa, Unknown
  Obtained from environmental sample
  DOMAIN (26)...(70): Bacterial regulatory helix-turn-helix proteins, AraC family
  misc_feature (1)..(260): Xaa is any amino acid
MHLRRLFSFALNKPISGYIRPRKLSESLNDLLHTDKNILDIALEYGFGYENSYSRSFKREFGISPDNLRKSRQILKIQPPLHLFDENKVDDNAFWGPEFVIVPQFHIIGKPHHMPFEISLKTAPNAAKLFWANERRHIKKAINPDVYIGYTHKINHEKKYSEYLPSVQVRDLYDVPHGLTSTTFNTSMCARFRFIGQHQNIDINEETANKMYSVIRKYVNAENSNYNLNIDKVYFERIDWNKYNGNFFQVECFIPVTEKT

SEQ ID NO: 69629 - DNA, 384 bp, Unknown
  Obtained from environmental sample
  misc_feature (1)..(384): n is a, c, g, or t
gtggagaagaaagaactgatagatatttataattatttccaagattctcatgaatttacttgtactttacaacaagaattatatcgagaggaatattggtgcgaactaatgccgagaaaggcaactaatggaaatgctacattcacattaacagaaatgataacgtgtgataatataataacatttggtgattctgtacatgatataccaatgtttaaaatctccgatgacaggtaccccgttgaaaacgccgttgatgaactgaaaaaatctgccacaggaataataatgtcaaatgaaaaagacggactggcgcattggttaggaactgtacataatggacttcaccccattaggattacacagttaagcgactttagttga

SEQ ID NO: 69630 - protein, 127 aa, Unknown
  Obtained from environmental sample
  misc_feature (1)..(127): Xaa is any amino acid
MEKKELIDIYNYFQDSHEFTCTLQQELYREEYWCELMPRKATNGNATFTLTEMITCDNIITFGDSVHDIPMFKISDDRYPVENAVDELKKSATGIIMSNEKDGLAHWLGTVHNGLHPIRITQLSDFS

SEQ ID NO: 69631 - DNA, 876 bp, Unknown
  Obtained from environmental sample
  misc_feature (1)..(876): n is a, c, g, or t
atggcatatcaattcatggaagcaaacaagggtcgatatgccgttaaggagatggccgggcttttaggggttagccgcaacgcctattaccaatgggcgcgcaacggggtgtcgcggcggcacaaggcagccgacgccgaactggtacgccttatccgggaaatagcggccaggcaccatcgccggtacggcagcccgcggatacggcgggaactgcgcgatgtctacgggaaacgggtcagtttgaaaaaagtagcccgtttgatgcgtgaaaacaggctgaacgcacgcaggaggaggacatttatccggacgaccgattcaaaccatgcccttgctgtctgtgaaaacatacttaaccgtgagtttcatgctgaaaaaggcggacggaaatgggtttcggacattacgtacctgcgtacggtaaatggctgggtgtacctgaccgtggtgcttgatctgtacgaccggaaagtcatcggctgggcggtcagtgccggcatggaggctgctgatactaccatcgccgccttgagaatggcggtaaaaaaccgaaagcctgggaacgggcttatattccattcggaccggggtgtccagtattgcgcccaatcctttcgtgccgtgttatgcgaaaagtgtccttcggtccgccagagcatgagccgcaagggcaattgctgggacaacgcgtgcgccgaatcatttttcaaaacattgaagagggaattggaaacactggacgggaaacactctgaggctgatgtcaggcagtcggtgtttttctacattgaggcgtattataaccgtatccgtatgcattcggtacttgactatgttgcgcctaatgtgtttaactcaactaaagtcgcttaa

SEQ ID NO: 69632 - protein, 291 aa, Unknown
  Obtained from environmental sample
  DOMAIN (124)...(287): Integrase core domain
  misc_feature (1)..(291): Xaa is any amino acid
MAYQFMEANKGRYAVKEMAGLLGVSRNAYYQWARNGVSRRHKAADAELVRLIREIAARHHRRYGSPRIRRELRDVYGKRVSLKKVARLMRENRLNARRRRTFIRTTDSNHALAVCENILNREFHAEKGGRKWVSDITYLRTVNGWVYLTVVLDLYDRKVIGWAVSAGMEAADTTIAALRMAVKNRKPGNGLIFHSDRGVQYCAQSFRAVLCEKCPSVRQSMSRKGNCWDNACAESFFKTLKRELETLDGKHSEADVRQSVFFYIEAYYNRIRMHSVLDYVAPNVFNSTKVA

SEQ ID NO: 69633 - DNA, 576 bp, Unknown
  Obtained from environmental sample
  misc_feature (1)..(576): n is a, c, g, or t
ttgagaaactcaaggattctatccgccttcttttccagccgttccagtttttctttttctgccttttcttctttccccgttctgtcatttttcttgtgtttctcgattatttcagcgcttatcttttttattttatcatatttttcctttaactcttctttcgtcccgctccattccttagacgcggccgacggcagactggaccttacccctcctgatttacacaaagataagcgggaaatacaatacaaggagagggagaagatgggaaagaaaagcaaagaaagacgagtttacacgaaggaattcaaggtcgaagcggtagcattggccgagaaaagggaaaagccaataagccagctagccaaggatctggggctcaacgagaacgtgctgcgccgctggatgaaggagtcccgagagacggcggggagcggagcgcaggcgttccccggtcacggacggccgcgggacgaggagctagcccgcttgaggaaagagaacaaggctttgcggaatgcaaatgaaatcctaaaaaaagctgcggtcatcttcgcgcaaggggaaccccagtaa

SEQ ID NO: 69634 - protein, 191 aa, Unknown
  Obtained from environmental sample
  SIGNAL (1)...(23)
  DOMAIN (96)...(178): Transposase
  misc_feature (1)..(191): Xaa is any amino acid
MRNSRILSAFFSSRSSFSFSAFSSFPVLSFFLCFSIISALIFFILSYFSFNSSFVPLHSLDAADGRLDLTPPDLHKDKREIQYKEREKMGKKSKERRVYTKEFKVEAVALAEKREKPISQLAKDLGLNENVLRRWMKESRETAGSGAQAFPGHGRPRDEELARLRKENKALRNANEILKKAAVIFAQGEPQ

SEQ ID NO: 69635 - DNA, 1152 bp, Unknown
  Obtained from environmental sample
  misc_feature (1)..(1152): n is a, c, g, or t
ttgcttttctttcccatcttctccctctccttgtattgtatttcccgcttatctttgtgtaaatcaggaggggtaaggtccagtctgccgtcggccgcgtctaaggaatggagcgggacgaaagaagagttaaaggaaaaatatgataaaataaaaaagataagcgctgaaataatcgagaaacacaagaaaaatgacagaacggggaaagaagaaaaggcagaaaaagaaaaactggaacggctggaaaagaaggcggatagaatccttgagtttctcaagacgcatgaagatcggaaaggggccggaggggaaataataaaatcgaacgtgacggataacgaaagcggaaagataaaagggccgcacggggtaatccagggctataacggaatagccgtagtggacggcaaaaaccaggtcatagtagcggcaaacgcgtacggatcagtatatgaaggacaatatttccccgagatgctggaaaagactgaacagaacctgagggaggtaaacggcaaaaaggaacccttgaaaggcgcggccatactgggagacacggattatttttctgaagagaacctgcaggcggcgaagaagaaagagatggaagcggtaataccggatgagcaataccggaaccgggatgaacgtttgaaagaaggggaacggcgcgaagggaaggaacggctggacgcgaggtatttcaaatataacaaacagggaaattattatatatgcccgaacgggaaaaaattgtcgcataaatgtaaagtaaaattaaaccggaacgaaggcaataaatatgagagcaaggcaaaagactgtaaaggctgtccgtacgccgacagatgcataagggcgaaagggaaagtgcagaagtaccgggtattatatataccgatactaaagtatgaagaaatcgaatgtcagaagatgagggaaaagatagacaaggcaaaatacaggaagatgtattcgaggcggatgcagatagtggaacctgtatttgcggacataacgtattgcaaggggataacgcggtttacgttgaggacacagagaaaagtaagcattcaatgggcattctactgcgtagtactcaatataggtaaatataatatggcggaaaggcggaaaaaattggcataa

SEQ ID NO: 69636 - protein, 383 aa, Unknown
  Obtained from environmental sample
  DOMAIN (111)...(370): Transposase DDE domain
  misc_feature (1)..(383): Xaa is any amino acid
MLFFPIFSLSLYCISRLSLCKSGGVRSSLPSAASKEWSGTKEELKEKYDKIKKISAEIIEKHKKNDRTGKEEKAEKEKLERLEKKADRILEFLKTHEDRKGAGGEIIKSNVTDNESGKIKGPHGVIQGYNGIAVVDGKNQVIVAANAYGSVYEGQYFPEMLEKTEQNLREVNGKKEPLKGAAILGDTDYFSEENLQAAKKKEMEAVIPDEQYRNRDERLKEGERREGKERLDARYFKYNKQGNYYICPNGKKLSHKCKVKLNRNEGNKYESKAKDCKGCPYADRCIRAKGKVQKYRVLYIPILKYEEIECQKMREKIDKAKYRKMYSRRMQIVEPVFADITYCKGITRFTLRTQRKVSIQWAFYCVVLNIGKYNMAERRKKLA

SEQ ID NO: 69637 - DNA, 450 bp, Unknown
  Obtained from environmental sample
  misc_feature (1)..(450): n is a, c, g, or t
atgggacgcacgttcatgcacgaatccttggactgcccgtttcgcacaggtcttgaagcaattaatgaactacgcaaacaaacgccgataatacttgtagacttccatgccgaagcatcaagcgaaaaggcggcgctcgcccactacgtggacggtctggccagcgccgtaatcggcacgcatacccacgtccagacggcggatgaacgaatatcgcctaagggaacggcgttcatcacggacgcgggaatgacggggccggaacattcgattatagggatgaagccggagggggtaatcaaaaagtatttattgcaaacctacgtgcgatatgagccgagtgaggatggggcgatgattaacggggttatcatagaaattgacgacgagagcggaaaggcgtcgtcgataaagagattgtttgaacgggtgtcgcttatccaaagttga

SEQ ID NO: 69638 - protein, 149 aa, Unknown
  Obtained from environmental sample
  misc_feature (1)..(149): Xaa is any amino acid
MGRTFMHESLDCPFRTGLEAINELRKQTPIILVDFHAEASSEKAALAHYVDGLASAVIGTHTHVQTADERISPKGTAFITDAGMTGPEHSIIGMKPEGVIKKYLLQTYVRYEPSEDGAMINGVIIEIDDESGKASSIKRLFERVSLIQS

SEQ ID NO: 69639 - DNA, 1362 bp, Unknown
  Obtained from environmental sample
  misc_feature (1)..(1362): n is a, c, g, or t
ttgactttagaattaaacatcaacacatacgatgcggggattatgacaaatatcaaagataattacaacttcatcgatacagaagacggcgacggcgacggcgacggctataacgatgacgacgacgggcaaggtttcgactttttaacgcctcaggaatcctccaaaccctacaccgtgagcgaaatcaactccggtattgcccaaatacttgaagagcgcaacaccttagtttgggtagagggcgagctgagcgggtggaagcgctacccgagcgggcactgctacttcaaattgaaagacgagcgtagccaaatcccaagcgttatgtggaagtcggccgctgtcaagctcaacttcaatcctagcgacgggatggcggtttttgccatcgcgtcaatcagcgtctacgagaaagcggggtactaccagctaagcgtccaccggttgatgccggcgggagccggagcgcagagtctcgcctttgaaaaattgaaagctaaattgttaaaagagggattgttcgacgagtctcgcaagcggtctctcccccgctccgtctccacgctcggcgttgttacaagcaaaaacggcgccgctctgtgggacatcgtgcgcgtcgccgctaagcgggcgcctcagaccgacatcgtcgtcgccgacacgccggttcagggcgacacggcggcggagaagatcgccaagtcgatccgcatgatgaacgacttaggcgggattgacgtgatgatagtggggcgcggcggcgggtcggcggaggatctgtgcgccttcaacgaggaggccgtggcgcgggcgatttacgattctaagataccggtaatatcggcggtcgggcacgagattgattttaccattgcggattttgtcgcggacgtacgggcgcccacaccgtcggcgggggcggagatggcgttgcccgatacggcggaggggcggcgctactttgaacaatgttcgagacggtttgcggcggggataaataggtatttttctgcgataaacgatagggtcaatgacatcaagtcgtcaaaagctttgacacgaccgttaaagatgttgacggaagcggagcagtcgttggacgaggccggcagtcgcatttgtcaatcaataaaatctatggttacgacaagcgacgtgcgtctaaagagcattgcggggcgattgaattcgctcagtccgctggccgtgttggggcgtggttattgtgtcgttaccgatagcggcggaacgacggtgaagagcgcgaatgaggtcggaatcggcgacagcgttaatattcggttggttgacggaacggtgggggcggaggtggtttcgactccgctcaaccaccggtag

SEQ ID NO: 69640 - protein, 453 aa, Unknown
  Obtained from environmental sample
  DOMAIN (78)...(153): OB-fold nucleic acid binding domain
  misc_feature (1)..(453): Xaa is any amino acid
MTLELNINTYDAGIMTNIKDNYNFIDTEDGDGDGDGYNDDDDGQGFDFLTPQESSKPYTVSEINSGIAQILEERNTLVWVEGELSGWKRYPSGHCYFKLKDERSQIPSVMWKSAAVKLNFNPSDGMAVFAIASISVYEKAGYYQLSVHRLMPAGAGAQSLAFEKLKAKLLKEGLFDESRKRSLPRSVSTLGVVTSKNGAALWDIVRVAAKRAPQTDIVVADTPVQGDTAAEKIAKSIRMMNDLGGIDVMIVGRGGGSAEDLCAFNEEAVARAIYDSKIPVISAVGHEIDFTIADFVADVRAPTPSAGAEMALPDTAEGRRYFEQCSRRFAAGINRYFSAINDRVNDIKSSKALTRPLKMLTEAEQSLDEAGSRICQSIKSMVTTSDVRLKSIAGRLNSLSPLAVLGRGYCVVTDSGGTTVKSANEVGIGDSVNIRLVDGTVGAEVVSTPLNHR

SEQ ID NO: 69641 - DNA, 924 bp, Unknown
  Obtained from environmental sample
  misc_feature (1)..(924): n is a, c, g, or t
atgacaatcaaagaaacccaagaggagataatccgcctgaagcgtgaaagggacatcttcctcctcgcgcacagttaccaggctcgcgaaatcattgaggtcgccgacttttccggcgactcctaccaattgagcgtagccgcctcgaaggcgccgcagaagagtgtcgtcatgtgcggggtcaagttcatggccgagaccgtcaaaatcctctccccggacaagaccgttctgctagccaacccggccgccggttgccctatggccgaacagatcgacaaagaattggttctagccgttaaagaggacgaccctgactgcaccgtcgtcgcttacatcaatacgacagccgaactcaagaccgtctgcgacgtttgcgtaacgtcgtcttccgcggtgaagatagtcaaaaagctctcgggcaaggatatcctcttcatccccgactcaaacctaggcaactacgtcgccaaacaggtacccgaaaagaggatacagctgttgaaaggcggttgcccaatacacatagccgtaagcgcgctagacgtggaaaacgcgagaatagcctttcccgacgcgttgctattggtgcatcccgagtgcatccccgacgttgtggcgcttgccgattttgtcggttcgacatcggcgataatggagtacgccgagaaatccaatcataccgattttgtaataggcacggagataagcatagtagagaatttacagtataaatgtttaggccaggaaaaacgcttttatccgttatcaaaaaggctaatctgtcccaacatgaaaatcacgtcattggttgatgtgttgaactgcctgcgcggtgatgggggagaggaagttatattggatgacgcgaccatcacggcggcgcggggatgcattgacaagatgattgaactgggtgggtaa

SEQ ID NO: 69642 - protein, 307 aa, Unknown
  Obtained from environmental sample
  DOMAIN (6)...(305): Quinolinate synthetase A protein
  misc_feature (1)..(307): Xaa is any amino acid
MTIKETQEEIIRLKRERDIFLLAHSYQAREIIEVADFSGDSYQLSVAASKAPQKSVVMCGVKFMAETVKILSPDKTVLLANPAAGCPMAEQIDKELVLAVKEDDPDCTVVAYINTTAELKTVCDVCVTSSSAVKIVKKLSGKDILFIPDSNLGNYVAKQVPEKRIQLLKGGCPIHIAVSALDVENARIAFPDALLLVHPECIPDVVALADFVGSTSAIMEYAEKSNHTDFVIGTEISIVENLQYKCLGQEKRFYPLSKRLICPNMKITSLVDVLNCLRGDGGEEVILDDATITAARGCIDKMIELGG

SEQ ID NO: 69643 - DNA, 474 bp, Unknown
  Obtained from environmental sample
  misc_feature (1)..(474): n is a, c, g, or t
gtggtaataggcggtcagacgtggttggcggaaaatctaaacagagagatgggtaactcttggtgttacggtaaccaaaattccaactgcgataagtacggcaggttgtacgatttccgcacggcaaaggcggcttgcccgtcagactggaagttgccggaggcggaggattgggggcgtttggtgacggcggccggtggtaaggatagcgcgggtaaggtattgaaatcgaaaaccggttggtacggcggcggtaacggtacggataatttaaagttttcggccctgcccggcggttaccgcgattccatcggcagtttctaccatgccggcgactacggcatctggtggacggccacagaggaaagtatccacgatgcttattatcgggctatggactacggctacgactacgtgagcgggtcctaccacgacaaaggctacgggcgttcggtgcggtgcgttaagaaataa

SEQ ID NO: 69644 - protein, 157 aa, Unknown
  Obtained from environmental sample
  misc_feature (1)..(157): Xaa is any amino acid
MVIGGQTWLAENLNREMGNSWCYGNQNSNCDKYGRLYDFRTAKAACPSDWKLPEAEDWGRLVTAAGGKDSAGKVLKSKTGWYGGGNGTDNLKFSALPGGYRDSIGSFYHAGDYGIWWTATEESIHDAYYRAMDYGYDYVSGSYHDKGYGRSVRCVKK

SEQ ID NO: 69645 - DNA, 327 bp, Unknown
  Obtained from environmental sample
  misc_feature (1)..(327): n is a, c, g, or t
ttgtcgtttcaatccacgcacccgtgcgaggtgcgacaccgcctcattaaaaagcatgactttgggtttgtagtttcaatccacgcacccgtgcgaggtgcgacgacaggcacaatgtccgccgcgcatccaattaaatgtttcaatccacgcacccgtgcgaggtgcgacttccgccagcggcgatgtatttgccggaggttaaagtttcaatccacgcacccgtgcgaggtgcgacttctcagtggcccagaacgtggacggtgcgtacgagtttcaatccacgcacccgtgcgaggtgcgacgcctgcgactgcgccggattaa

SEQ ID NO: 69646 - protein, 108 aa, Unknown
  Obtained from environmental sample
  misc_feature (1)..(108): Xaa is any amino acid
MSFQSTHPCEVRHRLIKKHDFGFVVSIHAPVRGATTGTMSAAHPIKCFNPRTRARCDFRQRRCICRRLKFQSTHPCEVRLLSGPERGRCVRVSIHAPVRGATPATAPD

SEQ ID NO: 69647 - DNA, 1182 bp, Unknown
  Obtained from environmental sample
  misc_feature (1)..(1182): n is a, c, g, or t
ttgtcaaaaaccgacttcggattcctgaaaaagtacgcgctgatcgtcaccggtgtcggtttcgttctcgtcagcctctcttttatctggttctcccacaacaagcagcggttgatatacagctcgctttacacggcagccaaggttttgcgggagagcgacaatatcagcgattataggaaattcgcggaggatttcagggacgtgcgggtcacggtgttcgacgaatcgggcgacgtgctggccgataatcaggcggagatggctacgatggttaaccatgccgaccgcccggagtttgcgggggcgaaagccgccggctacggcggcgacatgaggaggtccgagaccaccggcaagcagaccgtctacgttatggtgaagctgaagaacggcacctacgtacgccttgcccagtccgccggcctctcctacgagtttttgctgtggctcttcatacccatagccttcctctgctcctgcatagcggtgctgctgttcgtattcgtcaagaacaagcaggtggagcggatgcgccatgatttcgtggccaacgtctcacacgagctaaagaccccgctgacctccataaagggcttcgcggagctgacggcgacggggcttgtgaccgacgtggagtcggtgaggggctaccagcagaagatcgtctttcagagcgacaggctcttggccacgataaacgacatcctactcctctcaaaattggaaagcaccaaacccaaggaacttaaagaggtggacacgcgctccatagccgaccaggtgaaggaggcgctcaagcttctcgccgacgaaaaggacatcatcgtgcaggtatcgggagaggggaagattatagcggagccggagcccatataccatcttatatacaacctgaccgacaacggcataaagtacggcaaaggcggcggttttgtgaaggtcgcccttagcggcaagaggataacggtggcggacgacggcatcggcatccccgaaaaggacttggagagagtcttcgagcgtttttaccgggtggacaagtcgaggtcggcggagaggggcggcacgggcctcggtctggccatagtgaagcacaccgtccataaatacggcgggacggtatctatagagagcgttgttggtgcggggactgaggtgtccgtggagtttggcaggtag

SEQ ID NO: 69648 - protein, 393 aa, Unknown
  Obtained from environmental sample
  DOMAIN (178)...(245): His Kinase A (phosphoacceptor) domain
  misc_feature (1)..(393): Xaa is any amino acid
MSKTDFGFLKKYALIVTGVGFVLVSLSFIWFSHNKQRLIYSSLYTAAKVLRESDNISDYRKFAEDFRDVRVTVFDESGDVLADNQAEMATMVNHADRPEFAGAKAAGYGGDMRRSETTGKQTVYVMVKLKNGTYVRLAQSAGLSYEFLLWLFIPIAFLCSCIAVLLFVFVKNKQVERMRHDFVANVSHELKTPLTSIKGFAELTATGLVTDVESVRGYQQKIVFQSDRLLATINDILLLSKLESTKPKELKEVDTRSIADQVKEALKLLADEKDIIVQVSGEGKIIAEPEPIYHLIYNLTDNGIKYGKGGGFVKVALSGKRITVADDGIGIPEKDLERVFERFYRVDKSRSAERGGTGLGLAIVKHTVHKYGGTVSIESVVGAGTEVSVEFGR

SEQ ID NO: 69649 - DNA, 696 bp, Unknown
  Obtained from environmental sample
  misc_feature (1)..(696): n is a, c, g, or t
gtgatctatattgtcgaggacgacggggccataagggagctggtcgcggccacgcttgaggcggccgggcacgatgtgagggcgtttgactgcggcggcgccatgttcgctaaccccgacttcgccaaagccgatctatatctgctcgatatcatgctgcccgacatgaacgggcacaagataatggagaagctgaagaagtcaacggacgcccccgttatcttcctgaccgccaaaggcgaggagatcgacaaggcgaccggtctgcagctgggcgccgacgactacgtgacgaagccattcggcgtgctggagctcttggcgcgtgtcaaagcggttatgcgccgctaccaaaagacccacccgcagacagttatgtctttcgaaaacctaacgatagacacagaaagcaaaaccgcgtcgcccttcggaaagtccgtcaaattgacatacaaagagttcgaactattactctacttagcccaaaacaggaacaaagtgctctctagagaccaaatcctatcctcggtatggggcatggatttcgacgggatcacaacaaggacggtagacatccacatcaaaacgttgcgccaaaaactaggcgacaatgcggataagccgttattcatagaaaccgtacggggatacgggtacaagttcgtatgcgagcttgtagacgtggaagaggaataa

SEQ ID NO: 69650 - protein, 231 aa, Unknown
  Obtained from environmental sample
  DOMAIN (144)...(221): Transcriptional regulatory protein, C terminal
  misc_feature (1)..(231): Xaa is any amino acid
MIYIVEDDGAIRELVAATLEAAGHDVRAFDCGGAMFANPDFAKADLYLLDIMLPDMNGHKIMEKLKKSTDAPVIFLTAKGEEIDKATGLQLGADDYVTKPFGVLELLARVKAVMRRYQKTHPQTVMSFENLTIDTESKTASPFGKSVKLTYKEFELLLYLAQNRNKVLSRDQILSSVWGMDFDGITTRTVDIHIKTLRQKLGDNADKPLFIETVRGYGYKFVCELVDVEEE

SEQ ID NO: 69651 - DNA, 402 bp, Unknown
  Obtained from environmental sample
  misc_feature (1)..(402): n is a, c, g, or t
atgaaaatagtcatagacgctaatataataatatcatcttttttctggggtggtaatccgcgtttagttcttgaaagagttatatccggaatggatgaattatttataacaaaagaaattatagatgaaattgaatccgttattgttaggccgaaatttcacgcagacaaggaaaaaataacatattttattaactcaatcgaagagatcggaaataaaattgtcccaaaaaaacatataaaaaatggcagcagggataaaaaggataataaatatctggaatgtggaataactgctgatgttgattatataatatccggagatatacatttactggaattaaaagaatatgataatattaagattgcaacggcaaaagattatttagaccttgtaatgtaa

SEQ ID NO: 69652 - protein, 133 aa, Unknown
  Obtained from environmental sample
  DOMAIN (3)...(122): PIN domain
  misc_feature (1)..(133): Xaa is any amino acid
MKIVIDANIIISSFFWGGNPRLVLERVISGMDELFITKEIIDEIESVIVRPKFHADKEKITYFINSIEEIGNKIVPKKHIKNGSRDKKDNKYLECGITADVDYIISGDIHLLELKEYDNIKIATAKDYLDLVM

SEQ ID NO: 69653 - DNA, 1818 bp, Unknown
  Obtained from environmental sample
  misc_feature (1)..(1818): n is a, c, g, or t
atgaatattagaaaaaggaagactaagattgtttgttctttggggccttcgtcgtctgatgattctgtcgtgcgcgaacttatacttgccggaatgaatgtggcgcgtcttaatttttcccatggggataaagatacgcaccgcgcttccgtggaaaaagtcagacgcatttccgccgaactgggaattccggtcgcgcttcttttggacaccaaagggcccgagatacggacgggcatggtggaaaatgacggcaaggttactataaataaaggagatcaggtaattgttaccaccgatgactgttttacaacggcggctgagaacgggcagcccgcgcgtatttcattgtcatggaaagaaatggcggcaagactgcaatgcggacaccgcattcttgtcgcggacgggcttcttgagcttgaagtaaccgatatcataggcggcatcaaatgccgcgccaacaataccgcggttataggcagcaaaaaaaatgttaaccttatcggccttcacgccaatcttccaattatcggagataaggacaaagaagacatagaattcggcattgagatgaatattgattatgtcgcggcaagtttcttaagctttccccatgaagtaaccgaaattaagaaattccttgaaagccattcatcccgcatgaaaatcatcgcgaaaattgaaagcggcgaaggcctggaaaatatagttgaaatcgcgaggcttgcggacggcgtaatggtggcaagaggggaccttggcgtccagcttcccaccgagcagattccgctggcgcaaaaacacattatcagcgtgtgcagaagggcggggaagcccgtcattaccgcgactcagatgctggaatctatgatagtaaacccgcgccccacccgcgcggagcttaccgacgtggcgaacgcgatactcgacggaaccgatgcgatcatgctttcgggcgaaacgtcggcgggggcgtatcccgtggaatcggtaaaaactatggacagaatagcgtgcgttattgaacagtcggatgaattccgttttcgcatgagagatttacacaatgaatgtcatgccgatgtgcataatccgaaagacaaccttggcatcatcatgtcgagggcgggcgttgaaatcgccgcggaggtaaacgcgaaagccattgtaacgcctacgcgcagcggcaatacggcgcggatcttaagcgtattcaggccggaagagcctatttttgccgtgacaacagacgagcgctccgagcgcatcatgcagttatactggggcgttactacatgcatcaggccgaaagttgacgaatcggaaaccatgataaacgacaccatgaaaattgtttccgataccggggttgccggcatttccgataaagtggtgcttattgccggccttccgcttgaaagcccgaacatgataaacaatatccgcgttgtaattatagggacggttttggcgcgttcaagcgccggcggtttcgcgaatccgaacattacccgcgcccatggcaagataatccatgccgatacacctgatgaagcccgtaagaaaatcatgtcttcaggcggcggcgacataattatttgcaaggaacttaccgaggaatacggttccgttatcagcatggtaagcggaatcatttgcgagggagtttcggtaatcgtcgaacagaagttacgtatttttaatcccaatcttgtctggcttacccacatcagggacgcggcgaaaaaactcgaaaacgggttgacggttacgatagacgggaaggaactgcttgtgtatgaaggggcgatttag

SEQ ID NO: 69654 - protein, 605 aa, Unknown
  Obtained from environmental sample
  DOMAIN (374)...(486): Pyruvate kinase, alpha/beta domain
  misc_feature (1)..(605): Xaa is any amino acid
MNIRKRKTKIVCSLGPSSSDDSVVRELILAGMNVARLNFSHGDKDTHRASVEKVRRISAELGIPVALLLDTKGPEIRTGMVENDGKVTINKGDQVIVTTDDCFTTAAENGQPARISLSWKEMAARLQCGHRILVADGLLELEVTDIIGGIKCRANNTAVIGSKKNVNLIGLHANLPIIGDKDKEDIEFGIEMNIDYVAASFLSFPHEVTEIKKFLESHSSRMKIIAKIESGEGLENIVEIARLADGVMVARGDLGVQLPTEQIPLAQKHIISVCRRAGKPVITATQMLESMIVNPRPTRAELTDVANAILDGTDAIMLSGETSAGAYPVESVKTMDRIACVIEQSDEFRFRMRDLHNECHADVHNPKDNLGIIMSRAGVEIAAEVNAKAIVTPTRSGNTARILSVFRPEEPIFAVTTDERSERIMQLYWGVTTCIRPKVDESETMINDTMKIVSDTGVAGISDKVVLIAGLPLESPNMINNIRVVIIGTVLARSSAGGFANPNITRAHGKIIHADTPDEARKKIMSSGGGDIIICKELTEEYGSVISMVSGIICEGVSVIVEQKLRIFNPNLVWLTHIRDAAKKLENGLTVTIDGKELLVYEGAI

SEQ ID NO: 69655 - DNA, 420 bp, Unknown
  Obtained from environmental sample
  misc_feature (1)..(420): n is a, c, g, or t
atggcgagcgcagtcttgtatgggaatcgcggctatcggatcgggtatcggaattggttatgccggatcggctacataggcgcgtggaaaaagtgttatatttccaataaagcggctccgatgatgctgctggcatttgccggcgcgccgttaacacagactttttatggttttatccttatgggtcagatggtaacagccgctgaagcaaggcctgaaaactgctggctttatatcggttacggcattgcctccggtctcgcgatggcgttttccgccatagtccaaggcaaagtaggagccgcagccgccgacgcgcagggtgaaacaggcaaaggcttcgcacagtacatcgccgtagtaggtatcgccgagacaatcgcccttttcgcgatggtcttaacgatgatcagcctgtaa

SEQ ID NO: 69656 - protein, 139 aa, Unknown
  Obtained from environmental sample
  misc_feature (1)..(139): Xaa is any amino acid
MASAVLYGNRGYRIGYRNWLCRIGYIGAWKKCYISNKAAPMMLLAFAGAPLTQTFYGFILMGQMVTAAEARPENCWLYIGYGIASGLAMAFSAIVQGKVGAAAADAQGETGKGFAQYIAVVGIAETIALFAMVLTMISL

SEQ ID NO: 69657 - DNA, 1284 bp, Unknown
  Obtained from environmental sample
  misc_feature (1)..(1284): n is a, c, g, or t
atggcgagagcaccgcacaccgagggcgcgggactgggaatgaatataacaaaacggcttgtcgagttaatgaacggggatatttacgtggaaagcatcgttggcaaaggttcggtattcacggtaagcctgcctcagagaattgttgacacaggagtattgggtaaagaaatagttgaaaatctcatgcatttccgtataggcaagatgacgctgatgaataaagcgccgcagattgtccgcgagtatatgccttacggaaaagttctgatagtggatgacgtggaaacaaatctgtatgtcgccaaggggcttatgtctccttatgggttaataatagatacggccggaagcggttttgagacaatagaaaaaataaaaagcggcgaggtttacgatattatttttatggatcacttcatgcctaagatggacgggatagaagcggctaaaattatccgcgatttaaattatacgaagcctattgtcgcgctgacagctaacgcgctgacaggacagacggaaatttttcttacaagcggatttgacgggtttatatccaaacctatagatattcaccagttgaatttcgtaatgaataaatttattcgcgatgtatatccggcagaaattgttgaagcggcgcggaagataaaaaacaacatggaagaaaattccggcaagacgccgtctgtaaatccggcgcttctgaaggtttttacccgggatgcggaaaaagcggttatcgtactggaaatgataaatagaaaacagggcaattacacggacgaagatataaaattatatattattaatgttcacgcgatgaaaagcgctcttgccaatataggagagaaggaaatttcagatctggcgtctaagctggaaaaagcggggcatgagcgtgataatgctgtaatagcggaagacacgcctgtgtttttatcagcgctgcgtgccgtggttgagaagaacaaattaattattgacaagatttccaataaagacgcggataataatcaatatgatgatatgaattatttgtatgaaaaactggctgtaataaagaaggcttgcgccgattatgataaaaaaaccgccaaaaaaaccctgtctaatctgagtaaaatgaaatggccgccgccggttgttgaacttatggataaaatagcggaacagttgctccacggtgagtttgacgaggccgcaaagctggcgggtgatttaaaaaacagcaataataagcctctttttcctctggattttcataaaggcaagtattag

SEQ ID NO: 69658 - protein, 427 aa, Unknown
  Obtained from environmental sample
  DOMAIN (87)...(200): Response regulator receiver domain
  misc_feature (1)..(427): Xaa is any amino acid
MARAPHTEGAGLGMNITKRLVELMNGDIYVESIVGKGSVFTVSLPQRIVDTGVLGKEIVENLMHFRIGKMTLMNKAPQIVREYMPYGKVLIVDDVETNLYVAKGLMSPYGLIIDTAGSGFETIEKIKSGEVYDIIFMDHFMPKMDGIEAAKIIRDLNYTKPIVALTANALTGQTEIFLTSGFDGFISKPIDIHQLNFVMNKFIRDVYPAEIVEAARKIKNNMEENSGKTPSVNPALLKVFTRDAEKAVIVLEMINRKQGNYTDEDIKLYIINVHAMKSALANIGEKEISDLASKLEKAGHERDNAVIAEDTPVFLSALRAVVEKNKLIIDKISNKDADNNQYDDMNYLYEKLAVIKKACADYDKKTAKKTLSNLSKMKWPPPVVELMDKIAEQLLHGEFDEAAKLAGDLKNSNNKPLFPLDFHKGKY

SEQ ID NO: 69659 - DNA, 1215 bp, Unknown
  Obtained from environmental sample
  misc_feature (1)..(1215): n is a, c, g, or t
atgaagaaaatgcccgttttctcaatattttttctcattttggccatgtccgcttcagctcaggataacgggaattatgttggttcgcgggtttcggcggaagccagaagtaaccttataaggcttacatgggtagattccccggacgcgcgggggccggtctatatattccgctcctcaaggcctttttccggctctgtccccgctaacctaaggcctgtaaccgtcaaatacggagaacagtactatatagacgattccgatgacctggaaatcatctattattttgtcgccgcaagcgatatttcggggcggcgctacgatacaattattccacgggtaaacagtaccaatgtaaatatttccgggacggttcctgaggaagattttgttctaaatgagcagttaactgctcccattcaggggatttctaatttaacggcaagactggacggggagaggatattgatcaccttcgacgtgaacggcccgcgtaaaaacgccgttctttaccgaagcacacagcctgtcagggagccgcgtgatttattgaacgccgtaatggtgcaatccgggcttaggtcccctttttttgattatcctgttcccggtctttcttattattacgcgcttgtttatgaagatgaaatatccggcggcagtcttgcaattactcccggcattaacgcgacaatctcagccataaccctatatggcggcggcatgacggaaagagcgctgcgccctataccgcttcccgccatgacattgaacaacgctttgccggaaggctatttcctgcctgactcagcgaattccgcatcattaagcgacgctttactaagtgacaatgccgcgaaagttataagaaatacttcagtacccgataaagcgcctatagagcaaagaaagccgcgcgctttcagggtcgatcttcagtcgccgtcaggcggggaagattccgccctttttgaaataatcagcgagtcttttataaaccgcgattgggagaaagcgcgcgtggatttacagcactatctttcactgccgcgctcaaaagacgtggaagcgcgcgcccgtttttattttgggcagacattatactttaccggaaatttcaagggagcgttatttgaatttttatccattaagtcgattcatcctgtggaagcgaatatgtggatagattctattttggcggcgatggtttattaa

SEQ ID NO: 69660 - protein, 404 aa, Unknown
  Obtained from environmental sample
  SIGNAL (1)...(20)
  misc_feature (1)..(404): Xaa is any amino acid
MKKMPVFSIFFLILAMSASAQDNGNYVGSRVSAEARSNLIRLTWVDSPDARGPVYIFRSSRPFSGSVPANLRPVTVKYGEQYYIDDSDDLEIIYYFVAASDISGRRYDTIIPRVNSTNVNISGTVPEEDFVLNEQLTAPIQGISNLTARLDGERILITFDVNGPRKNAVLYRSTQPVREPRDLLNAVMVQSGLRSPFFDYPVPGLSYYYALVYEDEISGGSLAITPGINATISAITLYGGGMTERALRPIPLPAMTLNNALPEGYFLPDSANSASLSDALLSDNAAKVIRNTSVPDKAPIEQRKPRAFRVDLQSPSGGEDSALFEIISESFINRDWEKARVDLQHYLSLPRSKDVEARARFYFGQTLYFTGNFKGALFEFLSIKSIHPVEANMWIDSILAAMVY

SEQ ID NO: 69661 - DNA, 564 bp, Unknown
  Obtained from environmental sample
  misc_feature (1)..(564): n is a, c, g, or t
atgaccgtaattgttgtcggaatatcatttgccttattatggcttgtaacaacattttttattttccgccatattaacaggcttaagaatgatttgcttaataaacattccgatactgaaaaacagccggaaaaaagcgaagatattcatggcgaaaaaacatataagccttttgaaaatattaacagtgccgatccctcgcatcttttaaacttcatccagcaggaacatccgcaggttatcgcgcttatcctttcgcacatggaaccgaacaaggcttcgattattctgcaaaaccttccccataaaacgcaaagcgacgtaaccttgcgtatcgctgtcatggatcgtgtcagccatgaaataacgcgtgaaattgagaaggttgtggaaaagaaattatcctcaatgtctgatttcgaaggtttttccgtgtcaggcggcattgaaaacacagctaaaattttaaacaatgttgaccgcgcgtctgaaagatatattttagaggctcttaatgaaaaagaacctgaaattaccgaagaaattaaaaagagaatgtcttaa

SEQ ID NO: 69662 - protein, 187 aa, Unknown
  Obtained from environmental sample
  misc_feature (1)..(187): Xaa is any amino acid
MTVIVVGISFALLWLVTTFFIFRHINRLKNDLLNKHSDTEKQPEKSEDIHGEKTYKPFENINSADPSHLLNFIQQEHPQVIALILSHMEPNKASIILQNLPHKTQSDVTLRIAVMDRVSHEITREIEKVVEKKLSSMSDFEGFSVSGGIENTAKILNNVDRASERYILEALNEKEPEITEEIKKRMS

SEQ ID NO: 69663 - DNA, 780 bp, Unknown
  Obtained from environmental sample
  misc_feature (1)..(780): n is a, c, g, or t
ttgcaggacggagtgtataggacaatgaatgacgacaataataacagcatccgcataaaccgctacttagcccaatgcggccttggcgctcgccgcaagtgcgacgagttggtggagggcggccatatctacatcaacggccaaaaggtgacggagctcggcaccaaggtcaatcccgccgttgacaaagtggaatataagggcaaacagctccgccctatccgtaagttggagtactacgcctactgcaaaccgcgcgaggtgatggtgaccaacagcgatcccgagggacggctcacgatctacgaggcgttgcggcgcgacgggctcgacgccggcctgctcaaatacgtggggcggcttgactacctctcggaaggtctgttgctactgaccaacgacggcgatttgatccacgccttaacgcacccgcgtttcanaataaaaaaaatctacatggtgaggacttcgcgcccgcttgacaaaggggatattttaaagctgctcgacggtgtggagtcggaaggccagctgctccacgccgcctccgttgacgccgtggacgtaaagccggatcaatactggtacgagatagcgctctttgaggggaaaaaccgtcaaatacgccgaatgttggaaggcataggccacgaagtgagacgtctgcgccgcaccgccttcggatccgtgaggttgggcgacatgacggcgggggagtacagggagttgactccgagggaattatcggggctgaagaacgcggggtttaagaacacctga

SEQ ID NO: 69664 - protein, 259 aa, Unknown
  Obtained from environmental sample
  DOMAIN (17)...(63): S4 domain
  misc_feature (1)..(259): Xaa is any amino acid
MQDGVYRTMNDDNNNSIRINRYLAQCGLGARRKCDELVEGGHIYINGQKVTELGTKVNPAVDKVEYKGKQLRPIRKLEYYAYCKPREVMVTNSDPEGRLTIYEALRRDGLDAGLLKYVGRLDYLSEGLLLLTNDGDLIHALTHPRFXIKKIYMVRTSRPLDKGDILKLLDGVESEGQLLHAASVDAVDVKPDQYWYEIALFEGKNRQIRRMLEGIGHEVRRLRRTAFGSVRLGDMTAGEYRELTPRELSGLKNAGFKNT

SEQ ID NO: 69665 - DNA, 864 bp, Unknown
  Obtained from environmental sample
  misc_feature (1)..(864): n is a, c, g, or t
ttgatctgccgctccacggccacgccaggagaggccaaaatcgtaagacttttttaccacccgatacctgcccataatgtatattacaagtatccaaaccgaggagaccctatgcaggtaaagaagaaagccgcgaaaaagacctataagtcgtcggccaagaaaaagaccgttccgagcctcaacatggttacgatggacgagttgaaagccattatcgccgaaacatccaagacaatggccgaaaaccacgccaaaaccgaggcctcgattgataggctgtccgccgtccaagccaaaaccgaggcctcccttttggaactacatgccgaagtcagggaaacctctgccaaagtcagggaaacctctgccaaagtcagtgaaacctcggaatccgtccggcaactgaacgacacgctcggcgggatgggcggacacctcggcgaagtgatagaatttatcgtcatacccaagatacgccccgccataaacgctttgggcaatcactcgtttaaagagatcacggcacggaaaatcgtcgagaccgttattaacaatagaaagagaaaactaaccgaggtagacgtgctgctgtacggcgacaccgaggctatggccgttgagataaagacttgtttacagacaagcgatgtcgataaacatttggagcgtctgcaaaaactgcgcgaccacgaaatagacgccgaggtcaaaggcaagacgcttttcggcgcggtggtaggcgcaatcgtacacgagccaatcagagcctacgcccttaaaaagggcctatacgtcatagagatccgcgaagaagaggataaactcgacatagacaaacccgacacctgccggacgtggtaa

SEQ ID NO: 69666 - protein, 287 aa, Unknown
  Obtained from environmental sample
  misc_feature (1)..(287): Xaa is any amino acid
MICRSTATPGEAKIVRLFYHPIPAHNVYYKYPNRGDPMQVKKKAAKKTYKSSAKKKTVPSLNMVTMDELKAIIAETSKTMAENHAKTEASIDRLSAVQAKTEASLLELHAEVRETSAKVRETSAKVSETSESVRQLNDTLGGMGGHLGEVIEFIVIPKIRPAINALGNHSFKEITARKIVETVINNRKRKLTEVDVLLYGDTEAMAVEIKTCLQTSDVDKHLERLQKLRDHEIDAEVKGKTLFGAVVGAIVHEPIRAYALKKGLYVIEIREEEDKLDIDKPDTCRTW

SEQ ID NO: 69667 - DNA, 342 bp, Unknown
  Obtained from environmental sample
  misc_feature (1)..(342): n is a, c, g, or t
atggataacgcaaaagacgcattattggaattcaccgaccaaaacttcgccgactccgttttggccaaccccaagcccgtagtggttgacttttgggcgccgtggtgcgggccgtgcaagatgctcactccgatcatacacgaattggccggcgagtacgccgacagtatcgccataggcaaactcaatatcgacgactgccccgccgtcgcggcgaagtacgggatagagaccatccccacgctgctcttcttccgcaacggcgatatcgtggggcggcaggtagggctcttggccaaggcgccgctaaaggcaaaaattgacgacgcgtttaagggttaa

SEQ ID NO: 69668 - protein, 113 aa, Unknown
  Obtained from environmental sample
  DOMAIN (7)...(110): Thioredoxin
  misc_feature (1)..(113): Xaa is any amino acid
MDNAKDALLEFTDQNFADSVLANPKPVVVDFWAPWCGPCKMLTPIIHELAGEYADSIAIGKLNIDDCPAVAAKYGIETIPTLLFFRNGDIVGRQVGLLAKAPLKAKIDDAFKG

SEQ ID NO: 69669 - DNA, 1554 bp, Unknown
  Obtained from environmental sample
  misc_feature (1)..(1554): n is a, c, g, or t
atgaaaattttagcgcttaacccgcctttcttacccaagtactctcgggaatcgcgctctccggcggtcaccaagagcggtacgctctactaccccatgtggctctgctacgccgtaggctatttggagaagtccggccacgaggttcatctgattgacgctccggcggccggtttgtcaacgtctgaggtggtaagcgaaatccgcgagtttgagccggatatggcgatactcgacacctccacgccgtcgatatacgccgacgtcgcggtgggcgaagagctgaaacgcgtattccccgacatcttcatagtgcttgtcggcgtccacgtgtcggcgttgcccgcggaaacgctcgccctctcgcccaagatagacgcggtggctttcggggagtacgacgagacgctcgtggaactcgctaaaacgcttgaatcggtcaacgccggtaccggcgcgcccccgcccgtagtcggagcacccgctgaggaggagacgccggcgcaggttgacccgataggcgacgcccttcgcgccgtgcgcgggcttgcgtatagggacggcgccggggagatacacaaaaacgaggcgcggccgttcatagagaatctcgacgatatcccgtttgtctcggaagtctatcacaagtttctcgacataaacccctacttctacggccacagccgccacccccttatagtgatagtgaccggccgcggctgcccgttccaatgcacctactgcgtgttgccgcagaccatgcaggggcacaagtaccgcaagcgttccacggagtccatcgtgcaggagtttttatatatacgggataattttcccggcgttaaggagataatgatagaggacgacacgctgaccgccgaccgcaaacgctgccgcgaactctccgaggcgctcatagcgacaggcggccaccgcataccgtggtcggccaactcccgcgccgacgtcgattacgatacgatggtgctaatgcgcaaagccggctgccgcctcttctgcgtcggtttcgagagcggcgaccagaccatcctcgacaacataaagaaatctattacgctggagaagatagtaacgttcgcgcgcgacgcgaaacgggcgggtatcttggtgcacggctgcttcatggtcgggaaccggggcgaaacgcgggagacgctcgagactacgctgcaatttgcgaaagagctaagccccgacaccgcgcagttctacccgataatggtctatcccgggaccggcgactacgagtatttcggcgagaaggggtggatagtgtcgaacgattttcggcattggctgacggaggacgggctgcactcgtcggttgtgtcgaatccggatttgcggtatgaggaattggtcgcgttttgcgatagggcgcgacgcaagttttacctgcgccctacgtacatattggataagttcaagcagatgattacgaatccgggggaggctaagcggataatcaaagcggctttgacgttcttccggtatttgctgcagccgtctatcaagcgtaataagagccgttaa

SEQ ID NO: 69670 - protein, 517 aa, Unknown
  Obtained from environmental sample
  DOMAIN (19)...(143): B12 binding domain
  misc_feature (1)..(517): Xaa is any amino acid
MKILALNPPFLPKYSRESRSPAVTKSGTLYYPMWLCYAVGYLEKSGHEVHLIDAPAAGLSTSEVVSEIREFEPDMAILDTSTPSIYADVAVGEELKRVFPDIFIVLVGVHVSALPAETLALSPKIDAVAFGEYDETLVELAKTLESVNAGTGAPPPVVGAPAEEETPAQVDPIGDALRAVRGLAYRDGAGEIHKNEARPFIENLDDIPFVSEVYHKFLDINPYFYGHSRHPLIVIVTGRGCPFQCTYCVLPQTMQGHKYRKRSTESIVQEFLYIRDNFPGVKEIMIEDDTLTADRKRCRELSEALIATGGHRIPWSANSRADVDYDTMVLMRKAGCRLFCVGFESGDQTILDNIKKSITLEKIVTFARDAKRAGILVHGCFMVGNRGETRETLETTLQFAKELSPDTAQFYPIMVYPGTGDYEYFGEKGWIVSNDFRHWLTEDGLHSSVVSNPDLRYEELVAFCDRARRKFYLRPTYILDKFKQMITNPGEAKRIIKAALTFFRYLLQPSIKRNKSR

SEQ ID NO: 69671 - DNA, 456 bp, Unknown
  Obtained from environmental sample
  misc_feature (1)..(456): n is a, c, g, or t
atgaacggccgcgcctcgtttttgtgtatctccccggcgccgtccctatacgcaagcccgcgcacggcgcgaagggcgtcgcctatcgggtcaacctgcgccggcgtctcctcctcagcgggtgctccgactacgggcgggggcgcgccggtaccggcgttgaccgattcaagcgttttagcgagttccacgagcgtctcgtcgtactccccgaaagccaccgcgtctatcttgggcgagagggcgagcgtttccgcgggcaacgccgacacgtggacgccgacaagcactatgaagatgtcggggaatacgcgtttcagctcttcgcccaccgcgacgtcggcgtatatcgacggcgtggaggtgtcgagtatcgccatatccggctcaaactcgcggatttcgcttaccacctcagacgttgacaaaccggccgccggagcgtcaatcagatga

SEQ ID NO: 69672 - protein, 151 aa, Unknown
  Obtained from environmental sample
  SIGNAL (1)...(18)
  misc_feature (1)..(151): Xaa is any amino acid
MNGRASFLCISPAPSLYASPRTARRASPIGSTCAGVSSSAGAPTTGGGAPVPALTDSSVLASSTSVSSYSPKATASILGERASVSAGNADTWTPTSTMKMSGNTRFSSSPTATSAYIDGVEVSSIAISGSNSRISLTTSDVDKPAAGASIR

SEQ ID NO: 69673 - DNA, 1371 bp, Unknown
  Obtained from environmental sample
  misc_feature (1)..(1371): n is a, c, g, or t
atgtactggctaaaaacgcacaaaccctataaaacgccggcgacaatggctttaccggatattgcgcttccggaaccgcgtatttcaaaaccgcttatcccttttctcaggatacctgccagactctacattttattttcttatggggcggcgcgcattgccctgttgggggaaaaggttctttttgaagcctttaagcgggcgcttgccggggaaagccgctgcattatcgcttttcgccactctaatgggggggaaccgcagcttttgtcgtggtatttcctttaccgtcttaaagccgatgccgccaggaagggcatgcggtttgcgcggcggcctcatgcggtatttgtgtacggttatgaagtggcccgctggggcggttttctggcccgtttcgccctgccgcgcctgggggctttgccggtacatcacgcaaaaatggacagccggggcatggacaggatttacaaggctattgttgaggggccctatccgctcgcgctggcgccggagggccaggtgtcctacacctccaatgccgttccccggcttgagccgggcgttatgcggcttggttttacggcggcgcggcggattgaagaaaaaggctccggctgcccggtcgaggttcttcccttgtcgattcacctccgttacggacgcaggggaagggcggctatggaaaagctcctgggcaaaattgaaaggcttgcgggtttttcgctcagaggccgaaaggagcttccgtttgtggaacgtttgcggcagtgcagggagcgtatccttgaagtgaacgaagcccggtatcacattgaggcagataccgcctttccctttgaggagcggcttgaccgggtgattgccgtcgcgctggaaaccgccgagcggacgcttggccttaaaagcgaaggtgaattgtttccgcgcatgtaccggctgcgccagatatgctgggataggattatcctgccgggcatagacagcctgaaagacatgccgcccgttgatcgcggcgcggcggatcttctcgcgggggaagcctggcatatcgggcggcatcaggaattggtggatttctgctggtactttcgcgttccgcttccagccggggccctgcatgaccaggttgagtatgtgcagaacctttgggattttgccaaccgtactatgggcggcgcgtttgccgacaggataaccatagctccccggaaaataattatccatgccgagccggttatcaatttgaccgggcgccttccttcatatcagaaagataaaaaggccgccgtcgcgcagtcgctggccgatctggaaaaggcatacctaaatagcataaatgaaataaacaggcttgaaccaggaggataa

SEQ ID NO: 69674 - protein, 456 aa, Unknown
  Obtained from environmental sample
  misc_feature (1)..(456): Xaa is any amino acid
MYWLKTHKPYKTPATMALPDIALPEPRISKPLIPFLRIPARLYILFSYGAARIALLGEKVLFEAFKRALAGESRCIIAFRHSNGGEPQLLSWYFLYRLKADAARKGMRFARRPHAVFVYGYEVARWGGFLARFALPRLGALPVHHAKMDSRGMDRIYKAIVEGPYPLALAPEGQVSYTSNAVPRLEPGVMRLGFTAARRIEEKGSGCPVEVLPLSIHLRYGRRGRAAMEKLLGKIERLAGFSLRGRKELPFVERLRQCRERILEVNEARYHIEADTAFPFEERLDRVIAVALETAERTLGLKSEGELFPRMYRLRQICWDRIILPGIDSLKDMPPVDRGAADLLAGEAWHIGRHQELVDFCWYFRVPLPAGALHDQVEYVQNLWDFANRTMGGAFADRITIAPRKIIIHAEPVINLTGRLPSYQKDKKAAVAQSLADLEKAYLNSINEINRLEPGG

SEQ ID NO: 69675 - DNA, 381 bp, Unknown
  Obtained from environmental sample
  misc_feature (1)..(381): n is a, c, g, or t
ttgaaccaggaggataatattatggaagctaatacgccgcggctgacgcttaaaacaaaattcagttttggcatttgcgatctgggggggaatcttttctttaccctcatgggtttctggagcctcaagtaccttaccgacatcgcgggcattgcggcggcatgggccggcattgcggtaatggcgggcaaggtttgggacgcggtaaccgatccgatgatgggctatatttccgataggacgctttcgcggtgggggcggcggcggccctatttgctgttcggcgcggttccgctggcgctgactatgtggctgtttttttcccgcgccgcgcgccgaaaaacccggttatgctggttttgtgggccgggcttgcgctga

SEQ ID NO: 69676 - protein, 126 aa, Unknown
  Obtained from environmental sample
  misc_feature (1)..(126): Xaa is any amino acid
MNQEDNIMEANTPRLTLKTKFSFGICDLGGNLFFTLMGFWSLKYLTDIAGIAAAWAGIAVMAGKVWDAVTDPMMGYISDRTLSRWGRRRPYLLFGAVPLALTMWLFFSRAARRKTRLCWFCGPGLR

SEQ ID NO: 69677 - DNA, 432 bp, Unknown
  Obtained from environmental sample
  misc_feature (1)..(432): n is a, c, g, or t
atgaagatacttgtgatcaacgggccgaacatcaatctgctcggtaatcgggagccggatatttacggcattaaaagttatgcgtcattgctggaattcatacgggatgtggccgtacagcatggcgtggaagtagagtgcatgcagtcgaaccatgaaggcgcgattgtggacgcgatccaggccgcttacggccgctttgacgccatcgtgatcaacccggcggcatatacgcatacaagcgtcgccattcttgacgctttgaaggcgatcgcgcttcctgcggtagaagtgcatttatcgaacgtccacgagcgcgaggctttccgcaaaatatcctatgtgacaccggcctgcgaaaggacattcgccggcatgggatttgagggatatgcgctggcgatacgttatctcgcgggtaaggaagaataa

SEQ ID NO: 69678 - protein, 143 aa, Unknown
  Obtained from environmental sample
  DOMAIN (1)...(143): Dehydroquinase class II
  misc_feature (1)..(143): Xaa is any amino acid
MKILVINGPNINLLGNREPDIYGIKSYASLLEFIRDVAVQHGVEVECMQSNHEGAIVDAIQAAYGRFDAIVINPAAYTHTSVAILDALKAIALPAVEVHLSNVHEREAFRKISYVTPACERTFAGMGFEGYALAIRYLAGKEE

SEQ ID NO: 69679 - DNA, 1149 bp, Unknown
  Obtained from environmental sample
  misc_feature (1)..(1149): n is a, c, g, or t
atgaaaaagacattcggcttgttaggtgaaaaattgggtcacagcttctccccgctgatccacgggtatctcggcgaatatgattattcgctgtacgaggtatccgccggcaatcttgattcgttcatgactgacaggcgctttgacgggattaacataacaatcccctacaaacaacaggtagcgccttactgcgttaccctttccgacgaggcgcggaaaaccggcagcgtgaacacgatcataaaggatagtgacggggcgttgcacggttacaacacggactatcacgggttttgcgtgatgctggagcagggcggaatagatccgaagggaaaaaaagctttagtgttaggcgacggcggatccgcgcggacagtgagggcggctttggacggactgggcgcgcgggagattgtgacgatatcccgccggggaacggaccactacggcaacatcgaccgtcattatgacgcggaactcatcgtaaacaccacgcccgtcggtatgtatcctgacaacggcaacggccctttaagccttgagggattcaggcatttaaccggcgtggccgatttaatctacaatcccacgcggaccaaactcctgcttgaggccgaggggcttggcattccttgcgtaaacggccttgcgatgctggtggcccaggcggaggcggcctcccggttgtttctagactgtcccgccaggccggaactggtgaataaaattcacggcgcgattctcaaaaaaacgcaaaacatcgcccttatcggcatgcccggctgcggaaaaagcactgtcggccgcatcctcgcccaaaagacggggcgcccctttgcggatattgacagacatattgaggcggccgcgggcaagaaaatcccccaaattttcgccgatgatggcgaagaaacattccgacagctggaaacccgcatacttgccggggaagccaaaaacagcggcatggtactggcgacaggcggtggcgtggtgacacggcctgaaaatctcgacctgctgcggcaaaacagtttaattgtttatttaaaacgcgaattaaccgatcttattacagatggccgggccgctttcacagaacattgggattcaagcccttgccgaaaagcggctgcctttatatga

SEQ ID NO: 69680 - protein, 382 aa, Unknown
  Obtained from environmental sample
  DOMAIN (99)...(203): Shikimate / quinate 5-dehydrogenase
  misc_feature (1)..(382): Xaa is any amino acid
MKKTFGLLGEKLGHSFSPLIHGYLGEYDYSLYEVSAGNLDSFMTDRRFDGINITIPYKQQVAPYCVTLSDEARKTGSVNTIIKDSDGALHGYNTDYHGFCVMLEQGGIDPKGKKALVLGDGGSARTVRAALDGLGAREIVTISRRGTDHYGNIDRHYDAELIVNTTPVGMYPDNGNGPLSLEGFRHLTGVADLIYNPTRTKLLLEAEGLGIPCVNGLAMLVAQAEAASRLFLDCPARPELVNKIHGAILKKTQNIALIGMPGCGKSTVGRILAQKTGRPFADIDRHIEAAAGKKIPQIFADDGEETFRQLETRILAGEAKNSGMVLATGGGVVTRPENLDLLRQNSLIVYLKRELTDLITDGRAAFTEHWDSSPCRKAAAFI

SEQ ID NO: 69681 - DNA, 1146 bp, Unknown
  Obtained from environmental sample
  misc_feature (1)..(1146): n is a, c, g, or t
atggacttacaggattaccgggcgcagatagacaaggttgacgatcagcttttatcgctgtttaaagaaaggatgggcatctccggcaaaatcgcccagttcaaaaaagagcatggccttcccgctctggacgccacgcgggaaagggagaagttagccgatatcggcgaaaaggcaggcgatgatattcgttctttcgcgtatatcctgtatacgacgctgtttgaaatcagccgcgcccatcaggtgaatatcattaacgccgaatccgatctcaataaaattatatcagaagcggtggaacacaccgagcgggtgttcccgcagcacgcgcttgtcgcctgtcagggcgtggaaggcgcgtattcgcagatcgcctgtgacaggctgtttgccgatcctaacattttttatttcacgggctttgacggagtgttttcggcaatccgggacggactatgccaatacggaatactgcctctggaaaacagcacggccggttcggttactctggtatacgaccttatgatgaagcacagtttcaagatcgcgcggagcgtgcggctgaaaatcgatcacaacctgctggcgaaggcgggcgttaaaaaagaaaacatccgcgaaattttctcgcatgaacaggcgattcagcagtgcgcgggctacctgaaggggcttggcaagaacgtgaaagtcaccaccgtcaccaataccgccgaggcggcgaaaatggtcgcggaatccgaccggaacgacgttgcggctcttgcctcccattcgtgctgtgatttatacgccctgaaatgcgtggaaagctcggtgcaggacaggggcaataactacacgcggttcatctgtatctcaaaaaacctcgaaatatatcccggggcggaccgtaccagcatcatgctgaccaccgcgcacaagcccggttccctttacaaggtactcggtctgatatacgccctcggcgtgaatgtcgtaaagctggaaagccgcccgatccccgaccgcgatttcgagttcatgttttatttcgatcttgaaacatcggtatattcaaaaaaattcagccagcttatgtgcgagttggaaaatttatgcgaggaatttcactatctcggaagttacacagagattgtttga

SEQ ID NO: 69682 - protein, 381 aa, Unknown
  Obtained from environmental sample
  DOMAIN (7)...(85): Chorismate mutase type II
  misc_feature (1)..(381): Xaa is any amino acid
MDLQDYRAQIDKVDDQLLSLFKERMGISGKIAQFKKEHGLPALDATREREKLADIGEKAGDDIRSFAYILYTTLFEISRAHQVNIINAESDLNKIISEAVEHTERVFPQHALVACQGVEGAYSQIACDRLFADPNIFYFTGFDGVFSAIRDGLCQYGILPLENSTAGSVTLVYDLMMKHSFKIARSVRLKIDHNLLAKAGVKKENIREIFSHEQAIQQCAGYLKGLGKNVKVTTVTNTAEAAKMVAESDRNDVAALASHSCCDLYALKCVESSVQDRGNNYTRFICISKNLEIYPGADRTSIMLTTAHKPGSLYKVLGLIYALGVNVVKLESRPIPDRDFEFMFYFDLETSVYSKKFSQLMCELENLCEEFHYLGSYTEIV

SEQ ID NO: 69683 - DNA, 597 bp, Unknown
  Obtained from environmental sample
  misc_feature (1)..(597): n is a, c, g, or t
atgagaacggttcattttgcgaaaatagcgggtatcgttttactgccggtcttcctgctttcatgtttcatggctgcgggggacgctggtgagagcagtggcggtggcggttacggatggaattccggccccccttcctacccttacccctctcgtcccgatggtaatgattatgacactgattatgactctaaggaagaattcgaccccggcagctttgacagcataaaagacaacccattcaagcgcgttcaggactacccgctctccactttttctattgatgtggatacagcgggctattcgataacccgcggttatattgagtacggccaactgccccccaaatcggcaatcagaattgaagaattgataaattattttgattatgattacgcgccgccgccgccagatgaagaaaagccttttgcggttcataacgaagtgggggtatgcccctggaatgcagagcatcttcttgcgcggattgcgataaagggcaaagagtttccggttaatgaacggccccgggttaacctggtgtttctgattgatgtttccggctcgatgagtcctgcaaaccgcctgccgcggtaa

SEQ ID NO: 69684 - protein, 198 aa, Unknown
  Obtained from environmental sample
  SIGNAL (1)...(27)
  misc_feature (1)..(198): Xaa is any amino acid
MRTVHFAKIAGIVLLPVFLLSCFMAAGDAGESSGGGGYGWNSGPPSYPYPSRPDGNDYDTDYDSKEEFDPGSFDSIKDNPFKRVQDYPLSTFSIDVDTAGYSITRGYIEYGQLPPKSAIRIEELINYFDYDYAPPPPDEEKPFAVHNEVGVCPWNAEHLLARIAIKGKEFPVNERPRVNLVFLIDVSGSMSPANRLPR

SEQ ID NO: 69685 - DNA, 2904 bp, Unknown
  Obtained from environmental sample
  misc_feature (1)..(2904): n is a, c, g, or t
atgtcggcacataattctttctcaaaaataaaagcttgggtaaaaagatcgctgtatgcgcagatgctgtttgtggcattggcgtatgcgttgatggttattgcaagttatatttttgtaagcgatattgagcgtaataatttaagagcaaaagtaaaagacgttatttcatatacggaagccaatattaaagccgatatgctggaacccgaaacggcattggccgccattgcggaaaccatccacgctatgattatgagtgatgaagagagtgaaacggtgcaggaatatatccggcatatcaataattatatgcaggataacgaaaaaaatcgtcttgtaggcgtcatgggtttttacggtttttttgatgtttttgggaaaagatattttactgaaaaagaagaagactggattcctccggaaggttatgtactgcaggaacgtccctggtatcgggcggctgtcgaggcggacggggacataggaataaccgaaccgtataacaatataagaaccggagatattcccattattacattttcccgctgtatttttgacgaaaacggcgaaaggttgggtgttatatgtctggatattaaacttgacagaatcagacagcacgccattaatacgcagtttaccaaaaaaggttacggattcctgttaagccgcgacatggaattaatcgcccatccggatccttcgcttttgggtaaacgtctgcgtaacgtaagaagctatatagcggcttatgagaatgaactggagaagaacggctatatttatgagattataacgaccgattacaggggaatcaaatccattgtttttatagaaagactctacaacggctggtatatgggagttgtaacgccctatgacaaatactatcaaaccacaagaaatatggctttgtttcttaccgcgttgggtacggctctggcattaatactcataataatacttgggcgtatttccgctgaaataagagaggtgacaaaaaaacaagcggacgcggaagcccaggcgaatcaatcaaagcaatcgctcagtatacttacaaatattctgaatggaattgacgcgcagatatacgctgttgttcctcataccggagagattctttttattaacgacttcatgaagaaacacttcaaccttgaaggcgattgtaccggaaagttatgttataaactttttttaagagaccaggataaattatgtgattattgtccctgctaccggttggataaagacccgcatggaactgttgtgtgggaagagcggaaccactttacaaaccgcatataccgcaatactgacagatacatcgaatggacagacggaagaaccgcccaaatccagcattcggtcgatataaccgaaataattgacgcgaaagaacacgctgagcagagcagccgctttaaaagccagtttttatcgcatatgagccacgaagtgcgcacgcctatgaacgctattttaggcattaccgaaattcatttgcagaacgatactctttcgcctgatatacaggaagcattcggcagaatttacaattccggatatttgctgctcggcattataaacgacatactggatctgtccaaaatagaagcgggcaaactggaacttgtgccggtcaattacgatgtctcaagcctgatcaacgatgtcgttcaccttaacatcatacggtttgacaacaaaccaatttcttttgatcttcaggcggatgaaaaaattccgttaacgctgtccggcgatgaactgcgtattaaacaaattcttaataaccttctttccaacgcgttcaagtatacggactcaggcaaggtttcactgtcaattaccgttgaacacggctggaacgcggcatgggtaacgctcgtgttcagcgtgagcgatacaggtcagggcatgaccagtgagcagttggacaagctgttcgacgaatacacccgctttaatacggaagccaaccgcaaaaccccgggtactggtcttggcatgaacattacgaggcatctggtcgacctgatgggcggagaaatatccgtggaaagcgaggcgggcaagggttcgacttttaccgtgcgcttgccgcaagggattgtcgatgccaaggtattgggcagggaaacggcggaaagcctcatgcagttccgtgttgacaaagcggaacgaaataaaaaaggcccgcgaatagtacgcgagtatatgccctacggcagggttttgattgtggacgatgtgcaaactaatctgtatgtcgcaaggggacttttggccccatatggactgtcggttgaaaccgctacaagcggctttgaagcggttgataaaattaagagcggcgctaccttcgacatcatatttatggaccattatatgccgaaaatggacggtattgaagcgacgaaaataatacgcagtttgggttatacgcatcctatcgttgcgcttacggctaacgcgctggccgggcaggcggagatgttcatggaaaacgggttcgacgggtttatttccaagccgatagatatacggcaacttaatgcttcgctgaacaagctggtacgcgataggtacccgtccgaagttgtagaagcgtcgcggcagcaactgctaaagatcaatatggcgaagtctgttgccgaggtaaaacagtcggattccgattcggaactggcggcgattttcgcgcgggatgccgaaaaggcccttgcaaagttaaaatcgatacacgcatacgcataccgtagaaccgatgacatcaggttatatgttatcaatgttcacgcgatgaaaagcgctcttgcgatatcggcgaaacagacctttccgggtttgcgcggaaattggaggcggcgggaaaagagcggaatactacggtaa

SEQ ID NO: 69686 - protein, 967 aa, Unknown
  Obtained from environmental sample
  DOMAIN (164)...(245): Cache domain
  misc_feature (1)..(967): Xaa is any amino acid
MSAHNSFSKIKAWVKRSLYAQMLFVALAYALMVIASYIFVSDIERNNLRAKVKDVISYTEANIKADMLEPETALAAIAETIHAMIMSDEESETVQEYIRHINNYMQDNEKNRLVGVMGFYGFFDVFGKRYFTEKEEDWIPPEGYVLQERPWYRAAVEADGDIGITEPYNNIRTGDIPIITFSRCIFDENGERLGVICLDIKLDRIRQHAINTQFTKKGYGFLLSRDMELIAHPDPSLLGKRLRNVRSYIAAYENELEKNGYIYEIITTDYRGIKSIVFIERLYNGWYMGVVTPYDKYYQTTRNMALFLTALGTALALILIIILGRISAEIREVTKKQADAEAQANQSKQSLSILTNILNGIDAQIYAVVPHTGEILFINDFMKKHFNLEGDCTGKLCYKLFLRDQDKLCDYCPCYRLDKDPHGTVVWEERNHFTNRIYRNTDRYIEWTDGRTAQIQHSVDITEIIDAKEHAEQSSRFKSQFLSHMSHEVRTPMNAILGITEIHLQNDTLSPDIQEAFGRIYNSGYLLLGIINDILDLSKIEAGKLELVPVNYDVSSLINDVVHLNIIRFDNKPISFDLQADEKIPLTLSGDELRIKQILNNLLSNAFKYTDSGKVSLSITVEHGWNAAWVTLVFSVSDTGQGMTSEQLDKLFDEYTRFNTEANRKTPGTGLGMNITRHLVDLMGGEISVESEAGKGSTFTVRLPQGIVDAKVLGRETAESLMQFRVDKAERNKKGPRIVREYMPYGRVLIVDDVQTNLYVARGLLAPYGLSVETATSGFEAVDKIKSGATFDIIFMDHYMPKMDGIEATKIIRSLGYTHPIVALTANALAGQAEMFMENGFDGFISKPIDIRQLNASLNKLVRDRYPSEVVEASRQQLLKINMAKSVAEVKQSDSDSELAAIFARDAEKALAKLKSIHAYAYRRTDDIRLYVINVHAMKSALAISAKQTFPGLRGNWRRREKSGILR

SEQ ID NO: 69687 - DNA, 651 bp, Unknown
  Obtained from environmental sample
  misc_feature (1)..(651): n is a, c, g, or t
atgacagcacaaacagcggttatcggagcgggcgcatggggaacggcagtcgcgaaagttattgccgagaaagggaaagacgttattatctggagtcttgaagaagacaaccgggacgatattaatctgcgccgtgagaattcccgttatttgccgggcgttaagctgccggaaaacctaacggctacttcggacattaccgaagcggtttccgggcgggaataccttattttggcggttccctcgctgtatctgctgcaaacggtcaagcaaatccttatgacaccctcgattcgggagggagaaaccgccattgcggttattaccaaaggctttatatcaacggacaaaggcccccggcttattctggaaacactggaagattacctccccggtttttaccggcagtctttggtgtatatagccggtcccagccatgccgagggaatctcgcgggaaaattaccggccttatagccgccagcgaaaacgcgaagaattccatacgtttcagggatttattaaaaagcccggggctttttgtttattcttctttggatgtccgcggagttcaggcggcggcggcatcaaaaaacgtaatcgctatcgcgtttgggatgttagacgcaataaagtccattggcggctctga

SEQ ID NO: 69688 - protein, 216 aa, Unknown
  Obtained from environmental sample
  SIGNAL (1)...(18)
  DOMAIN (3)...(161): NAD-dependent glycerol-3-phosphate dehydrogenase N-terminus
  misc_feature (1)..(216): Xaa is any amino acid
MTAQTAVIGAGAWGTAVAKVIAEKGKDVIIWSLEEDNRDDINLRRENSRYLPGVKLPENLTATSDITEAVSGREYLILAVPSLYLLQTVKQILMTPSIREGETAIAVITKGFISTDKGPRLILETLEDYLPGFYRQSLVYIAGPSHAEGISRENYRPYSRQRKREEFHTFQGFIKKPGAFCLFFFGCPRSSGGGGIKKRNRYRVWDVRRNKVHWRL

SEQ ID NO: 69689 - DNA, 621 bp, Unknown
  Obtained from environmental sample
  misc_feature (1)..(621): n is a, c, g, or t
atgccgagggaatctcgcgggaaaattaccggccttatagccgccagcgaaaacgcgaagaattccatacgtttcagggatttattaaaaagcccggggctttttgtttattcttctttggatgtccgcggagttcaggcggcggcggcatcaaaaaacgtaatcgctatcgcgtttgggatgttagacgcaataaagtccattggcggctctgacatgttcggcgacggcacggactcccttctgcttgcggcgggcttaaacgaaatacaactgcttggaaaggcccttggtgcgactcatcccgaaacattcacttccattgcgggaataggcgatttggacgtaacctgccgctcaatttacggcaggaacaggcgctttggcagagaaataatcgaaaaaaatattctggaaccatataaagatttagacgatcttttggcgcgcataggggaaataagctatcttcccgaaggcgtagcggcggcaaaatacgtcagagtccttgcggataagcataaacttaaaatgcctgtttccataggattaagccgtatattaaaccgcgagcttgatccttatgaatttgtaaaggatttctttgaagacttgaggtaa

SEQ ID NO: 69690 - protein, 206 aa, Unknown
  Obtained from environmental sample
  DOMAIN (40)...(201): NAD-dependent glycerol-3-phosphate dehydrogenase C-terminus
  misc_feature (1)..(206): Xaa is any amino acid
MPRESRGKITGLIAASENAKNSIRFRDLLKSPGLFVYSSLDVRGVQAAAASKNVIAIAFGMLDAIKSIGGSDMFGDGTDSLLLAAGLNEIQLLGKALGATHPETFTSIAGIGDLDVTCRSIYGRNRRFGREIIEKNILEPYKDLDDLLARIGEISYLPEGVAAAKYVRVLADKHKLKMPVSIGLSRILNRELDPYEFVKDFFEDLR

SEQ ID NO: 69691 - DNA, 414 bp, Unknown
  Obtained from environmental sample
  misc_feature (1)..(414): n is a, c, g, or t
gtgtttgaaaaattatctgaaaaaataacagacgcgtttcgttttgttaccggcaaatcttcaatctcggaaaaaaatattgaagacgcggtagaagcgattaagatggctcttcttgaagcggatgtaaacctgcgcgttgttcgccgttttgtcaactccaccatagaggaagcaaaaggcgaaaaggtacttcgctcggttgatcccggccagcagtttgtaaaaatagtccatgacaaacttgtttcctttcttggagacgcggacccctcaagccgcgccttaaaattacgcggtcccgatgtaatctccacggttcctatgcttggtttgcaaggttcaggaaaaactacaagcgcggcgaaacttgcgctgcgtctgaaaaagaagggcgcaaaccaatgttggtag

SEQ ID NO: 69692 - protein, 137 aa, Unknown
  Obtained from environmental sample
  DOMAIN (1)...(87): SRP54-type protein, helical bundle domain
  misc_feature (1)..(137): Xaa is any amino acid
MFEKLSEKITDAFRFVTGKSSISEKNIEDAVEAIKMALLEADVNLRVVRRFVNSTIEEAKGEKVLRSVDPGQQFVKIVHDKLVSFLGDADPSSRALKLRGPDVISTVPMLGLQGSGKTTSAAKLALRLKKKGANQCW

SEQ ID NO: 69693 - DNA, 951 bp, Unknown
  Obtained from environmental sample
  misc_feature (1)..(951): n is a, c, g, or t
atgttggtagcctgcgatcttgttcgccccgcggcgatggaacagctcgccgtcctcggaaaccagattgggattcccgtccacaaagaagacggcgcaaaggacagcgtcaaggtgtatcaaaacgcccgctcctgggcaaaccaaaacatgattgacacaatgatcattgacaccacaggccgcctgcaaattgatgagccgatgatgcaggaactatcccgtcttaaagacgccgccaaacccgatgaaatgctgcttgtcgccgactcaatgacaggacaggccgccgccgacatcgccaaaacatttgatgaaaaaatcggtcttacaggcgttgttcttaccaagttcgattccgacactcgcggcggcgcggcgctctcgctgaaaaccgttacgggcaaaccgttaaaatttaccggcacaggcgaaaagcccgaagactttgagcccttccaccccgacagattggcgggacgaattctcggtatgggcgatgttgtcagccttgttgaaaaagcgcaggaagtaatcgatcaaaaggaagctcttgaactccagaaaaaaatggaaaaagagaactttactcttgaagactggctttctcagcttcgcgctgttaagaaaatgggatcgcttcaaaaaatgctggagatgattcccggaatgcagggacagatcagcgaggacgacattaacaaagaggaattgaaacatcaggaggcgattttaagctccatgacgcgcaaggagagagcgaaccatttgatcataggacctccgcgcagaagcagaatcgcgcgaggctccggcacgtctgtcgccgaagtagcgcgtctgcttaaaaagtttgagaaaatgcgcggcatgatgaaaaagaatggcaagggagcgagaaccggcgcaatgaaacgaatgatgggaggtttcccgggattttggcagtag

SEQ ID NO: 69694 - protein, 316 aa, Unknown
  Obtained from environmental sample
  DOMAIN (195)...(292): Signal peptide binding domain
  misc_feature (1)..(316): Xaa is any amino acid
MLVACDLVRPAAMEQLAVLGNQIGIPVHKEDGAKDSVKVYQNARSWANQNMIDTMIIDTTGRLQIDEPMMQELSRLKDAAKPDEMLLVADSMTGQAAADIAKTFDEKIGLTGVVLTKFDSDTRGGAALSLKTVTGKPLKFTGTGEKPEDFEPFHPDRLAGRILGMGDVVSLVEKAQEVIDQKEALELQKKMEKENFTLEDWLSQLRAVKKMGSLQKMLEMIPGMQGQISEDDINKEELKHQEAILSSMTRKERANHLIIGPPRRSRIARGSGTSVAEVARLLKKFEKMRGMMKKNGKGARTGAMKRMMGGFPGFWQ

SEQ ID NO: 69695 - DNA, 309 bp, Unknown
  Obtained from environmental sample
  misc_feature (1)..(309): n is a, c, g, or t
gtgccggtaaattttaacggtttgcccgtaacggttttcagcgagagcgccgcgccgccgcgagtgtcggaatcgaacttggtaagaacaacgcctgtaagaccgattttttcatcaaatgttttggcgatgtcggcggcggcctgtcctgtcattgagtcggcgacaagcagcatttcatcgggtttggcggcgtctttaagacgggatagttcctgcatcatcggctcatcaatttgcaggcggcctgtggtgtcaatgatcattgtgtcaatcatgttttggtttgcccaggagcgggcgttttga

SEQ ID NO: 69696 - protein, 102 aa, Unknown
  Obtained from environmental sample
  misc_feature (1)..(102): Xaa is any amino acid
MPVNFNGLPVTVFSESAAPPRVSESNLVRTTPVRPIFSSNVLAMSAAACPVIESATSSISSGLAASLRRDSSCIIGSSICRRPVVSMIIVSIMFWFAQERAF

SEQ ID NO: 69697 - DNA, 672 bp, Unknown
  Obtained from environmental sample
  misc_feature (1)..(672): n is a, c, g, or t
ttgacagccattgtactgcaggcgagaattgattctacaagactgccaggcaaaagcctgctcttacttgacggacagccgctcatattccgtgtaatggaagcgttaaaccaagtccccgccgatatcagaatactcgcctgtcccgaagattcgctttcttcattctttcctattgcaaaggaagctggttttcaaatactagcgggaccaaaagaggacgttcttgaacgttactgccttgccattcgcaaatattcaatagacagggtaatcagggctacaggcgacaacccgtttgtattcgccgacgccgccgcctcgctaaacgacgaagccgtctccctaaaagccgattacgccggctacacggagcttccctacggcgcgggcgttgaatccgtagccgcttccgcccttctacgcgcctcagaacaggcaaaactcccttacgaacgcgaacatgtctgcccgtatttatacaatcaccctgaactgtttacccttcaccgccccgccgctcccgcccgctggtattatcccgatatccgccttaccgtggacactcaggaagattttgaccgcgcaaaagaactttacggcgcgttaaaaaacgagccaaacaggcacaacggagagacaataataaaaaaatatgcgaaaatgttttaa

SEQ ID NO: 69698 - protein, 223 aa, Unknown
  Obtained from environmental sample
  DOMAIN (3)...(215): Cytidylyltransferase
  misc_feature (1)..(223): Xaa is any amino acid
MTAIVLQARIDSTRLPGKSLLLLDGQPLIFRVMEALNQVPADIRILACPEDSLSSFFPIAKEAGFQILAGPKEDVLERYCLAIRKYSIDRVIRATGDNPFVFADAAASLNDEAVSLKADYAGYTELPYGAGVESVAASALLRASEQAKLPYEREHVCPYLYNHPELFTLHRPAAPARWYYPDIRLTVDTQEDFDRAKELYGALKNEPNRHNGETIIKKYAKMF

SEQ ID NO: 69699 - DNA, 1032 bp, Unknown
  Obtained from environmental sample
  misc_feature (1)..(1032): n is a, c, g, or t
atggtctttgcgcggggtgcgatgaatactatacctacaatttttaacgaaacaatcattccctataccgctgtcggcggcaaagagcgtgttgcgttcacaggtatttccgccgttgttttaaaccgcgccggacagtatcaaaacagaacgtttttttctgagcttgaaaaaaccggttttgacaatatcatttccatagagtcctgcgctccccattacgacatcgaagacctttcagggcgtttcccatttgtacgtttcattctgcccgaaaaagaattgaatctgggagaacagataaaccttgccgcttccgatattacaagtccgcttttttatgttttctgcaacgatatgaaaatagtcgctggcggaacggcaaaacgaatggcggaacgtttaagtattgaacacgaagataaagatatttttgaaaacaaaggcggttttaaaagactttgtacagtcccaataatgatgaattcaaaatacgaagtattaccgactgttgtagttccaatgactcagcgcagaaaaatgactcccgcctttctggaaccgcagaacgaagacgaattaagcctgtacccctttgacggagccggtatctatgacagaaagcgttttattaacataggcggatttgacataacgttaagcaattcattttggcaattaatggattttggttttagggcaagcctttggggcgaggaaatagcgctcagccatcacttaaaactttcgtataacggagaattgccgacggagaactttaccatagacgaaaactacaggcgtttttacatgaaaaatcttgccccggtatttaaaaacgattacgcttatcttccgttttaccgtttttcttcttatctgtttaaatcatcagacgatcttttttcctcatgggaagaatttaaagaatgtaaaaaatgggtgttaaaaaacaaattcagatggaaatgcgacgcgcgagaagtaacaaaccgctgggattcatcatcggaaaaaacgaggcataattga

SEQ ID NO: 69700 - protein, 343 aa, Unknown
  Obtained from environmental sample
  misc_feature (1)..(343): Xaa is any amino acid
MVFARGAMNTIPTIFNETIIPYTAVGGKERVAFTGISAVVLNRAGQYQNRTFFSELEKTGFDNIISIESCAPHYDIEDLSGRFPFVRFILPEKELNLGEQINLAASDITSPLFYVFCNDMKIVAGGTAKRMAERLSIEHEDKDIFENKGGFKRLCTVPIMMNSKYEVLPTVVVPMTQRRKMTPAFLEPQNEDELSLYPFDGAGIYDRKRFINIGGFDITLSNSFWQLMDFGFRASLWGEEIALSHHLKLSYNGELPTENFTIDENYRRFYMKNLAPVFKNDYAYLPFYRFSSYLFKSSDDLFSSWEEFKECKKWVLKNKFRWKCDAREVTNRWDSSSEKTRHN

SEQ ID NO: 69701 - DNA, 639 bp, Unknown
  Obtained from environmental sample
  misc_feature (1)..(639): n is a, c, g, or t
ttggcattgattatcgaaacttcaggcatcggctggaaaaacgatgaagttgaaaaatgcgccgatttagtaaaaaacgcaggcgcaagaaagaacgttctgccgcccttatcgtggattgtctccatggatacttgcgatcctcaacgctacacggaactgcggggcgcaggttttgccgaagcggaaacttttgccaaaaaacttttttcgctgtttccaaacgacagttatgtacaggcggtgcgcgtaaaaggctctgaagacgatacggaaaaattttaccgttactggaaaacagcgagcccaaaaagcgaaaaaaacattattatccaaaagtacgatgatttttgcggcattctggagaaaaaacaggcttccgacatttcacccgttatccgacaatcctgctggcacattatgagagatttgcccgtcttgataaacggagacgtccctctgtgcagagaaaatctttctgtcttaaagggcgaaaaaaaggatatacttggaaatgtatttgcggactcacttgaaactatctggcaaaacggggataaatactacaaggaacaatgcatgaagaaatacaatggtctttgcgcggggtgcgatgaatactatacctacaatttttaa

SEQ ID NO: 69702 - protein, 212 aa, Unknown
  Obtained from environmental sample
  misc_feature (1)..(212): Xaa is any amino acid
MALIIETSGIGWKNDEVEKCADLVKNAGARKNVLPPLSWIVSMDTCDPQRYTELRGAGFAEAETFAKKLFSLFPNDSYVQAVRVKGSEDDTEKFYRYWKTASPKSEKNIIIQKYDDFCGILEKKQASDISPVIRQSCWHIMRDLPVLINGDVPLCRENLSVLKGEKKDILGNVFADSLETIWQNGDKYYKEQCMKKYNGLCAGCDEYYTYNF

SEQ ID NO: 69703 - DNA, 906 bp, Unknown
  Obtained from environmental sample
  misc_feature (1)..(906): n is a, c, g, or t
atgggaaccgtaaccgttaaatatgatgaaaatacaaccgcccccaccgatgtcggaacctacacagtaacctttgacgtaacagcgggtacaaattatacagcggtgagcggcttgagcgcgggaacgctgaccattaacgaggcaaccgtcaacatagccgccataacggacgtgacggctccggttgccggcaggcctgcggttgtcgccattaccgaaaacgcgcagtatacaggaaccgtcgcatggtctccgtctcctgtaggtgacagcaagacggtaaaaattgacatgtatgattctgctggagacggctgggacggcagcggcgcattgagaatcgttgtaaatggggttcagcttgccgccggtgtaaaagcaagcgggtcttccagtacctataccttcactgtcgcagggagcgatgttgtccaaatatattgggttgcggggacttatcaggaagaaaactcattcattgcgtattacgccgacacgccgccaagcccggcgtttaccgccagtaataataatagctggagcggagataacgcattgatctataaattacgcggcacaatgaacagcataagcggcggcacattgctgggttcatttaccgctgccgggacggcttttgcccctttcacccagtacaccgcgaccataacgctaacgcccaagaccgggtacaccctgcaaggggtgaaggctaacttctttacggttaatggggcaacggcaaccaacgccgctaattccggcgttattaccgcagtgtttccgaaaactggcggaaccggaaccgtaaccgatcctaccgtcatcagcatatctgccattgagggccttaccgccccggcaaccggcggaaccccggttacaactattaggaattgttga

SEQ ID NO: 69704 - protein, 301 aa, Unknown
  Obtained from environmental sample
  misc_feature (1)..(301): Xaa is any amino acid
MGTVTVKYDENTTAPTDVGTYTVTFDVTAGTNYTAVSGLSAGTLTINEATVNIAAITDVTAPVAGRPAVVAITENAQYTGTVAWSPSPVGDSKTVKIDMYDSAGDGWDGSGALRIVVNGVQLAAGVKASGSSSTYTFTVAGSDVVQIYWVAGTYQEENSFIAYYADTPPSPAFTASNNNSWSGDNALIYKLRGTMNSISGGTLLGSFTAAGTAFAPFTQYTATITLTPKTGYTLQGVKANFFTVNGATATNAANSGVITAVFPKTGGTGTVTDPTVISISAIEGLTAPATGGTPVTTIRNC

SEQ ID NO: 69705 - DNA, 2217 bp, Unknown
  Obtained from environmental sample
  misc_feature (1)..(2217): n is a, c, g, or t
ttgtttgatttttctcgccaatgcttcttcccttgctgttttcctttagcatgtatcttttgtctaagttgtcaggttatttatcaacaattccttaccgcaaacgcgcagtacagcgggacggtagcgtggaacggcaatccctctgtttttgccgcttcgacagcatacaccgcaaccattaccttaacggcaaaaaccggctacaccttgcagggggtagcggctaacttcttcactgtttccggggcaacggcaacaagtagcgccaattccggcgttattactgcagtattcccggcgactgccgcaacaggcatcacttctgtaagtatctccattatcgctccggttaaaggcgcagcgccaagtacaaccgcaaccgtagaagataatggaaattttaccattggctcggtatcgtggtcgccgaccgataatccgttcaaaggcgatgaggtatacaccgtcgatgttacactgacggcaaagagcggttacacttttaccggattgacttccgctagtatcaacgggcaaagcgcggaagtatcaaacaacacaggttcgacagttaaattgtctcacacatttccggcaacaaatacgaaaacagttacaagtatcgcaattaaatcacaaccgacaaaactgacctacacacatggcgatactcttgatttaacaggacttgcggtaacgctgacccacgatgatactacggcggaggatgttgtcgccgcagattttgtagataaaaacgtaaccgcgaatccgtcggctggtaatagtttgatttattcaacgcacaacagacagccggttaaaataacttatggcagtttgacgcgtaatacatccagtttgactgttaacaaagcaactcctacagtcgaagattttgagattagcggactaacgcaagagtatgacggcagtccaaagagagttacaataacgccaaaagaggaaaaatctgacggagtaataactgttaaatacaacaacagtacaaccgcaccagcggcagtaggcacatatactgtaacttttgacgtagcggcgacgacaaattttaatgccaaaagcggactttccgcaggaaccttgacgattataaatcaaacagttacgcttaacagtgtaattgcgaatggctcaacttcgcaaaccacgacgcagttgacgctgacttttgacaaggcgatcagcggtcttagagcaagtgacatcacaattaccggtgtatccattgtaattaaaggaaacctcagcggttccggaccgacatatactttggacgtcagtggtttcagtacgggaggaagctttagcgtagcggtgtataaatcaggctatactataaacggtacacccaaaatagtaacaatttataacttgattttaccgatagaaatggtctcgatacccggcgggacatttatgatgggtagtccaataagtgaaccgaacagggaaccatggagcgcatcatactacccaaaaaatgaaacacaacattcggttacgcttagtagttttaaaatgagtaaatatcaggtaacgcaagcgcaatatcaggatgtaatgggtgtcggttttgaggaggatattactataataaaatattatgggataggagataattatccaatttactttgttagttggtatggcgcgatagtattctgcaacaagttgagcataaaggaaggattaaatcccgtatacagtattagcggtaaaaccgatcctgcagcttgggggacagtaccaacaagcagtgacgctacatgggatgctgtagtaatcgttgccggttcaaatggctaccgattaccgaccgaggcggagtgggaatacgcgtgccgagccagaacaacatcagcgtataacaccggcgatacgattagcgacaatacagggtggtatgacagtaacagtggaagtaagacgcatgaggtaggaaagaaacccgcaaatgagtgggaactgtatgatatgcatgggaatgtgtgggaatggtgctgggatcggtatggtaattattcgagcaatgcgcaaaccgacccaatgggcgcgtcctcggggactaaccgcgtgttacgcggcgggtgctggggcgaatcggacagttatatgcgctccgcgtcccgggactacaacgaaccgaactgccagatcaacatcttcggtttccgtcttgtccgcccttag

SEQ ID NO: 69706 - protein, 738 aa, Unknown
  Obtained from environmental sample
  DOMAIN (469)...(737): Domain of unknown function (DUF323)
  misc_feature (1)..(738): Xaa is any amino acid
MFDFSRQCFFPCCFPLACIFCLSCQVIYQQFLTANAQYSGTVAWNGNPSVFAASTAYTATITLTAKTGYTLQGVAANFFTVSGATATSSANSGVITAVFPATAATGITSVSISIIAPVKGAAPSTTATVEDNGNFTIGSVSWSPTDNPFKGDEVYTVDVTLTAKSGYTFTGLTSASINGQSAEVSNNTGSTVKLSHTFPATNTKTVTSIAIKSQPTKLTYTHGDTLDLTGLAVTLTHDDTTAEDVVAADFVDKNVTANPSAGNSLIYSTHNRQPVKITYGSLTRNTSSLTVNKATPTVEDFEISGLTQEYDGSPKRVTITPKEEKSDGVITVKYNNSTTAPAAVGTYTVTFDVAATTNFNAKSGLSAGTLTIINQTVTLNSVIANGSTSQTTTQLTLTFDKAISGLRASDITITGVSIVIKGNLSGSGPTYTLDVSGFSTGGSFSVAVYKSGYTINGTPKIVTIYNLILPIEMVSIPGGTFMMGSPISEPNREPWSASYYPKNETQHSVTLSSFKMSKYQVTQAQYQDVMGVGFEEDITIIKYYGIGDNYPIYFVSWYGAIVFCNKLSIKEGLNPVYSISGKTDPAAWGTVPTSSDATWDAVVIVAGSNGYRLPTEAEWEYACRARTTSAYNTGDTISDNTGWYDSNSGSKTHEVGKKPANEWELYDMHGNVWEWCWDRYGNYSSNAQTDPMGASSGTNRVLRGGCWGESDSYMRSASRDYNEPNCQINIFGFRLVRP

SEQ ID NO: 69707 - DNA, 753 bp, Unknown
  Obtained from environmental sample
  misc_feature (1)..(753): n is a, c, g, or t
atgataaaaaataatcccgttatctgccatgagaccgaagatttcgcgattgtgttcaaaccgcccaggatgcatactgccccgattgggcaggacgccccgcttaggcgggacggtaaagaatatgaaacccttcttgactggtacgcgaaaatctttcccccaatcatggagctttccggcagaaaggaaaacgaaggcggccttctgcaccgccttgattttgaaacccagggcctcgtgcttttcgcaaagaaacaacagacgctggaaaatttgctggaacagcagaaacagggaaatttgattaaggagtacagcgcgatttgccaaaaatcagagccccagcccgacgctgttgaattttctgttgaccggggtcccccgctggtaattgaaagttatttccggccttacggccccggcagaaaagaagttcgtccggtgataaaaaaacatttaaaaggaaaagaaatcgccaaagacggggacgcttattacaaaacagaagttatcggcattgaaagaacggacaatcccgggcaggaagagtcatatcatttcaccgcaaggctaaagcgcggtttcaggcaccagatacgctgccacctcgcgtgggttggctacccagtgttaaacgatccgatttacggtaagggggaagtaaacggattccttgcgttacgggcaacagggctttttttcgacgatccaaaaaacaacgaaccgattcaatttcgcattgagcaatga

SEQ ID NO: 69708 - protein, 250 aa, Unknown
  Obtained from environmental sample
  DOMAIN (14)...(206): RNA pseudouridylate synthase
  misc_feature (1)..(250): Xaa is any amino acid
MIKNNPVICHETEDFAIVFKPPRMHTAPIGQDAPLRRDGKEYETLLDWYAKIFPPIMELSGRKENEGGLLHRLDFETQGLVLFAKKQQTLENLLEQQKQGNLIKEYSAICQKSEPQPDAVEFSVDRGPPLVIESYFRPYGPGRKEVRPVIKKHLKGKEIAKDGDAYYKTEVIGIERTDNPGQEESYHFTARLKRGFRHQIRCHLAWVGYPVLNDPIYGKGEVNGFLALRATGLFFDDPKNNEPIQFRIEQ

SEQ ID NO: 69709 - DNA, 801 bp, Unknown
  Obtained from environmental sample
  misc_feature (1)..(801): n is a, c, g, or t
atgcttgccaagcgcataattccctgtctggatgttgacgacggaagggtggtgaagggcgttaaatttaaaggcatcagggacgtgggcgatccggcggaacttgcccgccgctataacgacgaaggcgccgacgaacttactttccttgacataggcgcgtcttacaagagccgggcgacgctgcttgaagttgtcaataagatagcaaatgaggtttttatccccctctgcgtgggcggcggaatacgccgccttgacgatatgcgcgacgcgatgaacgcgggagcggataaggtgtcggtttgcacttccgccctgagccgcccggaactgttaagcgaaatggcaaacgcctacggcagccagtgcgtggtgttgtcgattgacgcgaagagggtaggggagggcctgaactggcacgccttttcccacggcggcagaacggacacgggaattgacgctattgagtgggcggttcgcgcggtcaagctgggcgcgggcgaaatacttctcaattccattgacgcggacggaaccggtggcggttacgatcttgaactgaccaggcgcatcctcaattccgtgccggttccggtaatcgcctcgggcggcgcgggaacccttgaacaaatagccgatgtcctgctcagtaccgccaacccggaggctggtacggactgcggcgaaactcccggcgccgacgccgcgcttatcgcgtcgctcctgcattttgacatgactacgatcggggagataaagaaaaccgccgaagcaaagggcgtttgtgttaggtggtga

SEQ ID NO: 69710 - protein, 266 aa, Unknown
  Obtained from environmental sample
  DOMAIN (5)...(249): Histidine biosynthesis protein
  misc_feature (1)..(266): Xaa is any amino acid
MLAKRIIPCLDVDDGRVVKGVKFKGIRDVGDPAELARRYNDEGADELTFLDIGASYKSRATLLEVVNKIANEVFIPLCVGGGIRRLDDMRDAMNAGADKVSVCTSALSRPELLSEMANAYGSQCVVLSIDAKRVGEGLNWHAFSHGGRTDTGIDAIEWAVRAVKLGAGEILLNSIDADGTGGGYDLELTRRILNSVPVPVIASGGAGTLEQIADVLLSTANPEAGTDCGETPGADAALIASLLHFDMTTIGEIKKTAEAKGVCVRW

SEQ ID NO: 69711 - DNA, 582 bp, Unknown
  Obtained from environmental sample
  misc_feature (1)..(582): n is a, c, g, or t
gtgataaatgccttacaacggctttctgccccggcgcggtttgtcgccgacgtggaagagcttgccctgggaacaagcccctttgacaggatcatattcccgggcgacggccatttcgcttcggcaatggcttctctggcgaaatccggttatgacaaggcgataagggaatggatacgggccgacaggccttttctgggaatatgcatcggtttgcagttgctctttgagtcatcagaggaagcccccccggttgacggcgttgaagtacggggactctccgtaatccccgggaccgtcaggcgtttccccgggcgtaaactcccccaaatcggctggaaccagacggaagcgcggcccaattcaaagctgttccggggtataaacgaaaaaagtttcttctattatatccattcatactacgccgctccggctgatgattcggtaagcgctgccgaagccgagtattatttgcgttattgctgcgcggtggagcgcggcgccctggcggcggtgcagttccatcccgagaaatcaggcgcggcggggctcgcgttattgaaaaactggatcaacgggtga

SEQ ID NO: 69712 - protein, 193 aa, Unknown
  Obtained from environmental sample
  DOMAIN (23)...(146): CobB/CobQ-like glutamine amidotransferase domain
  misc_feature (1)..(193): Xaa is any amino acid
MINALQRLSAPARFVADVEELALGTSPFDRIIFPGDGHFASAMASLAKSGYDKAIREWIRADRPFLGICIGLQLLFESSEEAPPVDGVEVRGLSVIPGTVRRFPGRKLPQIGWNQTEARPNSKLFRGINEKSFFYYIHSYYAAPADDSVSAAEAEYYLRYCCAVERGALAAVQFHPEKSGAAGLALLKNWING

SEQ ID NO: 69713 - DNA, 525 bp, Unknown
  Obtained from environmental sample
  misc_feature (1)..(525): n is a, c, g, or t
atgaacaaaagctttttagatctagccaaaagccggtattcagtacgaaagtacgagaataaaacagttgaagcggaaaaattaaacgctattttggaagcaggacgcattgcgcctacggcggctaatcaacagccttgtatattccttgttctaaataaagaggaagcaatcgaaaaactttacaaggcttgtaatccgcacggcgcgcctcttgccattgtcgtttgcgccgacaaaaaatccgtatggatacgccctttcgacaaggcaagcatggttgatatcgacagttcaatagcagcggatcacatgatgttgtgcgctcaggatttgggactatcttcctgttggattacctatttcgatccttctattgtccgtaaggaatttaagatccctgacaatcttatacctgtaaatatacttgctataggttatggagcggacgaaccgcagtctcctgatcgtcatgcgcaaacgcggaaaccgcttgatgctatagtcaagtattcaacattttaa

SEQ ID NO: 69714 - protein, 174 aa, Unknown
  Obtained from environmental sample
  DOMAIN (9)...(147): Nitroreductase family
  misc_feature (1)..(174): Xaa is any amino acid
MNKSFLDLAKSRYSVRKYENKTVEAEKLNAILEAGRIAPTAANQQPCIFLVLNKEEAIEKLYKACNPHGAPLAIVVCADKKSVWIRPFDKASMVDIDSSIAADHMMLCAQDLGLSSCWITYFDPSIVRKEFKIPDNLIPVNILAIGYGADEPQSPDRHAQTRKPLDAIVKYSTF

SEQ ID NO: 69715 - DNA, 873 bp, Unknown
  Obtained from environmental sample
  misc_feature (1)..(873): n is a, c, g, or t
ttgtataaaagagtatttattattattttgattttttttgcggctgttgttttcgcggatgaagtgaccgggatttcggggactgttgagtgggacactcttcagattaaatcgacggtttcgcttgatttggcgaaggcggggattaagcttccgtcgggaaggacgcagggggaattagcccttagttctggctaccttactttaatacagcctagcctcatggatttgcaggtggattcgtcatctacccttgccgaccttatcatcaggggggaattcggcgtcttggataccgaaaaactcgcgctcaaagcacagtccgtcccacccgcgctttcgccggatttaaaaaaaatatccgcttcctacactatgaaccttaccgacatcagcgccgcgctcttacgccataaccgcccttctcccgtaatgcggacgttaattcccgcttctaccgcccaatacacgggcattattgttatcgccgccgatgacctgcctttatacggaatgagaagcacaggcctggcggttccatgcctgttcccgaagatttgggacagtaacatgaatcttatttatgaacgcaacatgcttgaatcgcgtgaaaatctcatggttcattacgcgccattgcagagtatttttcaggataacccgtccggccttactcaggatataattgacgttgccggaaacaggccgcttcgtatttttgcccgcgccctgtacggaattaatcctaccgaccttataatcgacaacatcgacgccatgcagataatttcttccgacgacaaccgccgccttttagcggagggcagggtggtgtttgttttgaatgattctgtgctgaagaagaatttttag

SEQ ID NO: 69716 - protein, 290 aa, Unknown
  Obtained from environmental sample
  SIGNAL (1)...(19)
  misc_feature (1)..(290): Xaa is any amino acid
MYKRVFIIILIFFAAVVFADEVTGISGTVEWDTLQIKSTVSLDLAKAGIKLPSGRTQGELALSSGYLTLIQPSLMDLQVDSSSTLADLIIRGEFGVLDTEKLALKAQSVPPALSPDLKKISASYTMNLTDISAALLRHNRPSPVMRTLIPASTAQYTGIIVIAADDLPLYGMRSTGLAVPCLFPKIWDSNMNLIYERNMLESRENLMVHYAPLQSIFQDNPSGLTQDIIDVAGNRPLRIFARALYGINPTDLIIDNIDAMQIISSDDNRRLLAEGRVVFVLNDSVLKKNF

SEQ ID NO: 69717 - DNA, 1272 bp, Unknown
  Obtained from environmental sample
  misc_feature (1)..(1272): n is a, c, g, or t
gtggggagtagggagcggggagtagggagcgggagacacgcttcgttctttttaatcatcttttttgtttttgccggatttagctcgatttgggcgcaggttgatgatgaacggcctttgcggacagtgcggtcggattcgccgttctcagatccttctcagcggcactctacatattcccggcaggcttctaactctttgcttacgccggatgtttttgaacagccccagtttcttcggtttgtcaatcaatatacaagcacaagcggtattacttacatgaactccgttatggacagggcgagtttgtaccttccgtttattaaggaagaagtaaaaaagaggaacctgccgccggagatggcttacctgcctgtaatcgaatcgaattttatgattactgcaagaagcaaatccggcgcggttggcctttggcaatttatgctgaacagcatttctccctttgacataaaggtaaacgaatttatcgacgaaaggcgcgattttcagaaatcaacaagaggggcgcttcaaaaacttgaagacaattacaaagcattcggcaactgggaacttgccctcgctgcttacaactgcgggctgggcgcgatgaacaaggcggtaaaaaaaacaaaaattcaggattattgggaattaagccggcggaaagagttaaggaatgaaactattgattatgtgccgaaatttctcgcggcggcttatgttttgtccaatccgcgccgcttcggaattgactgctggcaggagacccatgaatggacatcaatcccccttaaaaggcaggtttcgattgacacgcttgcagacgaatccggcgcggacagggaattgctgaggagactgaacgccgaacttctttacgggataaccccctcggacaggaatttccggcttaaaatccccgcgtcccatcttgagcagataaacgcggttctggagagggaagaccttgctcttatccgctatcattaccatgtcgtgagccacggcgacactttatggtcaatgtccagacattacggcgcttcactcgacttgattgaacagcacaacccgggcatttcgaaccgttaccttaaaataggggagaccatcataattcccgcgtttaaggacatagctcccccggcccggcctgtgtcaaatgtccgatataacgcccaatatgtggtaaaaaaaggcgataccctctggttccttgccaaaatgtacggcgttgacccccaggattgggccccagccaatatatga

SEQ ID NO: 69718 - protein, 423 aa, Unknown
  Obtained from environmental sample
  DOMAIN (332)...(375): LysM domain
  misc_feature (1)..(423): Xaa is any amino acid
MGSRERGVGSGRHASFFLIIFFVFAGFSSIWAQVDDERPLRTVRSDSPFSDPSQRHSTYSRQASNSLLTPDVFEQPQFLRFVNQYTSTSGITYMNSVMDRASLYLPFIKEEVKKRNLPPEMAYLPVIESNFMITARSKSGAVGLWQFMLNSISPFDIKVNEFIDERRDFQKSTRGALQKLEDNYKAFGNWELALAAYNCGLGAMNKAVKKTKIQDYWELSRRKELRNETIDYVPKFLAAAYVLSNPRRFGIDCWQETHEWTSIPLKRQVSIDTLADESGADRELLRRLNAELLYGITPSDRNFRLKIPASHLEQINAVLEREDLALIRYHYHVVSHGDTLWSMSRHYGASLDLIEQHNPGISNRYLKIGETIIIPAFKDIAPPARPVSNVRYNAQYVVKKGDTLWFLAKMYGVDPQDWAPANI

SEQ ID NO: 69719 - DNA, 1134 bp, Unknown
  Obtained from environmental sample
  misc_feature (1)..(1134): n is a, c, g, or t
atgagatacaagacaatctatctgttatttatggtattttttctgttattntcctgcgaaatgacgcctaaaactatcttagcctccattttcgggaaaagctatgcttccggaggaagcaacgcttccgaaggaaactcagtttcaggcattgattcgtattacattaccggaacaagggaaaacagggaatatttaatggaacttgttaacctgctgaaacaggaagagccgggcagcgagggggaatttgccgttatcagggaaattgccgccggttttgtccggcaaaaggactataaccggcttatcccttttttaacggcaagaacgataaataaccccgctgatccctataacgcgtattatttaatgatgatcgcctatgcctacattcaactggattccctgcctatagcggctatgtacttcgatttaatcgttaataattatcccgatctttcaattaatgaggaatctattcaccttatatgcttaagacagctaattgaattgaaccgcaaccccgaacgccaggtttggtattatcatgagttaattacccgttttccggacaaaacagatcttggaaccgcttactttatgcttggacaggcctgcgagtatataggcgactggaacggcgcgattcaggcgtataccaattatttgccgtataccggcacctttatttacggtttcccgaacgccgatcaatacgcgaagcatcaggttgacttcagcaagtcccaaaaagactggacatttgaaagccttccggcgttaaggcacgccattgaaaccgcccttgatacagacaacccgtgggcgcttaaacgctgtcaggcaaaggtgaattttttcggccgttcctgggggcagacaaccgaggataccgacgacggcagaatggcggactttaacgtcgccgagtttatgtataacaaccgtatccgttacgcttccacgcttgacgcgtcctctaacgctaccgaggcgtatcttaggacaacaggatggtcaaggtatatggaaacatggtatctgtacttcagaaagattaattttccccaagacccggaaattcacggcagatgggaatgggcggggatatattacggggagaaattttag

SEQ ID NO: 69720 - protein, 377 aa, Unknown
  Obtained from environmental sample
  SIGNAL (1)...(18)
  misc_feature (1)..(377): Xaa is any amino acid
MRYKTIYLLFMVFFLLXSCEMTPKTILASIFGKSYASGGSNASEGNSVSGIDSYYITGTRENREYLMELVNLLKQEEPGSEGEFAVIREIAAGFVRQKDYNRLIPFLTARTINNPADPYNAYYLMMIAYAYIQLDSLPIAAMYFDLIVNNYPDLSINEESIHLICLRQLIELNRNPERQVWYYHELITRFPDKTDLGTAYFMLGQACEYIGDWNGAIQAYTNYLPYTGTFIYGFPNADQYAKHQVDFSKSQKDWTFESLPALRHAIETALDTDNPWALKRCQAKVNFFGRSWGQTTEDTDDGRMADFNVAEFMYNNRIRYASTLDASSNATEAYLRTTGWSRYMETWYLYFRKINFPQDPEIHGRWEWAGIYYGEKF

SEQ ID NO: 69721 - DNA, 795 bp, Unknown
  Obtained from environmental sample
  misc_feature (1)..(795): n is a, c, g, or t
gtgatcttgaaaatccggcagttgaaaatagttttattactatttgcgttgattttcttttcatgcaaatcaacgcctgatgataaaccaaaatcctcagaacagcccaaaagcgtcgaagggcgggctcccgccggaggactcgcggaagaaatacgcggcttggtggaaacaggcctgttatcttccatgactcaggcgcaggagtatatccgaagcagggaccttggcaatgttgagtttggcagaacgatgaacgggcttatcacgataatagtcaggcgggtttatcccgattcaaaattagcgcttgccaatcttgaccttccgcagacttccaattacaaccgcattatcagggaagcggaaaagggcgaatatgtccatcccggggaaaattcaaccgatttttttgaatatgtgcttccgttcttcgcgattaacaataatacaaaccgcgagcttcttgccgctgccttgaagaacctgacaaaagccggagagttaaggcagaattccgtactgcctccctatttttcaggatttatctatgaacaaatgaaccaatatcaggacgccgacgcgtcttataaaaaagcatattcaatcagcaatgaattctaccccgccctgataggaacagcgcgcattatggcgcttaacggtaaaaaagcggacgccgccgcccttttgtcggatctgataatcagatatccggacagcctgaatgtaaagcgccagcttgctattatctattatggcaacaaggattgtcacgcgccagccccgccataa

SEQ ID NO: 69722 - protein, 264 aa, Unknown
  Obtained from environmental sample
  SIGNAL (1)...(24)
  misc_feature (1)..(264): Xaa is any amino acid
MILKIRQLKIVLLLFALIFFSCKSTPDDKPKSSEQPKSVEGRAPAGGLAEEIRGLVETGLLSSMTQAQEYIRSRDLGNVEFGRTMNGLITIIVRRVYPDSKLALANLDLPQTSNYNRIIREAEKGEYVHPGENSTDFFEYVLPFFAINNNTNRELLAAALKNLTKAGELRQNSVLPPYFSGFIYEQMNQYQDADASYKKAYSISNEFYPALIGTARIMALNGKKADAAALLSDLIIRYPDSLNVKRQLAIIYYGNKDCHAPAPP

SEQ ID NO: 69723 - DNA, 843 bp, Unknown
  Obtained from environmental sample
  misc_feature (1)..(843): n is a, c, g, or t
gtgcagaggatgtgcgaggtactaagggtgtcccgtagcggttattacaagtgggcgtgcagaaagccctcgaaacgcgaggtggagcggtcggagatgaaagcgcaaattacgaagctgtttgcagagcacgaagggcgtatcggcagtcccaagatgcgccgcgagcttgcaaggcgcggcatttcggcgggaaagaaccgtgttgcgcgagttatgcgggattgcggtttccgcgccaaaacgcacaagcccttccgcgttgcgacaaccgactcgaaccacacgctgccgacagcggcgaatcgtctgaaccgtgagttcacggttgatgagccgaacaaaacgctcgtgggcgacatcacgtatgtcaagacgtccgccggttgggtatatttggcggtgtttatagacctattttcgcgcatggtggtagggtgggacataagcggcgacctaggcgccgggatggttctgaacgcgctgaaccgcgcggtaaagagccgcggcttgcaatcaggtgcgatgattcataccgatcagggcatacaatacgccagcgacgcgttccgggaagcgttacggaggcacggtttcgtccaaagcatgtcccgcaggggtaactgctgggacaacgctgtcgcggaatcattcttccgcatttataagacggaactggcgtatcaccgtaaattcaaggacttagcagatgtttggcataaaagttttgagtatatcgagtgttactataaccggaaaagaatccatggaagtctaaattacttgactccggttgagttcgaaaaccagttttataagaaggacgtcaagagagtggggtaa

SEQ ID NO: 69724 - protein, 280 aa, Unknown
  Obtained from environmental sample
  DOMAIN (109)...(269): Integrase core domain
  misc_feature (1)..(280): Xaa is any amino acid
MQRMCEVLRVSRSGYYKWACRKPSKREVERSEMKAQITKLFAEHEGRIGSPKMRRELARRGISAGKNRVARVMRDCGFRAKTHKPFRVATTDSNHTLPTAANRLNREFTVDEPNKTLVGDITYVKTSAGWVYLAVFIDLFSRMVVGWDISGDLGAGMVLNALNRAVKSRGLQSGAMIHTDQGIQYASDAFREALRRHGFVQSMSRRGNCWDNAVAESFFRIYKTELAYHRKFKDLADVWHKSFEYIECYYNRKRIHGSLNYLTPVEFENQFYKKDVKRVG

SEQ ID NO: 69725 - DNA, 306 bp, Unknown
  Obtained from environmental sample
  misc_feature (1)..(306): n is a, c, g, or t
atgtttaagaagcgttattatgatcctgagtttaagcgggaggccgttcgtttagtattaaaagaagggcgccgagttagcgaagtagagaggtcgttgggtataaccgtcggagtgcttaagaactgggtgaagaggcatcagaagcatgctagcgtgccgccgggcattcatgaggcggcggttgacgctaaacgtacccgtgagcttgagaggcagttggcgcgagtgaccgaggagcgtgacatcctaaaaaaagccgtagccgtcttctcatcggacccgtatcggtattcgggttcatag

SEQ ID NO: 69726 - protein, 101 aa, Unknown
  Obtained from environmental sample
  DOMAIN (4)...(84): Transposase
  misc_feature (1)..(101): Xaa is any amino acid
MFKKRYYDPEFKREAVRLVLKEGRRVSEVERSLGITVGVLKNWVKRHQKHASVPPGIHEAAVDAKRTRELERQLARVTEERDILKKAVAVFSSDPYRYSGS

SEQ ID NO: 69727 - DNA, 696 bp, Unknown
  Obtained from environmental sample
  misc_feature (1)..(696): n is a, c, g, or t
gtgtgtccactttttcggggaaacccaagacggatagatgaactttataccgaagacccaacttacggcgcccggcggatatgcgccgtattgcgcaatatgggcgttaaaatcggtcaatataaggtacggcggttgatggagaagatgggcctggaggccatttatcgcaagcccaagctgtcggaaccgcatcccagccacaaggtttatccctacttgttgcgcggagtgaagatcacaagggtcaatcaggtctggagtacggacatcacatacatccggctgcgtcgcggctttgtgtatctgacggcggtcgtcgactggtacagccgttgcgtgctgtcgtggcgtctctcgaccaaccttgacacaagcttttgcgttgatgcgcttgaggaggctattgagcgttacggcacccctgacgtcttcaacaccgatcatggggctcagttcactagtacggcctttacgtccgtcttgaacaaacacggcgtaaaaatcagcatggacggcaaaggcagagcgttggacaacgtcttcgtggagcggctttggagaaccgttaaacacgaagaggtttatctgaaggagtacgagggtgtcgcggaatgccgtgccggaatggcggcgttcttcgaccggtacaacacccggcggcccacatcagtcattggggtaccggtatcctaa

SEQ ID NO: 69728 - protein, 231 aa, Unknown
  Obtained from environmental sample
  DOMAIN (79)...(226): Integrase core domain
  misc_feature (1)..(231): Xaa is any amino acid
MCPLFRGNPRRIDELYTEDPTYGARRICAVLRNMGVKIGQYKVRRLMEKMGLEAIYRKPKLSEPHPSHKVYPYLLRGVKITRVNQVWSTDITYIRLRRGFVYLTAVVDWYSRCVLSWRLSTNLDTSFCVDALEEAIERYGTPDVFNTDHGAQFTSTAFTSVLNKHGVKISMDGKGRALDNVFVERLWRTVKHEEVYLKEYEGVAECRAGMAAFFDRYNTRRPTSVIGVPVS

SEQ ID NO: 69729 - DNA, 738 bp, Unknown
  Obtained from environmental sample
  misc_feature (1)..(738): n is a, c, g, or t
gtgaataactatactgcggcgatatgcgttttttcattgctgacgatagccggctgcacgccctccgtgcgttacgccagcgatcggtcggtcggtctgtcgaataatcagccctccggtcggcagacggaattagcggacgacggcgcggacagtttgcagtcagggtgggaaccggtcggcggcgacgcggagcggcatcagtcgggttggctggccgctacgctcagcgaggccgatcaggggcaatcttttcgtaagaataaacagaataagcagaacagacaggataagcaagataaacagaatacgcagggcaagcaggacaagcaagataaacaggacaagcaggataacgcgaagggcgacgttccgaaacgtttggagcaggtggtcagttcgtacctcggcgttccgtacaagtacggcggcaccacgcggagcggtttcgactgttccggctttgtctccgccgtctatcgcgacgcctacggcatacagcttaagcgcacctccggcgcgatgtggaaggacggcgtccccgtgtcgcttatcgcggcgcgtccgggcgatctggtcttcttcaagggcggcgcgttcggcaatatagaccacgtgggcatatacatgggcaaaacacgcttcgtccacgcgtcgagcaagttaggggtggtgtacgcaaacctcaaagacacctactacgccaggcgtttcgcgggattcaggagaatggattag

SEQ ID NO: 69730 - protein, 245 aa, Unknown
  Obtained from environmental sample
  SIGNAL (1)...(26)
  DOMAIN (137)...(243): NlpC/P60 family
  misc_feature (1)..(245): Xaa is any amino acid
MNNYTAAICVFSLLTIAGCTPSVRYASDRSVGLSNNQPSGRQTELADDGADSLQSGWEPVGGDAERHQSGWLAATLSEADQGQSFRKNKQNKQNRQDKQDKQNTQGKQDKQDKQDKQDNAKGDVPKRLEQVVSSYLGVPYKYGGTTRSGFDCSGFVSAVYRDAYGIQLKRTSGAMWKDGVPVSLIAARPGDLVFFKGGAFGNIDHVGIYMGKTRFVHASSKLGVVYANLKDTYYARRFAGFRRMD

SEQ ID NO: 69731 - DNA, 2091 bp, Unknown
  Obtained from environmental sample
  misc_feature (1)..(2091): n is a, c, g, or t
ttgccggaaataagtccttttttggaaacaggcgttgtggcgaatagcgattgggagaccgaactgcctccatcagagacgcggcttgcgatcaaaaaatacttcgattattattccgccgtagtcgcggcccgcattccggggaggtatggcgatgcatatacgccgttagttgaaaatttcaagattctcaaggggaaagacggtgacggcctttattacgagctggaggccatcgccaattacgcgtttaacttcggtctttgcgcgggaatcttcgaacttataaaaaaatttcaggatgagtttaacgcgaaaaaaagggaaaccggctttttaagcttcaacgacatagcccgccttgctgttgacgccctgaaggatcatcccgacattcggaaggcttataaggattctcttcgcatgattatgatcgacgaatttcaggacaacaactcgcttcagcgcgacctgatctatcttctcgcggaaaatcccggcagaaccgaaaagggcatagcccgggcggaagagctggagaataaccgtatgttttttgtgggcgacgagaagcagtcgatctaccgcttccggggcgctgaggtggctgtttttagaagtctcaagtcggctatgggcctacggaccgaaagtattgagctggttcacaattaccgttcacaacccaaccttatttcggcgtttaattatattttccgcgatgtttttctacagccgggccttggcgtgccggattatgaagcggcgtacagctccatgagaccacgcgaatccgcgaatgaaagcgataatagccccttggcgcatttttgttttttgaacggagaggcgttacccaaagacgacacgtcgggcttgaaatcgcaggatttggaagcggtttttatcgccgccaggatcagggacatggtgcggaacgaggaagaaattccaagacgtgacggaacgaaaaccgggtgggtgaaatgtacatggagtgatttcgcggttttggaacgttcctatacccatcaaggcacgctggaaaaacattttcgggaatttggaattccctatagaacggatcgtcctaccggactttttaacgacgcgcccgttctggataccagagcttttctaaggcttctggtttaccccgaagatcgtattgcttacgcggcacttatccgttccccctttatgcgtttaagcgatctcagcctcgcggtgtgtatgcttgctattaacgctaacgcaaaaacgcccggcaaaagccctgagccgtttgcggaggaaaacgaagcgctcatccccgaagacgagctcgtcctttaccgccgcgcaaggacatgctatcaatcgctgcgcgaggcaagccgtacgcttccggttaccgagctccttacaaaactctggtttgaggaaggttaccgctgcgaaaccctctggacagaatccgcccaggtatatgagagcctcttcgatctttttttcagccttgccgccgaatgtgacgcgaagggcaagagcctcgcggactttatcgagtacctggaagacgtgatgaaccgcgaagaaaaacccgacgacagggacatacccggtgagggggagggcggggtgaggatcatgtccatccataagagcaagggcctggaattccccgtggtgttcatctacgactgcagccacgccggaatcaaaaagcgctcaacggaattaatcagttaccatgaacaatacggcttaatcctcggcataccccaggcggaagagctgcctttggggggaaattattttcgcaggatcatggaagaggaggaaaaagcaaaagacattgcggagctaaggcgcctcctttacgttgccatgaccagggcggaatgcaaggtcttccttacctttaccctgccaaaacagacagccaaggaaaagaaagaatgggacatgacagcggaggaattcaccaatgacttgatacgccgccgcttttcccagttcgacgaaaaatcggaaggcaaacgggatacaaatattaaccctcctggcaggcgttcttcacgacagtccacaaaacaatctgctctatga

SEQ ID NO: 69732 - protein, 696 aa, Unknown
  Obtained from environmental sample
  DOMAIN (2)...(477): UvrD/REP helicase
  misc_feature (1)..(696): Xaa is any amino acid
MPEISPFLETGVVANSDWETELPPSETRLAIKKYFDYYSAVVAARIPGRYGDAYTPLVENFKILKGKDGDGLYYELEAIANYAFNFGLCAGIFELIKKFQDEFNAKKRETGFLSFNDIARLAVDALKDHPDIRKAYKDSLRMIMIDEFQDNNSLQRDLIYLLAENPGRTEKGIARAEELENNRMFFVGDEKQSIYRFRGAEVAVFRSLKSAMGLRTESIELVHNYRSQPNLISAFNYIFRDVFLQPGLGVPDYEAAYSSMRPRESANESDNSPLAHFCFLNGEALPKDDTSGLKSQDLEAVFIAARIRDMVRNEEEIPRRDGTKTGWVKCTWSDFAVLERSYTHQGTLEKHFREFGIPYRTDRPTGLFNDAPVLDTRAFLRLLVYPEDRIAYAALIRSPFMRLSDLSLAVCMLAINANAKTPGKSPEPFAEENEALIPEDELVLYRRARTCYQSLREASRTLPVTELLTKLWFEEGYRCETLWTESAQVYESLFDLFFSLAAECDAKGKSLADFIEYLEDVMNREEKPDDRDIPGEGEGGVRIMSIHKSKGLEFPVVFIYDCSHAGIKKRSTELISYHEQYGLILGIPQAEELPLGGNYFRRIMEEEEKAKDIAELRRLLYVAMTRAECKVFLTFTLPKQTAKEKKEWDMTAEEFTNDLIRRRFSQFDEKSEGKRDTNINPPGRRSSRQSTKQSAL

SEQ ID NO: 69733 - DNA, 669 bp, Unknown
  Obtained from environmental sample
  misc_feature (1)..(669): n is a, c, g, or t
ttgacttcaccccgaaatcaatacggatcagggactgtctgggctgcgtgtacaagaccgtatgcagaacggtgtattgggagggttcgattgtcagttgaagacttgctaagcggcttggatgatgaacagataaaagccgtcaccctggaaaccaacggtgttgtagctgccggagccggctcgggcaaaaccaaagttctggcaagccgctacgcgtggcttgttatggaaaaaaagctcaagccggaggaaatcctaaccctcacctttaccaacaaagcggtgagcgaaatgtacagccgcatttaccgctatttgctggagcaggatgacgcggaggccgccggagcgctgaaaaattttcacaaggcaaggatcagtaccctggactccttctccgcgaatgttgccagagcggcggcggcccgttacggcatcagtcccgatttctcaagcgacgacacggcactccgcgaccttgcgcgggaagcggccctgcgttttgtgctcgatcaccgggaaacgcccgccatacgccagctccttgtggataacaaaattaaaaccctggcggaagatattttcgctaaagtagttcttaattacagccccatctcaagccctttggacttgataaagatctttccgcccaaaaagaagaaataa

SEQ ID NO: 69734 - protein, 222 aa, Unknown
  Obtained from environmental sample
  misc_feature (1)..(222): Xaa is any amino acid
MTSPRNQYGSGTVWAACTRPYAERCIGRVRLSVEDLLSGLDDEQIKAVTLETNGVVAAGAGSGKTKVLASRYAWLVMEKKLKPEEILTLTFTNKAVSEMYSRIYRYLLEQDDAEAAGALKNFHKARISTLDSFSANVARAAAARYGISPDFSSDDTALRDLAREAALRFVLDHRETPAIRQLLVDNKIKTLAEDIFAKVVLNYSPISSPLDLIKIFPPKKKK

SEQ ID NO: 69735 - DNA, 1959 bp, Unknown
  Obtained from environmental sample
  misc_feature (1)..(1959): n is a, c, g, or t
ttgcttttgcctccgcaatttacccgcatattggcagagaatttggatcatgcgaaatcaggcgctcataacttgctttactacaagtccgcaaaggcggagattcgggacgctgtcatggagctccgcaggctacacgaggaagaaggggttccctacgaagatatggcggtaagcgtgccggaacttgaaaaaatggaagccgacttgttgaaggaattttttctaaggcaggttccggttacgcgcagggcggggaaaaaacttggagagacaggcgcgggcaggcttttcgttcttgtcagcgagtgcgccgcttccggcttttcttttgaaagcctcaaggcccttatcctgaacgatcacattccctggaaggaacgtgaaaaaaacaaggccctgatcagcttcggcataaagtacaactgcgttttaagttacgtccaggacggaattaccgttgacatctgggaagaagcttttaaaaaagcctatggcgacggcggcagggaattgcaggattattaccggcaattgaaaaaaagcgttgaccatcttgcgggatcgcccacattttctgatatacgaaaatactattttgcctttcgcggtagcctcctggatatggaaaaaattgccgctgaggacgatgccgtattgagtcgctgtattgccgaacttggctctcttgtcgaactggaagaaaagtttaaagatccagcccttgttccttcttcgccttttggttttatcctttcgtacttgagcgggaaggagtatgtaagggcagggcagaaaagcggggtaaatattttcaggtggcgggtagcggcggcatctccttttgcctgccactttgtgcttaacgcgtcccagagcgccgcgtcggtgctttaccggccgttaaagtttttgcgccaggacaaacggaaagccctgggccttgaggacgccgacgcgtcgggcgctttttttcttctatgtgatacggggcgcgataccgtaggggccaaggactttaaaactaacgccagaataagcgcttcggagcaaaccttttcaggctgggcgataccccacagtttttttgtccagggcaaaaccgtggaaccgcctgcaagctctggcgacccttacgccgaagagcgccgcttttggagagaagggacggcgcttggggaaatttttcccctgcaaaaaagctcctacgaacgctggaaggacacgttagttcaacagggaagtaatttctcgtttttcgcttcccccgtttctgtgtcaagcgcaggacgtatacgggagcttcttgaaagcgccatacgaggcggcgacggctgtcttaccgttacgcccaccagagacctcaatgtgtattacaactgctcgctgttctggctctacgacagggttttcggggcggaggagttttcccttgaggcggcgcttcttgacgatacgtccctgggtattctttatcacaaaattctggaaggaattttcgcaaagattaagaatgaggatcgcgtattttattccacccgcgtggatgtctataaaaattggactttagagattacaagagaggccattaaggaacatccggcgtttagggggcccctggcaatccccctggtttctcctcaggcggccgggatgtcaaaaaagatagagcgtcttttggagcttgaagccgataacttcaacggctacgaggttttcgaattggagctccctgtcagttttagagcaggcgatctgtgtatcaagggaatcatcgaccgtatttcggtttcgcctgacggtgctcccgtcattatcgattacaagacgaattatcttcccgaacaaacggcggctgaagacctgcctttagttcccctctcggaatttcagatgccgctttacataaaactttacgaggagatggcaaacacaagcgaaaaaatttccggcaagtga

SEQ ID NO: 69736 - protein, 652 aa, Unknown
  Obtained from environmental sample
  misc_feature (1)..(652): Xaa is any amino acid
MLLPPQFTRILAENLDHAKSGAHNLLYYKSAKAEIRDAVMELRRLHEEEGVPYEDMAVSVPELEKMEADLLKEFFLRQVPVTRRAGKKLGETGAGRLFVLVSECAASGFSFESLKALILNDHIPWKEREKNKALISFGIKYNCVLSYVQDGITVDIWEEAFKKAYGDGGRELQDYYRQLKKSVDHLAGSPTFSDIRKYYFAFRGSLLDMEKIAAEDDAVLSRCIAELGSLVELEEKFKDPALVPSSPFGFILSYLSGKEYVRAGQKSGVNIFRWRVAAASPFACHFVLNASQSAASVLYRPLKFLRQDKRKALGLEDADASGAFFLLCDTGRDTVGAKDFKTNARISASEQTFSGWAIPHSFFVQGKTVEPPASSGDPYAEERRFWREGTALGEIFPLQKSSYERWKDTLVQQGSNFSFFASPVSVSSAGRIRELLESAIRGGDGCLTVTPTRDLNVYYNCSLFWLYDRVFGAEEFSLEAALLDDTSLGILYHKILEGIFAKIKNEDRVFYSTRVDVYKNWTLEITREAIKEHPAFRGPLAIPLVSPQAAGMSKKIERLLELEADNFNGYEVFELELPVSFRAGDLCIKGIIDRISVSPDGAPVIIDYKTNYLPEQTAAEDLPLVPLSEFQMPLYIKLYEEMANTSEKISGK

SEQ ID NO: 69737 - DNA, 348 bp, Unknown
  Obtained from environmental sample
  misc_feature (1)..(348): n is a, c, g, or t
atgacggggcagctctccggatttttatccggattatttatagatttcctgtcaatggctccgcttggtatgagttctcttatccgcacgttgattggcgcgttggttggtctttttaaagattctttattccttggctatgtaattatgcctattattctttgcacagttgcgactctcttaaaaatattgatgatgtttgcgcttcatttagttataaaagagattccggttacttcattaaacgatttgcgtctttggatagagttaggtcttaacgcgttatgcgcgccgttattatttttattattaagaaattttaaacctatgcttataggacggggttag

SEQ ID NO: 69738 - protein, 115 aa, Unknown
  Obtained from environmental sample
  misc_feature (1)..(115): Xaa is any amino acid
MTGQLSGFLSGLFIDFLSMAPLGMSSLIRTLIGALVGLFKDSLFLGYVIMPIILCTVATLLKILMMFALHLVIKEIPVTSLNDLRLWIELGLNALCAPLLFLLLRNFKPMLIGRG

SEQ ID NO: 69739 - DNA, 1842 bp, Unknown
  Obtained from environmental sample
  misc_feature (1)..(1842): n is a, c, g, or t
atgcacgagaacgatttaacgcggataaatgtattcagaatcctgcttattatcattttttgcgtttattcggcaaggcttttcagtatgcagatactttcaggagatatttaccgctctagggcgcaggatatttcaagaagaacatattcaataccgacgcaaagaggggaaatttacgaccgaaattatgacaaacctcttgttgtgaataaagatactttcgctgtcagtattactccggcggaagtcccacgcggaagtatggacgaaattataaattcaatttcaagtattctgaacattaaggttgaagatataaaatcaagactgccaaaccagtaccttcaactgtatcaacctgtagaaatagcgtctaacgttcctttttccgcgattgcggcgatagcggaaagaaaaaacacgctgccccgcatttcatggaatattaaatcggtaaggaattatgaaaatgtcggaagtctttcacacatactcggttatgtaggcgatattacccgcgatgagcttacgtctctttacaaccaggggtatcaacagggagacttaataggaaaatcgggaatagaaaagcaatatgattcgctgttaaggggcaaacccggttgggaaacaagaacagtcgattccagaggaagacggataacaggggatgaaaatatcacccgcgttccgcccgatataggaaaaaatcttgttttaacgatagattcttctttgcagactcttgtggagaaagcgataggaaatcaaatcggggcggctgttgttatgaaaccgtcaacaggagaaatcctcgcaatggtttcttatccctggtatgatcccaatatttttacagacaggaataattctgattatatggcgttagttgacgatccggcaaaaccttttattaaccgcgcgattcaatcaaattatccccccgcatcaacatttaaaataattttgtccactgcaatagtatctgaaaatcttttttctcccgatcaaactataatttgccgcggagtaatgagatacggcaaccgcgactggcattgccatcttcgttccggtcatggaagaatgaatttaacaaccgcgttaaatcaatcatgtaacatttattatatgacggtaggaagagattatgtaggcgctgaaagaatcgtatcctacgcaaaagaatacggttacggtgaagctacgggcattgatattccgggagaaatcgccggttttataccgacgccgcaatggaaagaacgccgttaccatgaaaaatgggtgttaggtgatacaatgaatatgtcaatcggacagggttatactcttgttactccgctgcaaatgactaatttagtaagcatgattgtgaataacggaaaaaattataaacctcatattttgaaagaggtgcgcgatcctgttacaaacgctatagaaaaagccgcggttcccgaagtaattcatgaaagcagtgtcagcaccgcggtttatgatgcggtgcgccgcgatatgaggtacgttgtaagtcagggaaccgcgcaatatccgctgaatataaaaacagtgcagattgccggaaaatcgggaacggcggaaatggggcttgtggatagatggcattcatggtttacggcgtttgctccttacaacagtacaaatcccaatgagcaaatagttgttacggttattattgaggcttccacttatcaagtttggatggcttcagccgtaagcgctattatttttcaggggtattttggaaaacaaaattttgaagatgcggtacgctctctgggattccagtatatggtgacggcgaggggacaatag

SEQ ID NO: 69740 - protein, 613 aa, Unknown
  Obtained from environmental sample
  DOMAIN (51)...(226): Penicillin-binding Protein dimerisation domain
  misc_feature (1)..(613): Xaa is any amino acid
MHENDLTRINVFRILLIIIFCVYSARLFSMQILSGDIYRSRAQDISRRTYSIPTQRGEIYDRNYDKPLVVNKDTFAVSITPAEVPRGSMDEIINSISSILNIKVEDIKSRLPNQYLQLYQPVEIASNVPFSAIAAIAERKNTLPRISWNIKSVRNYENVGSLSHILGYVGDITRDELTSLYNQGYQQGDLIGKSGIEKQYDSLLRGKPGWETRTVDSRGRRITGDENITRVPPDIGKNLVLTIDSSLQTLVEKAIGNQIGAAVVMKPSTGEILAMVSYPWYDPNIFTDRNNSDYMALVDDPAKPFINRAIQSNYPPASTFKIILSTAIVSENLFSPDQTIICRGVMRYGNRDWHCHLRSGHGRMNLTTALNQSCNIYYMTVGRDYVGAERIVSYAKEYGYGEATGIDIPGEIAGFIPTPQWKERRYHEKWVLGDTMNMSIGQGYTLVTPLQMTNLVSMIVNNGKNYKPHILKEVRDPVTNAIEKAAVPEVIHESSVSTAVYDAVRRDMRYVVSQGTAQYPLNIKTVQIAGKSGTAEMGLVDRWHSWFTAFAPYNSTNPNEQIVVTVIIEASTYQVWMASAVSAIIFQGYFGKQNFEDAVRSLGFQYMVTARGQ

SEQ ID NO: 69741 - DNA, 1131 bp, Unknown
  Obtained from environmental sample
  misc_feature (1)..(1131): n is a, c, g, or t
atgtcattgataaattatcgtcgtgtttataatttatctctttatattcttttagtttctattttggctcttatttatacattactttttggtcatgaaatttacagttcatctcgttggattaagataggtcctttcagcttacaaccgtctgaatttgtaaaaatttcagtaattattatgcttgcgcgttttctagcggacacggatcgcaacaaagaattattttcgcgttttgttatttcctgcataattgcttttattccaatgggcatagttctgcttcaacccgatcttggaacggctttagtatatataatgatactcttgataatgatatttatggcgggagtgccgatgcgttatatcgcgtttatgatatcgtgtatagcgttaacgggagttttattggttttaccattatggcaatcatatatactacgtaagtcaatagcttttattaccgcgttaacaagaataaatgttattgttcttataattttattttttgggtttatttcagccattgctctttttggatatgttaaattcaagaaaagatattttttctggattgtttttgtttcggctattgtcgtgttttctcttgtcgcatcttacggcggacgcaaagtgttaaaaaattatcagctaatgcgccttattgtttttcttgatcctaatgttgaccctcgcggcgcaggctggaatataatccagtctgttacggcaattggttccggcggagtaataggcagaggctttatgcaaggtacgcaaagtcattaccgcttccttcccgaacaaagcacggattttattttttcaatattctcggaagaagcgggtttcttgggaggattatttgtttttgcgctttttatgtttatttgtttcaggctgttatcaacaatgaagaccgttattgatccattcgcaaaatatttctgcgggggtcttgcgggaatgatattttttcactttattattaacgtaggaatgacaatgggaatcatgccgattacgggtttaccgcttttatttatgtcctacggaggttcttccattatggcgtctatgattggtattggcattgttttaagtatttatataagaaggtttaaccgttaa

SEQ ID NO: 69742 - protein, 376 aa, Unknown
  Obtained from environmental sample
  DOMAIN (1)...(375): Cell cycle protein
  misc_feature (1)..(376): Xaa is any amino acid
MSLINYRRVYNLSLYILLVSILALIYTLLFGHEIYSSSRWIKIGPFSLQPSEFVKISVIIMLARFLADTDRNKELFSRFVISCIIAFIPMGIVLLQPDLGTALVYIMILLIMIFMAGVPMRYIAFMISCIALTGVLLVLPLWQSYILRKSIAFITALTRINVIVLIILFFGFISAIALFGYVKFKKRYFFWIVFVSAIVVFSLVASYGGRKVLKNYQLMRLIVFLDPNVDPRGAGWNIIQSVTAIGSGGVIGRGFMQGTQSHYRFLPEQSTDFIFSIFSEEAGFLGGLFVFALFMFICFRLLSTMKTVIDPFAKYFCGGLAGMIFFHFIINVGMTMGIMPITGLPLLFMSYGGSSIMASMIGIGIVLSIYIRRFNR

SEQ ID NO: 69743 - DNA, 1638 bp, Unknown
  Obtained from environmental sample
  misc_feature (1)..(1638): n is a, c, g, or t
atgccttccataaggtatgtagacccggtaaaagaattaagcaatcttcttttagatgcggaaaaaccggcgcgctatataggcggcgaattcggaagacttgcggcaaataaaaatatttcagaaggcgagttaacctcaataatagcgtttcccgatctttatgaaataggaatgggaaaccagtccgtgcggattatctacaacaatttaaacatcaaaaaaaatattttctgcgaccgcgcttttgctcccgcgcctgattttgaaaaattgttacgcgaaaacaatatccccatttacgggcttgataccggcataagcgccatgtctgtggacttattaatgtttacgcttggttatgaacttggtttaaacggtatattaacaatgctcgacgtgtcaaaaattccgcttcactgtgatgaaaggacttcagaacacccgattgtcatcgccggaggtcccgcggtttcaaatccgctgccgtattcgccgtttatcgacgctttttggataggggaggctgaagatgaattttttaaccttgcggagaaattgtccgaattaaaaaaaagagggaagggcagggcggagctgttaaaaaaaatagctgaacatcctaatgtatgggttagaggaaaagaaaaagcgacaagggcgattaccaaaagtttttcgaaagaatcaaatgtgtaccctattccaagtatgaaaattgtacagcatcacggcgctgtggaaattatgcgaggctgtcctaacggctgccgtttttgccacgccggttactggtacagaccttgcaggcaaaagaatggagaacttatcgccgctcaggtagatgaaatggtaacaaaaggcggctggcaggaaatcagtctgtcctcgctgtcatcgggcgattatacgggaattgctgaactggtagaaaatcttaattcacgcttcagcggtaagcacatttcattccaactgccctcgcttaaagtttcaggtttttcgctttcaatactggaaaaaatagccgtaacaaggaaaagcggactcacctttgccgtagaaacgccgaaagattcatggcagatggctataaacaaggaagtaacaagggattcggttgtttcgataattacggaggcaagaaaaaacggctggaagggtgcgaagttttattttatgatagggcttccggtccccgattgcggtttaaatgaggaagaggaaattgtttcgtttgtcgcggatatcggacgcagatgcagaatgcactttaacattaacgttggaatatttatcccaaaaccgcataccccgtaccaatgggcgaagcagattgacagcgaaactgcggaaaaaaagttaaactttatacgctcaaaattaaaacctttgggacacaaggtaagtatttcagacccgcttatttcgcaaatagaaggcattttaagcaggggagacgaacgctccgggttattgtgtgaaaaggcatggcgtgagggaagcaggctagacccctggagcgaatttataaacagagaatcctggcaaaaaattattgacgataaccgcgatattgtagacctaattttatcaggaaaaatgaaataccctgggctgatattgaatcctgcgtaa

SEQ ID NO: 69744 - protein, 545 aa, Unknown
  Obtained from environmental sample
  DOMAIN (247)...(411): Radical SAM superfamily
  misc_feature (1)..(545): Xaa is any amino acid
MPSIRYVDPVKELSNLLLDAEKPARYIGGEFGRLAANKNISEGELTSIIAFPDLYEIGMGNQSVRIIYNNLNIKKNIFCDRAFAPAPDFEKLLRENNIPIYGLDTGISAMSVDLLMFTLGYELGLNGILTMLDVSKIPLHCDERTSEHPIVIAGGPAVSNPLPYSPFIDAFWIGEAEDEFFNLAEKLSELKKRGKGRAELLKKIAEHPNVWVRGKEKATRAITKSFSKESNVYPIPSMKIVQHHGAVEIMRGCPNGCRFCHAGYWYRPCRQKNGELIAAQVDEMVTKGGWQEISLSSLSSGDYTGIAELVENLNSRFSGKHISFQLPSLKVSGFSLSILEKIAVTRKSGLTFAVETPKDSWQMAINKEVTRDSVVSIITEARKNGWKGAKFYFMIGLPVPDCGLNEEEEIVSFVADIGRRCRMHFNINVGIFIPKPHTPYQWAKQIDSETAEKKLNFIRSKLKPLGHKVSISDPLISQIEGILSRGDERSGLLCEKAWREGSRLDPWSEFINRESWQKIIDDNRDIVDLILSGKMKYPGLILNPA

SEQ ID NO: 69745 - DNA, 768 bp, Unknown
  Obtained from environmental sample
  misc_feature (1)..(768): n is a, c, g, or t
ttggcttcgggtctacgacaacatactcaatcgccctattcagactcggtttccctccggctgcagctcttccaagccttaaccttgcatgctatcgtaactcgcaggctcattctacaaaaggcacgccatcacccaattgctcgggctttgacatgttgtgggtttacggtttcaggttctatttcactcccctcaccggggtgcttttcgcctttccctcacggtactagttcactatcggtcattggcttgtatttagccttgggagatggtcctcccggattcccatggaattccacgtgctccatggtactcggggacaaatttagagagagttggcattttcgcgtacggggctgtcacccactgtggccgagactttccagtctcgttccgctaacgtcaacctttgtaactctccgacaggtcggtactcctgccgcaatccgccccgcaaccccgtctacaccaacgcgcaccggcttacagcgcaaacggtttgggctcctgccctttcgctcaccactacttaggcaatcgttgttttactttctcttcctgaggctacttagatggttcagttcgcctcgtatccttcctcaacctatggattcagttgaggatatccatcgctggatgggttgccccattcggaaatctccggatcaatgcgtgtttgccgctccccgaagcttatcgcagcttgccgcgtccttcttcggcagccaatgccaaggcatccgccgtgtacccttagtctcttga

SEQ ID NO: 69746 - protein, 255 aa, Unknown
  Obtained from environmental sample
  misc_feature (1)..(255): Xaa is any amino acid
MASGLRQHTQSPYSDSVSLRLQLFQALTLHAIVTRRLILQKARHHPIARALTCCGFTVSGSISLPSPGCFSPFPHGTSSLSVIGLYLALGDGPPGFPWNSTCSMVLGDKFRESWHFRVRGCHPLWPRLSSLVPLTSTFVTLRQVGTPAAIRPATPSTPTRTGLQRKRFGLLPFRSPLLRQSLFYFLFLRLLRWFSSPRILPQPMDSVEDIHRWMGCPIRKSPDQCVFAAPRSLSQLAASFFGSQCQGIRRVPLVS

SEQ ID NO: 69747 - DNA, 303 bp, Unknown
  Obtained from environmental sample
  misc_feature (1)..(303): n is a, c, g, or t
gtgccaaaccttcccgtcgatgtggactcttggggaagatcagcctgttatccccggagtaccttttatccgttaagtgacggcgcttccactcgctgccgccagatcactaagacctactttcgtacctgctcgacctgtcagtctcgcagtcaggcccccttgtgcctttacactcatacgccgatttccaaccggcgcgaggggaccttcgcgcgcctccgttactgtttgggaggcgaccgccccagtcaaactgcctgcctactactgtccccgcgccggattcacggcgcgggttag

SEQ ID NO: 69748 - protein, 100 aa, Unknown
  Obtained from environmental sample
  misc_feature (1)..(100): Xaa is any amino acid
MPNLPVDVDSWGRSACYPRSTFYPLSDGASTRCRQITKTYFRTCSTCQSRSQAPLCLYTHTPISNRREGTFARLRYCLGGDRPSQTACLLLSPRRIHGAG

SEQ ID NO: 69749 - DNA, 438 bp, Unknown
  Obtained from environmental sample
  misc_feature (1)..(438): n is a, c, g, or t
gtgcgtagacctccagcctatcaaccaggtagtcttcctggtacctttaggggggttaaacccccagggatggttaatcttaaggcaggcttcccgcttagatgctttcagcggttatcctttccgaacgtagctgcccggcacgtgcccctggcgggacaaccggtacaccagcggttcgtccgtctcggtcctctcgtactaaaaacggctcctctcaaccatccagcgcccatggcagatagggaccgaactgtctcgcgacgttctgaacccagctcacgtaccgctttaattggcgaacagccaaacccttgggacctgcttcagccccaggatgcgatgagccgacatcgaggtgccaaaccttcccgtcgatgtggactcttggggaagatcagcctgttatccccggagtaccttttatccgttaagtga

SEQ ID NO: 69750 - protein, 145 aa, Unknown
  Obtained from environmental sample
  misc_feature (1)..(145): Xaa is any amino acid
MRRPPAYQPGSLPGTFRGVKPPGMVNLKAGFPLRCFQRLSFPNVAARHVPLAGQPVHQRFVRLGPLVLKTAPLNHPAPMADRDRTVSRRSEPSSRTALIGEQPNPWDLLQPQDAMSRHRGAKPSRRCGLLGKISLLSPEYLLSVK

SEQ ID NO: 69751 - DNA, 858 bp, Unknown
  Obtained from environmental sample
  misc_feature (1)..(858): n is a, c, g, or t
ttggcgcacctgaacttggtgatgtgccaccgctccatcaactacatagccgagatgatgaagacgaagtacggtttggactggctgaaggtgaacttcatcggagtggaggctacgtgcaagtcgctccgtgagatcgccaagtacttcgacgacccggatttaacgaaaaaggtggaagaggtgatcgcggacgagttggcggccatcaaagacgatatggatcactaccgcgctaagctgaacggcaagactgccggtatattctccggcggttcgcggtcgcaccactatcaggcgctgcttaaagacttggggatgaggacggtgatcgccgggtacgagttcgcccaccgcgacgactacgaggggcgcgacgtcattccgaacatcaaggaagacgccgacaacaagaacatagagagcattaccgtaaagcccgatgagaaacactatcgcgagaggtataacgcgcagcagatcgccgccctcaaatcaggcgatgagggcatagagctggacacgtacgacggcatgattccggagatgtgcgccggcgacgtggtggtggacgactacaaccactttgagacggacgctctcatcaagaccgtgaagccggacattttcctgtcgggcatcaaggacaaacactccatacagaaggcgggcgtgtcgtcgcgtcagatacactcctacgactattccggcccctattcgggttttcacggcgccgtgaatttcggcagggacgtggcgatggccatatacacaaacgcgtggcagctggtcacgccgccgtggaagcatcaacctatgcttaccggcacaattgcggaggagggaaaaaatgcttga

SEQ ID NO: 69752 - protein, 285 aa, Unknown
  Obtained from environmental sample
  DOMAIN (1)...(258): Nitrogenase component 1 type Oxidoreductase
  misc_feature (1)..(285): Xaa is any amino acid
MAHLNLVMCHRSINYIAEMMKTKYGLDWLKVNFIGVEATCKSLREIAKYFDDPDLTKKVEEVIADELAAIKDDMDHYRAKLNGKTAGIFSGGSRSHHYQALLKDLGMRTVIAGYEFAHRDDYEGRDVIPNIKEDADNKNIESITVKPDEKHYRERYNAQQIAALKSGDEGIELDTYDGMIPEMCAGDVVVDDYNHFETDALIKTVKPDIFLSGIKDKHSIQKAGVSSRQIHSYDYSGPYSGFHGAVNFGRDVAMAIYTNAWQLVTPPWKHQPMLTGTIAEEGKNA

SEQ ID NO: 69753 - DNA, 1383 bp, Unknown
  Obtained from environmental sample
  misc_feature (1)..(1383): n is a, c, g, or t
ttgcggaggagggaaaaaatgcttgatatgacgacaaaggatgtaaaggtacgcgaagctctgcgcgtgaacccgtgtaagacttgccagcccgtcggcgcaatgtatgccgcgctcggcgtggctaagtgcatgccgcacagccacggttcgcagggttgctgctcgtatcacaggacggtgctgtcgcgccactttaaggagccggcgatcgcgtcgtcgtcgtcgtttacagagggcgcgtcggtgttcggcggcaagagcaacctcaatacgtcggtgaagaacatattcgatatgtacggccccgacgttatcgcggtgcatactacttgcctatccgagacaatcggcgacgacctgacgtcgtttatcatggacttggaactgccggaaggcaaactcgtcgtgcacacaaacacgccgagctatgtcgggtcgcatataaacggcttcttcaacatgatgatcggtttcattaactacttgacaaagaagacgggtacgtccaccggcaagaccgctgtcttccccgggtgggtgaatcccggcgacatacgcgaactcaagcgcatagccgccctgatgaacgtgccgacggtcttcttccccgaccagagcggcgtcctagacgcgcccatgaccggcaggtacgagttctatcccgaaggcggcacgacgctcgacgaaatccgcacgctcggcgacagcgacggagtgattgcgcttggggagataatcggggttgaacccgcggaggtgctcaacaagaagtttaaagtgccgtatacgctgttgccgctgcctgtcggcgtcgcgtacaccgaccaatacgtgcttgcgttgcggaagcagtcgcgcacggaggtccccgccgcgcttgaagcggaacgcggccggctcgttgacttgttgctcgactcctcgcagtatacaaccggaagaaaggtcgcgatattcggcgatccggatattgtcataggcctcacgtcgctcgtgcttgagatgggcatgattcccaagtacgtcatcaccggaacgcccaaagatgagtttacacgcagggttacggaactcttcgacaagtacggcgtaacggactgcaaggctaaagcgaacgccgactttttcgagttgcaccagtggataaagaacgagccggtcgatttgctgatcggttcgacctacggcaagcagatagcgcgcgccgaggacattcctttcatccgcgcaggttttccggtgctcgacagatacggcggaccgttgctgccgacggtcggttacagcggcggcgttctgttcgtagagaggatcgtcaacgcattgttggataagttcgacaagacgtgcgctgaggaggattttgagattgtgctgtag

SEQ ID NO: 69754 - protein, 460 aa, Unknown
  Obtained from environmental sample
  DOMAIN (21)...(445): Nitrogenase component 1 type Oxidoreductase
  misc_feature (1)..(460): Xaa is any amino acid
MRRREKMLDMTTKDVKVREALRVNPCKTCQPVGAMYAALGVAKCMPHSHGSQGCCSYHRTVLSRHFKEPAIASSSSFTEGASVFGGKSNLNTSVKNIFDMYGPDVIAVHTTCLSETIGDDLTSFIMDLELPEGKLVVHTNTPSYVGSHINGFFNMMIGFINYLTKKTGTSTGKTAVFPGWVNPGDIRELKRIAALMNVPTVFFPDQSGVLDAPMTGRYEFYPEGGTTLDEIRTLGDSDGVIALGEIIGVEPAEVLNKKFKVPYTLLPLPVGVAYTDQYVLALRKQSRTEVPAALEAERGRLVDLLLDSSQYTTGRKVAIFGDPDIVIGLTSLVLEMGMIPKYVITGTPKDEFTRRVTELFDKYGVTDCKAKANADFFELHQWIKNEPVDLLIGSTYGKQIARAEDIPFIRAGFPVLDRYGGPLLPTVGYSGGVLFVERIVNALLDKFDKTCAEEDFEIVL

SEQ ID NO: 69755 - DNA, 1173 bp, Unknown
  Obtained from environmental sample
  misc_feature (1)..(1173): n is a, c, g, or t
atgaaattaagtgccggattgtttctgaggacagcggcagtcgcggtgtgcgtcgccgtgggggcggcgtttggggatacggatattacttataagttcacggacgccaagtttagggcggcggtgtactatgagatcggcaaaactgcccccgccccgatactcgatagcgatgtgaaaggcattaccgagattgacgtgagcaataacggtatatccgaccttgccggtatagaacactttaccgcgctcaagaagttgatttgctgggacaataacctgatagcgctcgatctgtcgaggaataccgccttgaaggagttgaattgctccgacaatagattgatcgcgattgacgtgtcgaggaacagcgtattggatgagttacgttgcgacaacaatctattggcggcgctcaacgtttcaaagaataccaaactgacggtattatcttgcacatggaatcaattgaccgagcttgatttgtcgaagaatacctcgctgacggtgctggcttgcgagggcaaccaattgacagcgcttgatttgtcgaataataccgcgttatggctgttgggatgcgagggcaacgacctgaccgcgcttgatgtatcgaagaatacagcgctgacggtgttgagctgcttcatcaacaaattgaccgcgctcgacgtgtctaagaataacgctctcacggagttgaattgctcgacaaacaagttaaccgcgattgatgtgtcaaaaaataccgctcttacggagttgtcttgcgacaacaaccaaatacccgcgcttgacgtatcgaagaataccaagctggaggcgttgtattgcttcaacaataaattgaccgcgcttgacgtgtcgaataataccgctttgacgaagttgtggtgctacaacaacaatttaaccgcgcttgacgtgtctaagaataccaagctgacgtggttgtcttgcggccgtaaccaattgactgtgctcaacgtgtctaagaataccgcgctcacggagttggatgtgcgcgacaattatttccccgatgagaacgatatcgacggcgtgagtaagttgaaacttacgatgtttaaatttgttccgcagaaggacagaaacgcgtcttctcgcccaaccgggcaatccccgtcgccacagcctcctccaaagaggtag

SEQ ID NO: 69756 - protein, 390 aa, Unknown
  Obtained from environmental sample
  SIGNAL (1)...(25)
  misc_feature (1)..(390): Xaa is any amino acid
MKLSAGLFLRTAAVAVCVAVGAAFGDTDITYKFTDAKFRAAVYYEIGKTAPAPILDSDVKGITEIDVSNNGISDLAGIEHFTALKKLICWDNNLIALDLSRNTALKELNCSDNRLIAIDVSRNSVLDELRCDNNLLAALNVSKNTKLTVLSCTWNQLTELDLSKNTSLTVLACEGNQLTALDLSNNTALWLLGCEGNDLTALDVSKNTALTVLSCFINKLTALDVSKNNALTELNCSTNKLTAIDVSKNTALTELSCDNNQIPALDVSKNTKLEALYCFNNKLTALDVSNNTALTKLWCYNNNLTALDVSKNTKLTWLSCGRNQLTVLNVSKNTALTELDVRDNYFPDENDIDGVSKLKLTMFKFVPQKDRNASSRPTGQSPSPQPPPKR

SEQ ID NO: 69757 - DNA, 441 bp, Unknown
  Obtained from environmental sample
  misc_feature (1)..(441): n is a, c, g, or t
atgatgggcccaaacgaccaacacatggtgcttatgctcctaggcgacgaagacaagcgcgtgcgggcgaacactgtggaggcgctggagagcatggggaacccgaccatgatccccatcctcgtccaataccacaaagaccccaacaaccgtatacgcggaaacgttttgaaggccctctataaccttggctacgccgacatagaggacgacctcatggatatgctgacttcgtccgaaccgctgcaaaaggcttcggcgctgtgggtcataacgcagctgaaatacggcagcagcaaaagggtggtcgacgccgccggatcgtgcctgctatgcgacaacaagatggtgcacagaaacgcggaagcggcgctgacggcggtgggaacgccgagatgtattgggtatatgaattaccttgggagaatcttcaggtactga

SEQ ID NO: 69758 - protein, 146 aa, Unknown
  Obtained from environmental sample
  misc_feature (1)..(146): Xaa is any amino acid
MMGPNDQHMVLMLLGDEDKRVRANTVEALESMGNPTMIPILVQYHKDPNNRIRGNVLKALYNLGYADIEDDLMDMLTSSEPLQKASALWVITQLKYGSSKRVVDAAGSCLLCDNKMVHRNAEAALTAVGTPRCIGYMNYLGRIFRY

SEQ ID NO: 69759 - DNA, 732 bp, Unknown
  Obtained from environmental sample
  misc_feature (1)..(732): n is a, c, g, or t
atgcccgtacgggtgcgcgagaacacggggattgcaaggcttgtcaggagtccacaggaaagacggctcccgtacaaattgcggcaaaaccggaaacgagagcaaaaaataaagggaaatgatatggcaagaatgcgcggaataaatataggcggctggttaagccagattgacgctatacaggaaaaagacccggataaatttccggggatagacaagcacatggaaacttttataagcgcggaggattttgccaatgttaaaaattggggctttgatcatgtgcgtatcccggttgactcgtacctgttttttaccgaagatgaacagccgcttgaaaacaggtttgaccggcttgataaggccgcagagtacgcaaaacaaaacggccttaagttcatattggacctgcacgagtgtccggggcacgatttttccgaagcggctaaaacgcccgttcaaaaacttttttccggcgacgatacctatatcaaaaaaaccgaaaaaatctgggcttaccttgcggagcgttacgcgggcaaggatcacgttctctttgaaacgctcaacgagccagtcgcccccactcctgagatttggaacaatgtaaaggacaggctctgccgcgaaatacgcaaacacgcgcctaagtcaacgataataaccggttccatatgtggaacgttccgggtacattcgacttccttactccctttgacgacgacaatatga

SEQ ID NO: 69760 - protein, 243 aa, Unknown
  Obtained from environmental sample
  misc_feature (1)..(243): Xaa is any amino acid
MPVRVRENTGIARLVRSPQERRLPYKLRQNRKREQKIKGNDMARMRGINIGGWLSQIDAIQEKDPDKFPGIDKHMETFISAEDFANVKNWGFDHVRIPVDSYLFFTEDEQPLENRFDRLDKAAEYAKQNGLKFILDLHECPGHDFSEAAKTPVQKLFSGDDTYIKKTEKIWAYLAERYAGKDHVLFETLNEPVAPTPEIWNNVKDRLCREIRKHAPKSTIITGSICGTFRVHSTSLLPLTTTI

SEQ ID NO: 69761 - DNA, 516 bp, Unknown
  Obtained from environmental sample
  misc_feature (1)..(516): n is a, c, g, or t
atgtggaacgttccgggtacattcgacttccttactccctttgacgacgacaatatgatctactgcgtgcatttttatgagcctcttctttttactcaccagaacgcgccgtgggttgataatcctgaaattaaaatagcaagaccgtaccccggcgattacggccccggcattgtccgccaatacggacacgcgcattcgaacggcgtttgggataaacagcggcttgtaaatgaatttacccctgtcaatactttcaggaaaaaatacaacgcgcaagttatttgcaacgaattcggcgtttacacgcccgtcgaacttcaatcccaactgcgctggtatgaggatattctttctgtccttaaggaaatggagataggtttcacttactggaattataaaaacctcgactttggaattatttccataggagagaaactgcatgaaaaccttccgcagtacgacaacagcgagaggataaatcatcctgttcttgatgttttaagaaagtattga

SEQ ID NO: 69762 - protein, 171 aa, Unknown
  Obtained from environmental sample
  misc_feature (1)..(171): Xaa is any amino acid
MWNVPGTFDFLTPFDDDNMIYCVHFYEPLLFTHQNAPWVDNPEIKIARPYPGDYGPGIVRQYGHAHSNGVWDKQRLVNEFTPVNTFRKKYNAQVICNEFGVYTPVELQSQLRWYEDILSVLKEMEIGFTYWNYKNLDFGIISIGEKLHENLPQYDNSERINHPVLDVLRKY

SEQ ID NO: 69763 - DNA, 558 bp, Unknown
  Obtained from environmental sample
  misc_feature (1)..(558): n is a, c, g, or t
ttgatgaactttgtaacaattgattttgaaaccgcgacatactcaagggatagcgcctgctctatagggctggtaaaatttcaggacggaaaagcaaaggacaacttctattcgctgataagaccgcctatacttcaaatacgccccgattttaccgacattcacgggctgaccgttgaagatgtaagagacgcccccactttcataaatatctgggacagcgaaataaaaccgtttatcggcgattttccgctggcggcgcataacgccgctttcgacatgggcgtactcgccgccgttcttgaatgttacaatctggacataccggacttgcggtatttctgcacatgcaatcttgcgcgtaacacatggataggctttaaatcatattctcttacaaaccttgccaattatttcggcattgtttacgacgcgcacaacgcgcttgaagacgccttaacctgcgggaaactggtgattatggcggcggaaaaattcggctgcgtgaatgttgaggaactgctggaaaacgccgggttgaagatgtgcgtactgtaa

SEQ ID NO: 69764 - protein, 185 aa, Unknown
  Obtained from environmental sample
  DOMAIN (4)...(159): Exonuclease
  misc_feature (1)..(185): Xaa is any amino acid
MMNFVTIDFETATYSRDSACSIGLVKFQDGKAKDNFYSLIRPPILQIRPDFTDIHGLTVEDVRDAPTFINIWDSEIKPFIGDFPLAAHNAAFDMGVLAAVLECYNLDIPDLRYFCTCNLARNTWIGFKSYSLTNLANYFGIVYDAHNALEDALTCGKLVIMAAEKFGCVNVEELLENAGLKMCVL

SEQ ID NO: 69765 - DNA, 939 bp, Unknown
  Obtained from environmental sample
  misc_feature (1)..(939): n is a, c, g, or t
atggcagaacaaaaagaaatgcgaatggcttatgttgacacattgatggcgttagctgaaaaaaataaaaatattgtcgtgctggaagccgaccttatgagctgtacaaacaccggcattttcaaaaaaacataccccgaccgttttattaactgcggcatcgcagaagcgaacatggtcggcatcgcttcgggtctttccactctgggaaaaatcccgtttgcggcgggcttcggctgcttttcatcgcggcgtgtattcgatcaatttttcctttcagccaactacgcgcggcttaacgtaaagttgacaggcaccgacccgggcgtaaccgccgcgtttaacggagggactcacatgccttttgaggaacttgccctgatgagggttgttcccggtttaacagtccttgaaccgtcggacccctcttcctgcgccgcctttgtccgtcttatggcggaagaatacggctgtcattatctgcgtattccgcgcaagcccgttccgtacctttatcctgaaaccgaagtttttaaattcggcaaggcaaaagttttgaaagagggaaaggacttatgctttatggcgcttggcagtctcatggtgaaccagtcgctgaaagccgccgaaacccttgccgcgagcggcataagcgcgggagtgctggacattctgtgcttaaagcccatcgaccgtgatgcgatacttgaacaggcgggaaaagtgcgcgctgtaataagcgcggagaacgcccagatagcgggaggtcttggcagcgcggttgcggaaatactcgcggagaacgggtgcaagtgcaagtttgcgcgcataggcatacgcgacgagttcggcgaggtgggtacgcaggattatcttgtcgaacgttacggccttgacgtgggaagccttgtgaaaaaagcgcaagaattgctttcctaa

SEQ ID NO: 69766 - protein, 312 aa, Unknown
  Obtained from environmental sample
  DOMAIN (181)...(303): Transketolase, C-terminal domain
  misc_feature (1)..(312): Xaa is any amino acid
MAEQKEMRMAYVDTLMALAEKNKNIVVLEADLMSCTNTGIFKKTYPDRFINCGIAEANMVGIASGLSTLGKIPFAAGFGCFSSRRVFDQFFLSANYARLNVKLTGTDPGVTAAFNGGTHMPFEELALMRVVPGLTVLEPSDPSSCAAFVRLMAEEYGCHYLRIPRKPVPYLYPETEVFKFGKAKVLKEGKDLCFMALGSLMVNQSLKAAETLAASGISAGVLDILCLKPIDRDAILEQAGKVRAVISAENAQIAGGLGSAVAEILAENGCKCKFARIGIRDEFGEVGTQDYLVERYGLDVGSLVKKAQELLS

SEQ ID NO: 69767 - DNA, 819 bp, Unknown
  Obtained from environmental sample
  misc_feature (1)..(819): n is a, c, g, or t
atggataaagaaaccgaacaatttctaaagaatcaggcaaaagaaatccgaaaacttactattgaagaaatcggaaacttgggaacagggcatatagggggggcgatgtccatcgtggatattttgaccctattgtatttccaccgcatgaaggttgatccgaaaaatccccgttgggaagagcgggatcaacttgtcgtttccaaggggcactcgggacccgcagtctacgcgacgctcgcgctcaagggctattttccccttgactggcttaaaaccctgaacaaaggcggcaccaaactgccaagccactgcgaccgcaacaagactcccggcatagacatgacgaccggctctcttgggcagggtttttccgcggccatcggcatagccgtaggcctgagaatggataaaaaaacttctaccgtatatacaattatcggggacggcgagtccgacgaagggcaaatttgggaaggcgcgctctttgccggttttcacaaactttccaaccttgtcgcgtttaccgattacaacaaacagcagctcgacggcttttcaaaggatattcttgatctcggcgaccttgccgccaagtgggcagccttcggctggttcacgcaggaagtagacggacacgatgtcgccgctcttgacgccgcgattgaaaaagcgcatgaacaaaaagaaaagccctccatgattgtcatgcacacaatcaagggaaagggctgtaatttcgcggaaggcatcgagaaaaatcacagcatggcctttgacatggaaaaagccaaagaagccatagcggcattaggttaa

SEQ ID NO: 69768 - protein, 272 aa, Unknown
  Obtained from environmental sample
  DOMAIN (97)...(237): Thiamine pyrophosphate enzyme, C-terminal TPP binding domain
  misc_feature (1)..(272): Xaa is any amino acid
MDKETEQFLKNQAKEIRKLTIEEIGNLGTGHIGGAMSIVDILTLLYFHRMKVDPKNPRWEERDQLVVSKGHSGPAVYATLALKGYFPLDWLKTLNKGGTKLPSHCDRNKTPGIDMTTGSLGQGFSAAIGIAVGLRMDKKTSTVYTIIGDGESDEGQIWEGALFAGFHKLSNLVAFTDYNKQQLDGFSKDILDLGDLAAKWAAFGWFTQEVDGHDVAALDAAIEKAHEQKEKPSMIVMHTIKGKGCNFAEGIEKNHSMAFDMEKAKEAIAALG

SEQ ID NO: 69769 - DNA, 969 bp, Unknown
  Obtained from environmental sample
  misc_feature (1)..(969): n is a, c, g, or t
atgaaaagaaaaataatatggctgatattgttcgctctggtcttattgtcctcttgtaaattctttttaggaccggaacctgataccggcccatccgaagttttaaaaagcctctggaatgattttaacaatatccacgcgaatctggattttagaatgagcgccaatcaaaagtacaaaagttggcatgacgtatactataacaaacaggccggatattcccaaaaaattaattccggcatgtccgaagaatcattatttgaagtatgcgcggatatgcttgaagagttaaaagatcctcatgtcagcatattttcgtccgattatggatacagaagctatgttaccggcgtcaatgaatattttaatcttgaaaaagcaagaagttacctaaaagaaaacggcaatgccgcaaataaaaattttatttacggcgtattttcctctgattctgatataggttacatttatattccggaatttttaaatgagaacaccgaaccggaagggcagggaagcacgaacgcgattgacagtataataagcgctcttgaaaaaacaagagcccttgttttggatgtccgcaacaacagagggggcgatatatatgtaatggaatatattgccgcccgtttcgcgtccgagtcaaaagattattgcaagttaataaacaaaaaaggccccggcccgaatgatttttcctctcctataatttatacaataaaaagtattaagaaagcatctgacaacaaatatggttatacaaaaccgattgtacttttaactaataaaaacacagtttccatggctgagtggtttaccatggctctgcggactcaaagtcatgtaacgcatataggaacagcgacatgcggagcgttctctccccgcaaagatcgttttatgattaacggctgggtttattctatatcgccgggaagggtgacggatatgaacggaaataattag

SEQ ID NO: 69770 - protein, 322 aa, Unknown
  Obtained from environmental sample
  SIGNAL (1)...(23)
  DOMAIN (152)...(322): Peptidase family S41
  misc_feature (1)..(322): Xaa is any amino acid
MKRKIIWLILFALVLLSSCKFFLGPEPDTGPSEVLKSLWNDFNNIHANLDFRMSANQKYKSWHDVYYNKQAGYSQKINSGMSEESLFEVCADMLEELKDPHVSIFSSDYGYRSYVTGVNEYFNLEKARSYLKENGNAANKNFIYGVFSSDSDIGYIYIPEFLNENTEPEGQGSTNAIDSIISALEKTRALVLDVRNNRGGDIYVMEYIAARFASESKDYCKLINKKGPGPNDFSSPIIYTIKSIKKASDNKYGYTKPIVLLTNKNTVSMAEWFTMALRTQSHVTHIGTATCGAFSPRKDRFMINGWVYSISPGRVTDMNGNN

SEQ ID NO: 69771 - DNA, 591 bp, Unknown
  Obtained from environmental sample
  misc_feature (1)..(591): n is a, c, g, or t
ttgagcaggagggattgtctgtccgatgtttatgtcccgggggtgaaaagccggtttaacacagaaaagctcgtcgaagacctcatgaggctcgagcgcatccccagagaaagaaccgaaagaaatatcgaaacacaggaaatccgcaagacctattggaaggatcttggcacgcgcgttacagctctgcgcgaaagcgcccggtttcttttctcctttcagaaccctttcaacgaccgcatcgccgtctcctcggatgaaaattcaatcactgccagcgcgacaagggaagccgtcgaacaggaataccgtttcaacgtcatacagcttgcccaggcggatcgtttcctctcccctccccttgatgaaaaaacgaaaatcgacgcgggaaattacacgtttaccgtgggcaatgaagagatctcccttaatttcaggggtggttcccttcgtgaatttgccgacgcgctgaaccgccgggggcgcgacaaaatcggcgccagcctgataacggtgcagcccggcacaaaatcgcttttgattgaatccaaagtaaccggcgcggaaaaaccggcttggcttttccggtga

SEQ ID NO: 69772 - protein, 196 aa, Unknown
  Obtained from environmental sample
  DOMAIN (16)...(115): Flagellar hook-associated protein 2 C-terminus
  misc_feature (1)..(196): Xaa is any amino acid
MSRRDCLSDVYVPGVKSRFNTEKLVEDLMRLERIPRERTERNIETQEIRKTYWKDLGTRVTALRESARFLFSFQNPFNDRIAVSSDENSITASATREAVEQEYRFNVIQLAQADRFLSPPLDEKTKIDAGNYTFTVGNEEISLNFRGGSLREFADALNRRGRDKIGASLITVQPGTKSLLIESKVTGAEKPAWLFR

SEQ ID NO: 69773 - DNA, 1008 bp, Unknown
  Obtained from environmental sample
  misc_feature (1)..(1008): n is a, c, g, or t
atgccccttcatctgtttcagatggatggccgtttcgttccgtacggcggcctattttgggggaggaggcgcgaaaccgcccccaggagaaccgctttcgcgggacggtcccggcatggatggccgggacaagaatcaatacatggagggttatttatgataattaatcacaacatgagtgcgatgtacgccaaccgccagcttgacgtaactcagcttgacatttccaagagccttgaaaagctcagctccggcatacggatcaaccgcgccggggacgacgcttccgggcttgcggtttccgaaaagctgagggcgcagatccgcggccttaaccaggcagagcgcaacaccctgaacggggtgtctttcatacagaccgccgagggttaccttcaggaaacccaggatgttctgcacaggatccgcgaactggcagttcagtcagccaatggcatctacaccgaggaagacaggctgtacattcagatcgaagtatctgctctcgtggccgaagttgaccggatcgcaagccatgcccaattcaacggcatgaatatgcttaccgggcgttttgccacaggtgacgccgctcagataatgcagttccacatcggcgccaacatggaccagaacacaagggtctatatcggcgaaatgactgccacatcgctcggaatgaagaacgcccaggggaaggaagggattatcaccctttcaaccactgtttctgccaatcaggctatcggcgccttagacagcgctttaaagcaggttaacaagcagagggcggatctcggcgcctaccagaaccgctttgaaatggctgcccaaggcatcgccgttgcggcggagaatatgcaggcttccgaatcccggatcagggacgtgaacatggcttccgaagtagtgaatttcaccaaggacgccattctgaaccaggccgggacagcgatgttagcccaggcgaacgtgcggacccagtccgtactgcagttgcttggctag

SEQ ID NO: 69774 - protein, 335 aa, Unknown
  Obtained from environmental sample
  DOMAIN (242)...(313): Bacterial flagellin C-terminus
  misc_feature (1)..(335): Xaa is any amino acid
MPLHLFQMDGRFVPYGGLFWGRRRETAPRRTAFAGRSRHGWPGQESIHGGLFMIINHNMSAMYANRQLDVTQLDISKSLEKLSSGIRINRAGDDASGLAVSEKLRAQIRGLNQAERNTLNGVSFIQTAEGYLQETQDVLHRIRELAVQSANGIYTEEDRLYIQIEVSALVAEVDRIASHAQFNGMNMLTGRFATGDAAQIMQFHIGANMDQNTRVYIGEMTATSLGMKNAQGKEGIITLSTTVSANQAIGALDSALKQVNKQRADLGAYQNRFEMAAQGIAVAAENMQASESRIRDVNMASEVVNFTKDAILNQAGTAMLAQANVRTQSVLQLLG

SEQ ID NO: 69775 - DNA, 540 bp, Unknown
  Obtained from environmental sample
  misc_feature (1)..(540): n is a, c, g, or t
atgtacatccagatcgaagtttccgctctcgtggccgaagtcgaccggatcgcaagccatgcccagttcaacggcatgaacatgctcaccgggcgtttcgccagggctctgggacagaacacccccaccgcttccatgtggttccacatcggcgcgaacatcgatcagaggacgcaggtgtacatcggcacaatgaccgcttcaggccttggcatccgcgatgtctccgacgctaccatcatgaccttggcaaccccggaagaggccaacaggaacatcagcaccctcgacgaagccctgaaattggtcaacaagcagagggcggatctcggcgcttaccagaaccggctcgaacacgcgattcgcggcatcgacattggcgcggaaaacctccaggccgccgagtccagaatccgtgacaccaacatggctaacgaaatggtcagctatgtcactcaccaaatcctttcacagtccggcactgccatgctggcgcaggctaaccaaaggggtacttcggtattgcagctcttgcaataa

SEQ ID NO: 69776 - protein, 179 aa, Unknown
  Obtained from environmental sample
  DOMAIN (86)...(157): Bacterial flagellin C-terminus
  misc_feature (1)..(179): Xaa is any amino acid
MYIQIEVSALVAEVDRIASHAQFNGMNMLTGRFARALGQNTPTASMWFHIGANIDQRTQVYIGTMTASGLGIRDVSDATIMTLATPEEANRNISTLDEALKLVNKQRADLGAYQNRLEHAIRGIDIGAENLQAAESRIRDTNMANEMVSYVTHQILSQSGTAMLAQANQRGTSVLQLLQ

SEQ ID NO: 69777 - DNA, 798 bp, Unknown
  Obtained from environmental sample
  misc_feature (1)..(798): n is a, c, g, or t
ttgaacaggattgagcagtttaccgacgataattccgaagaagccaaatccaaacgctattccattctggcaaaagcgctcatggacaggatctccgacctccgcgccgaaattgatcccgaatcctttgacgccctcaatgtccgcgagaacatcaaaaagatcatcgacatggaaaatatccgtaaccgcggtttcaacacggcgatcaactcaatcacctcaattctggatacgtccaagatgggatatcagtacatcgaaaacctcaagaacggaagggaagtcattatccgcgaatacgaggatacggacattgccaacctgccggacgagcgctatcagatcaagatgcgctattttgacaacgcccagcttatcgaagaccgcaaagccttcgacgtaatgatgaagagtttcgagaccgaagttcagcatctttgggacgttcttgaagttatttatcaggattccaagagcatcttcagaattaccgatttccaggatctcgcgaagaagaacaagaacagaatcagaaaggttatcaaagaaaaatcaggcgagcctctttacgaagatattgccaaagtatgggacgaaatttcctttgtaaaacctgccgagaccgaagtggaaaaatcgaaccgcacctatgtttgggaaaaagaccgtcttcgcaccagaattatcaggatgcgcgacaaaatgaagagaatgtacgacttcctgtaccccatcgaaaggcgcgtaatggaagaaaggcttacatggctggaaaaagaatacttcagggtttga

SEQ ID NO: 69778 - protein, 265 aa, Unknown
  Obtained from environmental sample
  misc_feature (1)..(265): Xaa is any amino acid
MNRIEQFTDDNSEEAKSKRYSILAKALMDRISDLRAEIDPESFDALNVRENIKKIIDMENIRNRGFNTAINSITSILDTSKMGYQYIENLKNGREVIIREYEDTDIANLPDERYQIKMRYFDNAQLIEDRKAFDVMMKSFETEVQHLWDVLEVIYQDSKSIFRITDFQDLAKKNKNRIRKVIKEKSGEPLYEDIAKVWDEISFVKPAETEVEKSNRTYVWEKDRLRTRIIRMRDKMKRMYDFLYPIERRVMEERLTWLEKEYFRV

SEQ ID NO: 69779 - DNA, 372 bp, Unknown
  Obtained from environmental sample
  misc_feature (1)..(372): n is a, c, g, or t
atgattaatccctaccacctgcagccgggtctcttgcttgacgtcgatattacgtcaattaagaggaagaaaatcactttggacgcaatggcaaacgtgctcaacgagttcctccacggcgtttccaagggcttctccgacgcggcgttcgcttcgttcagccgcagaaggtcaacggtacgcgaagacattaaccagtctttcagcgctcctactgaagaagaacccgctgtagcttcagccgctcccaagccgaaggcaattgccgctcccggcagggcagcagctcccgctcccaagaagaaaggcgttgtagattcaaaggcaaagaaaaggccgtcacgcggcggatcccagctttcggaaatataa

SEQ ID NO: 69780 - protein, 123 aa, Unknown
  Obtained from environmental sample
  misc_feature (1)..(123): Xaa is any amino acid
MINPYHLQPGLLLDVDITSIKRKKITLDAMANVLNEFLHGVSKGFSDAAFASFSRRRSTVREDINQSFSAPTEEEPAVASAAPKPKAIAAPGRAAAPAPKKKGVVDSKAKKRPSRGGSQLSEI

SEQ ID NO: 69781 - DNA, 642 bp, Unknown
  Obtained from environmental sample
  misc_feature (1)..(642): n is a, c, g, or t
ttggcggatttcggagagcttcgtaaatatgagttgttggcgatttacgcgggttactacggaagcgaaaccgatgaaaattgcgagaaggccgcggaacttgccctaaaagtatttgaaggctctaaggtaaaagttccgcccgctctggcaaggggcaaatatgccgtaaagaaagtcagcaagcccaaaaaagaagcgccgccgcctaaaccggtaaaagtaaaagccgcttcgtcaaaacctcaagccaaacgcgccgcgcctgtggtagttcaggcggctccggaggtaaaaccgtcgggcgggccgatgaagatgactccccggtacgcggtaattgttcaaaacgaactttttcataacggaaacgtggaagcgtggaaacggattatcgcaagctattcggcaaaacatccggatttgcaggtttatatttattatgaaaaagaaagaatattggacatcaattcgctgttcaaatggggcaaggtaaaacatggcagcgccattgaatttgccgtagccggaaataatattcaggatgtggcaaagctgcagcgttaccttacacagggagccagccatttgtttgaagcgttcctgcgtgggccggtaaacaccgtgcttaaattgttttaa

SEQ ID NO: 69782 - protein, 213 aa, Unknown
  Obtained from environmental sample
  misc_feature (1)..(213): Xaa is any amino acid
MADFGELRKYELLAIYAGYYGSETDENCEKAAELALKVFEGSKVKVPPALARGKYAVKKVSKPKKEAPPPKPVKVKAASSKPQAKRAAPVVVQAAPEVKPSGGPMKMTPRYAVIVQNELFHNGNVEAWKRIIASYSAKHPDLQVYIYYEKERILDINSLFKWGKVKHGSAIEFAVAGNNIQDVAKLQRYLTQGASHLFEAFLRGPVNTVLKLF

SEQ ID NO: 69783 - DNA, 2472 bp, Unknown
  Obtained from environmental sample
  misc_feature (1)..(2472): n is a, c, g, or t
atggattcaagaatacatttttttagccagagtatttcgattccttcgaaagtcagctcgaatttattgggtatacgcggacggcaggcgaatgaatttgccgaattggcatttcccattctgccaggaataattcttgacaccgaaatcgcttcggatatagacgtcaagaaaattaagaaagatattaatgaacttttaggcaaatgtgcgaagcttgtcgccaagacatacggtgatcctaagaaccccatgctcttaaaagtggttatatcttccaacctcgctattacaaattacccgaccctgcataacttcggccttgtaaaaccgactatagacggtttcgcaaaatgggtaggggaggattttgccgccagcgaagtattgttcttaattaacggcatgatggcgattcaggaacgcatcaaagaactggaaggcaaaaccaaagagaaggaagaaatctcgggaaaaattaagatcatcaaacgcctgcttggcattaaagggccgtcaaatgaactgcacggcaaagaagaaaaaacgcccgagccgaagaaaaaaaccgccaaggaatatatggacgaatacggcaagtatttccccaagggtttttttgacgacgccgaaggccagcttcttattactctcagcgaaatatccagaatgttaagcatggacgaacagaacgataatgataccgctattatgatccaacccatggtatacggcaattacggcaaagattcctgctcaggcggattttacagccgtaacgtggttacaggcgataaaaaacttcagggcagttttttcaggaataagtttaacgagattggcgctgaagggcacgagatcaataaaatagacgcggtgtatcttaaacagatggaaaaaatcgcgtggactctggaagacaaatttaaggaaatccgttatgtccgctttaccgtggaaaacggaaaactttggcttattgagcaaaggctggtagatcaaaaatcaacacaggcggatcttaaacttttactggatcttcaaaagcgcaaaatcgttgacgaagcctatgtaatcaaggcgattgacccgataaggcttaatgaaattctccatcccgtaattaatatgtccagcgtaaagtcgcaaaaatcttggaagggcggcattgccggcgctcccggcgccgctataggacaggtttacttcagcaccgattcgcttctggaagcgaagaaacaggcggcgcaaaaagggaaagacggccgttttatactggtggttgaatcttcatttgcggaagacgttaaggctattgaggtaagcacgggcgtattgacagccgaaggcggctattcagctcacgcgtcggtagtagcccgccagtacggaaaggtatcccttgtttcgcctgaattaaaaataaagggcaataaagccagtcttggcggcgatttcagtttttccgaaggcgattatattaccattaatgtcccgttctacggcgagtctacggtatatgaaggcgtaactgaattaatcgagcccaacccgaaagaatccgggctgttggactttattacgctttcaaagaaatttattaaaaaattccatatacgctgtaacgccgacacccccagagacgcggctctggctttaagtttcggcgcggacggcttaggtctttgccgtaccgaacacatgttcttcaaggaagaccgcattaatgtattcagggacatgctcctgtccgatgacaccaaggaacgccagaaatatctggacaagcttgaagttatgcaaagggaagacttctacagcatcatgaaagtaatggcgggcaaggaagtgacaatccgtcttttggattcgccgcttcatgaatttatgcctcacaacagcgatgagcttaactcctatgtaagccatgcttcccagggcggcaaaacaaagctgtccaaagcggatattgtcgcccgcatagacgctcttcatgaatttaaccctatgcttggccatcgcggctgccgtatcgcggtctcctatccggagatttatgccatgcaggtaagggcgatcttcaaagccgcttacaaactgcgctccgaaaaaattgacgccaggcctgaaattatggttcccattgttatgaatgtctctgaattaaaacttatcgcttacggtaaaaaaatcgaaggctcaaactatcttggcattgtcgatatagaggaagcgttaagaaaagaattaaaggcaaaagaagtggactacaaaatcggcacaatgattgaattgccggcggcggctctgggcgcgggagaaatcgcgaggtacggacgtttcttcagcttcggaacaaacgacttaacgcagaccacattgggcatctcaagggacgactttaccgcgtttatgccggactacaccctgttgatctatcaacggcaacccgtcagcctcgacccgcgataa

SEQ ID NO: 69784 - protein, 823 aa, Unknown
  Obtained from environmental sample
  DOMAIN (396)...(497): PEP-utilising enzyme, mobile domain
  misc_feature (1)..(823): Xaa is any amino acid
MDSRIHFFSQSISIPSKVSSNLLGIRGRQANEFAELAFPILPGIILDTEIASDIDVKKIKKDINELLGKCAKLVAKTYGDPKNPMLLKVVISSNLAITNYPTLHNFGLVKPTIDGFAKWVGEDFAASEVLFLINGMMAIQERIKELEGKTKEKEEISGKIKIIKRLLGIKGPSNELHGKEEKTPEPKKKTAKEYMDEYGKYFPKGFFDDAEGQLLITLSEISRMLSMDEQNDNDTAIMIQPMVYGNYGKDSCSGGFYSRNVVTGDKKLQGSFFRNKFNEIGAEGHEINKIDAVYLKQMEKIAWTLEDKFKEIRYVRFTVENGKLWLIEQRLVDQKSTQADLKLLLDLQKRKIVDEAYVIKAIDPIRLNEILHPVINMSSVKSQKSWKGGIAGAPGAAIGQVYFSTDSLLEAKKQAAQKGKDGRFILVVESSFAEDVKAIEVSTGVLTAEGGYSAHASVVARQYGKVSLVSPELKIKGNKASLGGDFSFSEGDYITINVPFYGESTVYEGVTELIEPNPKESGLLDFITLSKKFIKKFHIRCNADTPRDAALALSFGADGLGLCRTEHMFFKEDRINVFRDMLLSDDTKERQKYLDKLEVMQREDFYSIMKVMAGKEVTIRLLDSPLHEFMPHNSDELNSYVSHASQGGKTKLSKADIVARIDALHEFNPMLGHRGCRIAVSYPEIYAMQVRAIFKAAYKLRSEKIDARPEIMVPIVMNVSELKLIAYGKKIEGSNYLGIVDIEEALRKELKAKEVDYKIGTMIELPAAALGAGEIARYGRFFSFGTNDLTQTTLGISRDDFTAFMPDYTLLIYQRQPVSLDPR

SEQ ID NO: 69785 - DNA, 1047 bp, Unknown
  Obtained from environmental sample
  misc_feature (1)..(1047): n is a, c, g, or t
atggggaagaagaaagaaactacgagcgttgtacggccggaggcggcgttgggcgaggatgagcgtgatctgagtctgcggccaaggcggctttcagagtttttgggacagaaacagatgaaggacaatctttcggtcttcatttcggcggccaaacaacgcggggaaagccttgatcatctttttttgattggacccccgggtttgggcaaaaccacgctggcgcaggtggtggcaaacgagcttgaaaccggttttacgcagacatccgcgcccgctatggacaagcctaaagaccttgtcggactgcttaccaacctgaaaaaaggcgatgtattctttattgatgaaatccacaggctcaaacccgccattgaggaactcttgtatatcgctatggaagattacgaattggattggatagtagggcaggggcctatggcgagaactctgcgaatccccatccagccttttacgctggttggggctaccaccaaggcggggattgtctccggcccgcttataagccgctttggaattacctgccgtttttctttttacgaacaggaggatatggaagccatagtcaggcgttccgccggactgttgaatattaaaatcgataatgacgcggctgtattgcttgcaaagtcctcaaggggaacgccgagggtggtaaaccggctcctgcggcgcatgagggattatgcgcaatacgcgggcagcgccaatattacgttaaccactgtaaaagatgggttaacaaagcttgaaatagacgcgctggggcttgaaaaacaggatagggacatattaaaaattataatcgaacgctatcagggcgggcccgtgggcgctgaaactcttgccatttccataggcgagtccgtggagacacttgaagattactacgagccctaccttatacaaagcggcctgttacagcgcaccccccgcggaaggatggtgacgtccctcgcctacggtcacctggggcttacgccggcaggtaacggagaggtttcgctgtttaacaatgaacaatga

SEQ ID NO: 69786 - protein, 348 aa, Unknown
  Obtained from environmental sample
  DOMAIN (60)...(186): ATPase family associated with various cellular activities (AAA)
  misc_feature (1)..(348): Xaa is any amino acid
MGKKKETTSVVRPEAALGEDERDLSLRPRRLSEFLGQKQMKDNLSVFISAAKQRGESLDHLFLIGPPGLGKTTLAQVVANELETGFTQTSAPAMDKPKDLVGLLTNLKKGDVFFIDEIHRLKPAIEELLYIAMEDYELDWIVGQGPMARTLRIPIQPFTLVGATTKAGIVSGPLISRFGITCRFSFYEQEDMEAIVRRSAGLLNIKIDNDAAVLLAKSSRGTPRVVNRLLRRMRDYAQYAGSANITLTTVKDGLTKLEIDALGLEKQDRDILKIIIERYQGGPVGAETLAISIGESVETLEDYYEPYLIQSGLLQRTPRGRMVTSLAYGHLGLTPAGNGEVSLFNNEQ

SEQ ID NO: 69787 - DNA, 465 bp, Unknown
  Obtained from environmental sample
  misc_feature (1)..(465): n is a, c, g, or t
atgaaaaccagtgattttttctttgagcttcccgatgagcttatagcccagtaccctcctgaaaaacgggggcagagcaggcttatgttgcttgatcggcagaccggaaaacggtcgcaccgcatggtagaagaattgccggagattctctgcaaggacggcgaaaagcccctgctggttttcaataattcaaaagttcgcaaagcgcgtcttataggcgtatcgcaacagacgggggcgaaagttgaatttttgttagttgaacaaaattatgcttcccagtttccattccccactccccactccccactccccactccctattcttcaatatggaaagtactgacgaaacgggtgaaacggcgaaaaccgggcagtgtgtatatttttttagacaataatggcgcggaaatagcaagagctgaaattacagtggggaaggggactttagtatctggcgtttga

SEQ ID NO: 69788 - protein, 154 aa, Unknown
  Obtained from environmental sample
  DOMAIN (1)...(153): Queuosine biosynthesis protein
  misc_feature (1)..(154): Xaa is any amino acid
MKTSDFFFELPDELIAQYPPEKRGQSRLMLLDRQTGKRSHRMVEELPEILCKDGEKPLLVFNNSKVRKARLIGVSQQTGAKVEFLLVEQNYASQFPFPTPHSPLPTPYSSIWKVLTKRVKRRKPGSVYIFLDNNGAEIARAEITVGKGTLVSGV

SEQ ID NO: 69789 - DNA, 480 bp, Unknown
  Obtained from environmental sample
  misc_feature (1)..(480): n is a, c, g, or t
ttgcattttacaaatgaactgctatcgcaaatcaacgcggcggggattgaaaacgtttttatcacgctccatgtggggttgggcactttcttgccggtaagaagcgggaatatcgaagaccatgttatgcaccgggaactgttcagtattgacgaacaggccgcgtcaaaaatcgaatcggcaaagagagcagggcgcaaagtcatagcggtggggactacgagcgtccgtaccatggaaagcgcgtgggattcaggaacgataaaaagaggggagaacgctacatctatttttatataccccggctataagttcaataccgcggacgccctgttcaccaatttccatactccggaatccactttgcttatgcttgtatcagcctttgcaggcagggaattgatccttgaaagttacgcggaggctattgcgcagggctaccgttttttcagttacggcgacgcaatgctgatagtgtag

SEQ ID NO: 69790 - protein, 159 aa, Unknown
  Obtained from environmental sample
  misc_feature (1)..(159): Xaa is any amino acid
MHFTNELLSQINAAGIENVFITLHVGLGTFLPVRSGNIEDHVMHRELFSIDEQAASKIESAKRAGRKVIAVGTTSVRTMESAWDSGTIKRGENATSIFIYPGYKFNTADALFTNFHTPESTLLMLVSAFAGRELILESYAEAIAQGYRFFSYGDAMLIV

SEQ ID NO: 69791 - DNA, 702 bp, Unknown
  Obtained from environmental sample
  misc_feature (1)..(702): n is a, c, g, or t
atgatgaatgtgatagacattgccgcagtcgcggagattgccaagaaacataaattgctttttattgttgacaacacttttcttacgccgtattttcaacagccgttttctcttggagcggatattattctgcacagcgcgacaaaatatttaggcggacacaacgacactctcgccggattgctggttgtaaaagattcaagccttgatgaaaaactaagatttatcgcaaagacgacaggcggatgtctttcgccctttgacagtttccttatcattcgcggaattaaaactcttgctattcgcatggaacgccagcaggaaacagcgataaaaatagcgcattggcttttggaacaaagcgcggtaaaaaaagtttattatccgggattaaaagaccaccccgattatgaattatcccgcaagcagacaagcggcttcggcggaatgctttccttttccgtgaaagacggaaaaacggcggagcgtattttggagagcgtaaaagtaattaagtacgccgaaagtttaggcggcgttgaaagcctcatcacttaccccatgcttcaaacccacgccgaccttcccgaaaatgagcggaaagcgcgcggcatagacgaatgtttactgcgtttgtcagtgggactggagtccgcggatgatttaattgctgatcttaaacaggcaataggtaataaataa

SEQ ID NO: 69792 - protein, 233 aa, Unknown
  Obtained from environmental sample
  DOMAIN (1)...(231): Cys/Met metabolism PLP-dependent enzyme
  misc_feature (1)..(233): Xaa is any amino acid
MMNVIDIAAVAEIAKKHKLLFIVDNTFLTPYFQQPFSLGADIILHSATKYLGGHNDTLAGLLVVKDSSLDEKLRFIAKTTGGCLSPFDSFLIIRGIKTLAIRMERQQETAIKIAHWLLEQSAVKKVYYPGLKDHPDYELSRKQTSGFGGMLSFSVKDGKTAERILESVKVIKYAESLGGVESLITYPMLQTHADLPENERKARGIDECLLRLSVGLESADDLIADLKQAIGNK

SEQ ID NO: 69793 - DNA, 1182 bp, Unknown
  Obtained from environmental sample
  misc_feature (1)..(1182): n is a, c, g, or t
atgaaatataactttgacaaaataatagacagaagcaactcttgcagtatcaaatacgaacctacatggcgcgggaagccagccgacgtactgcccctatgggtcgccgatatggatttcgcttccccgccctgcgtgcaaaaggcgctcgcccgcagagtcaaacacggaatctacggctactcggaaccggatacggaatattttgaagttacacgctcatggtttgaaaaacgctatagctggtctccccaacgtgaatggctgactattacaccgggtgtggtaaccgctttgtacatcgccgtccgctcgctgacggagccgggagacaatatcgttatacaacagcctgtgtattacccgtttgaatcaagcataagaaaaacaggacggcaattactggtcaacgaacttgtatacagcgacggccgttacagcatagattttcaggactttgaggaaaaaatcaaacaggcgaaaatgtttattttgtgcaatccgcacaatccggtcgggcgcgtttggaaaaccgatgagcttacccgcatgggcgaaatatgtctgcgctacggcgtgactgttatcgccgatgagattcatcaggactttgtttttcccggtcacaagcacattgtattcgccgccatgaatcaggattttgcgaatataactgttacctgcacttcaccgtcaaaaacttttaatcttgcgggattgatgagcgcaaatatttttatttccaacaaagacctgcgcttaagatttaaagacgagtatacgcgatcaggtttaagccagccgggaataatggggcttatctcatgcaaggcggcgtacaaggacggcgcgcagtggctggaacagcttattgattatcttgcgggaaatatcgctttcctaaaaacatatcttgctaaacacattcccaaaattaaacttgttgaacctgagggaacatatctcgcgtggctggattgcggcgcgcttggagttccctctcaaaaaattgatgaaacaattacgcaaaaaggaaaactatggctcagcgcggggcagactttcggaaaaggcggcaacggctttgagcgcatcaatgttgcctgcccccgctccgtactgcgcaacgcgctggatcgcttaaaaagtattgattgggaaagcgcggagaaggaacaatga

SEQ ID NO: 69794 - protein, 393 aa, Unknown
  Obtained from environmental sample
  DOMAIN (28)...(381): Aminotransferase class I and II
  misc_feature (1)..(393): Xaa is any amino acid
MKYNFDKIIDRSNSCSIKYEPTWRGKPADVLPLWVADMDFASPPCVQKALARRVKHGIYGYSEPDTEYFEVTRSWFEKRYSWSPQREWLTITPGVVTALYIAVRSLTEPGDNIVIQQPVYYPFESSIRKTGRQLLVNELVYSDGRYSIDFQDFEEKIKQAKMFILCNPHNPVGRVWKTDELTRMGEICLRYGVTVIADEIHQDFVFPGHKHIVFAAMNQDFANITVTCTSPSKTFNLAGLMSANIFISNKDLRLRFKDEYTRSGLSQPGIMGLISCKAAYKDGAQWLEQLIDYLAGNIAFLKTYLAKHIPKIKLVEPEGTYLAWLDCGALGVPSQKIDETITQKGKLWLSAGQTFGKGGNGFERINVACPRSVLRNALDRLKSIDWESAEKEQ

SEQ ID NO: 69795 - DNA, 744 bp, Unknown
  Obtained from environmental sample
  misc_feature (1)..(744): n is a, c, g, or t
ttgggaaagcgcggagaaggaacaatgatcgttgtaaaaaatatttctaaaagttacggagaagttaccgccgtaaaaaaagtcgatcttgatattccttccggctgcatttacggaataatcggcagaagcggcgcgggaaaatcgagccttctgcgcgtaatgagtctcttggaaacgccggatacgggcgaagtgtactacaacggcgaacgcgttgacactctgcgcggcgcggctttgctggaacagcgcagaaaaatgggaatgatttttcaaaattttaatttgtttagctcgcgcaatgtatcggacaatattacctatcccctggaaatcgcgggactgccccgtaaacaaatagacaagcgtcttgatgaacttcttgaaatggttgatatcgccgacaaacgcaagacgcgtttacgggaactttccggcggacagaaacagcgtgtggctatcgcgcgcgcgttggcggcgactcccaaagtgcttttctgcgatgaagcgaccagctctcttgatccgcagaccacccgctcaatactggcgttaatccgcgacttgcagcagcggcttaaaatcactgtggtgctgataacgcaccaaatggaagttatccgcgagatatgccatgaagtcgcggtgcttgacgggggaattattgtagaaagaggaatcgtcgccgccgtgtttgaatcgccgcaaacagccgccgctaaggagttgctccatgcttag

SEQ ID NO: 69796 - protein, 247 aa, Unknown
  Obtained from environmental sample
  DOMAIN (35)...(221): ABC transporter
  misc_feature (1)..(247): Xaa is any amino acid
MGKRGEGTMIVVKNISKSYGEVTAVKKVDLDIPSGCIYGIIGRSGAGKSSLLRVMSLLETPDTGEVYYNGERVDTLRGAALLEQRRKMGMIFQNFNLFSSRNVSDNITYPLEIAGLPRKQIDKRLDELLEMVDIADKRKTRLRELSGGQKQRVAIARALAATPKVLFCDEATSSLDPQTTRSILALIRDLQQRLKITVVLITHQMEVIREICHEVAVLDGGIIVERGIVAAVFESPQTAAAKELLHA

SEQ ID NO: 69797 - DNA, 708 bp, Unknown
  Obtained from environmental sample
  misc_feature (1)..(708): n is a, c, g, or t
ttgaatcgccgcaaacagccgccgctaaggagttgctccatgcttagtgaaaaaattatggaagtgctgtccatgcttccgatagcgacattggaaacagtctacatgacttttgtatcaacttttttcgcctgccttcttggtttccctcttggcgtgtacctctttgtcacttctccggcaggtctttctccccgcggtgtaacgtacaatgtgctttcccgcatcgtcaacatattccgctctctcccgttcatcatattgatgattttgctcatgccgctgacacggcttattatcaaaaccagcataggtcccacggcggtaattattccgctttcaatagccgccgcaccctttgtcgcccgtatcgcggaatccgctctgtccgaagttgaacaaggagtgctaatcgcggcgcgcgcaatgggttcaaccaattttcaaattatccgcaaagtgctaatccccgaagccatgccatctctggtttccggtctcgccctgaccatcatcaatttaatcggctattcggcaatggctggcgctatcggcggcagggggttaggcgaccttgccatacgctacggctactaccgtttcagaacggacgtaactatcggcgcggttattgttatattgatacttgtggaagcggtgcaaattatcggcacggcggttagtagaaatattttgtcaaaacgataa

SEQ ID NO: 69798 - protein, 235 aa, Unknown
  Obtained from environmental sample
  DOMAIN (30)...(233): Binding-protein-dependent transport system inner membrane component
  misc_feature (1)..(235): Xaa is any amino acid
MNRRKQPPLRSCSMLSEKIMEVLSMLPIATLETVYMTFVSTFFACLLGFPLGVYLFVTSPAGLSPRGVTYNVLSRIVNIFRSLPFIILMILLMPLTRLIIKTSIGPTAVIIPLSIAAAPFVARIAESALSEVEQGVLIAARAMGSTNFQIIRKVLIPEAMPSLVSGLALTIINLIGYSAMAGAIGGRGLGDLAIRYGYYRFRTDVTIGAVIVILILVEAVQIIGTAVSRNILSKR

SEQ ID NO: 69799 - DNA, 882 bp, Unknown
  Obtained from environmental sample
  misc_feature (1)..(882): n is a, c, g, or t
gtgaaaatgctatggcacaaaatattttttcttacgcttgttttgttaaactgttggaaaaccgaagctccgataaaccgctcatccatgaaaacttgcgggggaaagattatttctcaggaggcagccatgtttgacaatgccaccttaaaccaactgcacgagcttcgcctctctgccatggcccattgtttcgcagagcagcaagcccaaaccgacatccgttcgctttcgtttgaagagcgcttcggcctgttagtcgaaacggaattgctgtaccgaaggaacaaacgcaccgaacggctgataaggcaggcaggcttccgattcccagccgctattgaggatattgattaccacaacaaaaaaggcataagtaagccggaagtcctcaaactatccctctgctcgtatatcaagaaagcccagaatgtctttttctcaggccctaccggtattggtaaaacctatcttgtctgtgccttgggtcgtgccgcgtgtgcacaagggtttcaggtcatctatatgaggctaagcgatttcttccgcttcacttccgccactcatgcccatggtcagattcacttcggcgacaagtgcgcaaaagtccctctgctcatcttcgatgactggggcctcaaaaagttttctctggaagaaaccgcggaactctctgacatttttgaacggcgctatggccgggcctcaacaataatttcaagccagattccatctcctgcctggcatgacttgttcccagacccgacacaagctgatgcaatccttgaccggatagtccataacgcatatgcctataatatctcaggcgaatccatgcggaaaaccatcggaaaccgcagccttgaaagtccggattcttag

SEQ ID NO: 69800 - protein, 293 aa, Unknown
  Obtained from environmental sample
  DOMAIN (66)...(95): IstB-like ATP binding N-terminal
  misc_feature (1)..(293): Xaa is any amino acid
MKMLWHKIFFLTLVLLNCWKTEAPINRSSMKTCGGKIISQEAAMFDNATLNQLHELRLSAMAHCFAEQQAQTDIRSLSFEERFGLLVETELLYRRNKRTERLIRQAGFRFPAAIEDIDYHNKKGISKPEVLKLSLCSYIKKAQNVFFSGPTGIGKTYLVCALGRAACAQGFQVIYMRLSDFFRFTSATHAHGQIHFGDKCAKVPLLIFDDWGLKKFSLEETAELSDIFERRYGRASTIISSQIPSPAWHDLFPDPTQADAILDRIVHNAYAYNISGESMRKTIGNRSLESPDS

SEQ ID NO: 69801 - DNA, 1245 bp, Unknown
  Obtained from environmental sample
  misc_feature (1)..(1245): n is a, c, g, or t
atgaggagaattgctatggaaaaagcaaaagaaatcctgcggctgtctttgcaaatggggcttagccagcgggatgtggcagcgaaccttcggttcgacgggaccggatgttcccttggaatggtaaatgccgtattggcacgggtaaaagaagcgggtattgccgaccccctcagtctcgacactaaagcgctgggttcaatcatctatccccctgagcaagggcaaggaaaggaggagcctgacttctcctacattgacagggagatgaagaagaaaggagtaacactttttctgctatgggaggaatacaaggtacggcatcctgaaggctgtatgtattcccagttttgtgccaagtaccgggagtaccggaaacaaagctcggtatatatgcggaaggtctacaaggcaggggaacaaatgttggtagactgggcaggtcttactatgaagcatatcgaaggaaatgggaatgaaaagacatcctatgtttttgtagcaatacttcctgccagctcaattctttttgtccgggcgtttaccgacatgaagatggagagctggatagaaggccatgtaaaagccttcgagtattttggaggagttcccaggcttctggttcctgacaatgccaggacagcggtaacgaaagccagccggtatgaagcagagctgaataaaacctataaggaaatggcggatttttatggctgcgcaatcgtccctgcccggccccgctccccgacggacaaggctccggtagagaccgccgttcagatagtcgaacgtcgaataatcgccaagctcaggcatacccgattcttgtctctggatgaattgaacgaaaccgtttgctcggagattgaggcgctcaacggccagccgtttcagaaacagccgggcagccgcaggagcctgtttctctcaactgaacagcatgaattaatgaagcttcctccgaggcggtatgaatacgcccagttcaagcaggccaaagccgggtttgactaccatgtagccttggataaaggccattattacagcattccctatcaatttgcgggcaaagaagtgcttattcgcagcactttacacaccgtggaagtattctgtcagggggaacgtattgcatgccatgtccgaagcatggatccccgcaaacgcttcatcaccgagccttcccacatgccggaaagccaccgggccgttgccgactggtcgccagaacggtttgtatcctag

SEQ ID NO: 69802 - protein, 414 aa, Unknown
  Obtained from environmental sample
  DOMAIN (134)...(309): Integrase core domain
  misc_feature (1)..(414): Xaa is any amino acid
MRRIAMEKAKEILRLSLQMGLSQRDVAANLRFDGTGCSLGMVNAVLARVKEAGIADPLSLDTKALGSIIYPPEQGQGKEEPDFSYIDREMKKKGVTLFLLWEEYKVRHPEGCMYSQFCAKYREYRKQSSVYMRKVYKAGEQMLVDWAGLTMKHIEGNGNEKTSYVFVAILPASSILFVRAFTDMKMESWIEGHVKAFEYFGGVPRLLVPDNARTAVTKASRYEAELNKTYKEMADFYGCAIVPARPRSPTDKAPVETAVQIVERRIIAKLRHTRFLSLDELNETVCSEIEALNGQPFQKQPGSRRSLFLSTEQHELMKLPPRRYEYAQFKQAKAGFDYHVALDKGHYYSIPYQFAGKEVLIRSTLHTVEVFCQGERIACHVRSMDPRKRFITEPSHMPESHRAVADWSPERFVS

SEQ ID NO: 69803 - DNA, 780 bp, Unknown
  Obtained from environmental sample
  misc_feature (1)..(780): n is a, c, g, or t
ttgtatttgatggaaaacggaaaaattaacacacaaaaacatttttctgttcaccccgccgttataagcgtttggtcagctgttatcgcgctgggacatttattgcctacttttccaatctggggtaccggcgggactttttctttatctacggttctttatccgctttcggggatatttttcggtccgttagccggcgctctttgttcggcggctggcggttttatcggttcattaatcgcgccttacacggcatggatggggcttggcacttttatagtaggaacaactacggcgtttacctcaggctgcgccgcgtggggaaaattgccgcctatcgcagtcagttctgccggaaatattatcatcaacgggggaattatcgtttatcttgttgggacaagtctttggtttacgcaggaaataggcagaagcgttatccgctttccgttatttttttacggattgggttttgttgttatgatagcagcgtttattttcgcgcggcggatgtttgagagcaaaaacaaatggattaaatttcccgctgtctggctatgcgcgttcagcggactcataggcggagccgcgataggaaattttttctctcttatattgtacaaacagccaaaagaattttggatgttacttacaattaccgcccccattgaacgcgccgtttttgcgtctatcgcgatgcttgcaggcgcgccgcttctttcaggtttgaataaactcggtatttttacgggtccgcaaggcggcgtttatgaaaattga

SEQ ID NO: 69804 - protein, 259 aa, Unknown
  Obtained from environmental sample
  misc_feature (1)..(259): Xaa is any amino acid
MYLMENGKINTQKHFSVHPAVISVWSAVIALGHLLPTFPIWGTGGTFSLSTVLYPLSGIFFGPLAGALCSAAGGFIGSLIAPYTAWMGLGTFIVGTTTAFTSGCAAWGKLPPIAVSSAGNIIINGGIIVYLVGTSLWFTQEIGRSVIRFPLFFYGLGFVVMIAAFIFARRMFESKNKWIKFPAVWLCAFSGLIGGAAIGNFFSLILYKQPKEFWMLLTITAPIERAVFASIAMLAGAPLLSGLNKLGIFTGPQGGVYEN

SEQ ID NO: 69805 - DNA, 1449 bp, Unknown
  Obtained from environmental sample
  misc_feature (1)..(1449): n is a, c, g, or t
atgtccgtaatcaagctggagaatgtcggtttcatgtacccgcgcgctcaaaaatacgcgcttgaggaaataaatttatccgtttcgcggggtgaatttctggctgtgatgggcgaaaacggcgcgggaaaaaccacgttttgcaaacttcttaacggtattattccccatgtttcaggcggaaatttatcgggaaaggttgaggttgacggcggcgacacaaaaaattcatctgttccgcagttggctgttaaagtcggtatgacattagacgatcctgacgcccagctttttacatcgtctgttcgagaagaaacagcttttggattgcagaatattcttctgccgccggaagaaatggaaataagaatcaaacaagctttggaatccgtgggtcttacaggattcgaggacagggagccttccagcctctccggcggcgaaaaacagcgtcttgctattgccgctgttttagccatgaaaggaaagatactggttcttgacgagcccctttgccgcctcgacccgcagggcgcgcgggaattaatgtctgttttaagcggactgcgtaaaaatgaaaatataacggtaattatgacaatgcacgacagcgcaaaagcggctgaatttgcggacagggtttgtattttaaaaaacggaaaaatcgccgcgcttgatacagcaaaaaatattttttccgacagcgatttgttaaaagaaaattgtatacaaccaataaccgataattttacggattttattccgcaaaaagaaaattacgccgatcccgcgataagtataaaaaacatttcgtttttatattcaaacggttcggggataaagaatatagatttggaaatagcaaataacgattttatcgctattaccggaaataacggctgcggaaagacaactcttcttaaatgtattacaggtcttttgcgtccatgtgaaggggatatttccatttacggaaaaaatacaaaaaaactctctgtctgtgatatttccaaagacgtaggatttgttatgcaaaaccccaacactcagatttttacggattctgtttacaaagaggtttctttcgctcttaaaaacatgcgtctttcaaaaacggaaataaaacagagagtagaaaccgctcttaaaaccgtcggtcttaacgacgcggacgcttttccgcccgcgttaagcagatcggacagaacaaagacattaatcgcgtgcgttcttgcaatgggctgtaaaataattattcttgacgaagttgacgcgggcaatgattatcccggcagtttaaaaattatggatatagctagagatctccattcaaggggctttacaataatttttgttacccataatatgtttttggcgggcgaatacgcgaacagattgataaaaatggaaaaggacaggattgtatttgatggaaaacggaaaaattaa

SEQ ID NO: 69806 - protein, 482 aa, Unknown
  Obtained from environmental sample
  DOMAIN (279)...(477): RecF/RecN/SMC N terminal domain
  misc_feature (1)..(482): Xaa is any amino acid
MSVIKLENVGFMYPRAQKYALEEINLSVSRGEFLAVMGENGAGKTTFCKLLNGIIPHVSGGNLSGKVEVDGGDTKNSSVPQLAVKVGMTLDDPDAQLFTSSVREETAFGLQNILLPPEEMEIRIKQALESVGLTGFEDREPSSLSGGEKQRLAIAAVLAMKGKILVLDEPLCRLDPQGARELMSVLSGLRKNENITVIMTMHDSAKAAEFADRVCILKNGKIAALDTAKNIFSDSDLLKENCIQPITDNFTDFIPQKENYADPAISIKNISFLYSNGSGIKNIDLEIANNDFIAITGNNGCGKTTLLKCITGLLRPCEGDISIYGKNTKKLSVCDISKDVGFVMQNPNTQIFTDSVYKEVSFALKNMRLSKTEIKQRVETALKTVGLNDADAFPPALSRSDRTKTLIACVLAMGCKIIILDEVDAGNDYPGSLKIMDIARDLHSRGFTIIFVTHNMFLAGEYANRLIKMEKDRIVFDGKRKN

SEQ ID NO: 69807 - DNA, 432 bp, Unknown
  Obtained from environmental sample
  misc_feature (1)..(432): n is a, c, g, or t
atggctaaaacagcggcaatagcaagacgctgtttttcgccgccggagaggctggaaggctccctgtcctcgaatcctgtaagacccacggattccaaagcttgtttgattcttatttccatttcttccggcggcagaagaatattctgcaatccaaaagctgtttcttctcgaacagacgatgtaaaaagctgggcgtcaggatcgtctaatgtcataccgactttaacagccaactgcggaacagatgaattttttgtgtcgccgccgtcaacctcaacctttcccgataaatttccgcctgaaacatggggaataataccgttaagaagtttgcaaaacgtggtttttcccgcgccgttttcgcccatcacagccagaaattcaccccgcgaaacggataaatttatttcctcaagcgcgtatttttga

SEQ ID NO: 69808 - protein, 143 aa, Unknown
  Obtained from environmental sample
  misc_feature (1)..(143): Xaa is any amino acid
MAKTAAIARRCFSPPERLEGSLSSNPVRPTDSKACLILISISSGGRRIFCNPKAVSSRTDDVKSWASGSSNVIPTLTANCGTDEFFVSPPSTSTFPDKFPPETWGIIPLRSLQNVVFPAPFSPITARNSPRETDKFISSSAYF

SEQ ID NO: 69809 - DNA, 459 bp, Unknown
  Obtained from environmental sample
  misc_feature (1)..(459): n is a, c, g, or t
ttgttatttggcattttaattatctgccgccttgccgcgttaatgcttattttaccggtattaactcaaacaacgcccccccataaaataacaaggggattatgcgctcttggcgttaactatcgcgccgcgtttatcataacatcggcgttaaacttgattcctgtttttaacgcggaagctcaagtgattatggacgcgcaaagactgcgcggactgcgtaaattcgggataaaatcctatataaacctgctttctccactcatgttaggcgcaatgcagaaagcccaaatttcctcagtcgcgatggattcgagggcgttcggcgtttataaaaaaataacatggcttgaacagcccaaaatgaaaaaacaggatttcctttttcttttaggcagtattatttttttcacggttataatctttattaattatgggataatcaatatattgaaataa

SEQ ID NO: 69810 - protein, 152 aa, Unknown
  Obtained from environmental sample
  SIGNAL (1)...(22)
  misc_feature (1)..(152): Xaa is any amino acid
MLFGILIICRLAALMLILPVLTQTTPPHKITRGLCALGVNYRAAFIITSALNLIPVFNAEAQVIMDAQRLRGLRKFGIKSYINLLSPLMLGAMQKAQISSVAMDSRAFGVYKKITWLEQPKMKKQDFLFLLGSIIFFTVIIFINYGIINILK

SEQ ID NO: 69811 - DNA, 651 bp, Unknown
  Obtained from environmental sample
  misc_feature (1)..(651): n is a, c, g, or t
ttggaaggaatcgctcaaattgccagagaaaaagacctaatcgtatacgccgatgagatttacagccgtattacctacgatgatgcggtacatatccctttttccacgatagcgccggatattttaactgtcagttttgacggtttaagcaaagcgtggcgggctacaggcttccgcgcgggctggatggttctttccggcagcaaaaaaaacgcctgtggctatgtagaggggcttgatatgctcgccagtatgcgtctgtgccccaatatgcccgcccaatacggcatccaaacagcccttggcggatatcagagtattaaagacttgattcttcccgggggcaggctgagagagcagagggacacggcggtgaacctgacaaacgaaatccccggtctttctgtggtaaaacccaggggcgcgctctattgtttcccaaaagtggatattaaacgctttaatataaaagatgacgaaaaatttatgctggatttactgcacggtcaacaccttctccttgttcaaggaaccggttttaactggaaaacccccgaccatttccgcatcgttttcctccccgataaggcaacccttacggacgccatgcgcagattaggtgtttttttggaaaaatataaacaaaattaa

SEQ ID NO: 69812 - protein, 216 aa, Unknown
  Obtained from environmental sample
  misc_feature (1)..(216): Xaa is any amino acid
MEGIAQIAREKDLIVYADEIYSRITYDDAVHIPFSTIAPDILTVSFDGLSKAWRATGFRAGWMVLSGSKKNACGYVEGLDMLASMRLCPNMPAQYGIQTALGGYQSIKDLILPGGRLREQRDTAVNLTNEIPGLSVVKPRGALYCFPKVDIKRFNIKDDEKFMLDLLHGQHLLLVQGTGFNWKTPDHFRIVFLPDKATLTDAMRRLGVFLEKYKQN

SEQ ID NO: 69813 - DNA, 1323 bp, Unknown
  Obtained from environmental sample
  misc_feature (1)..(1323): n is a, c, g, or t
atgaattttgccaccgcgctgtacagggaagaatggttttacgtgttttccagttacggcctttatgaaagaattaaaccggtaatggaacaggacaatgcggttttccgcggaggaaaaaggccgccgcttgccctaatgactgaatggagtactgaaagttttatacccaatgtgcgctttatttccataccgatacagtccctgtccattgccaataccctgaacggcaagtctgatcgtcaggattattttaaagtttccggcagtaccggcgcggtacgctgtacattcccctacgcgcggttgttggtagtagatgacattgccaccaatcttaaagtggctgaaggactcttgtcaccctataaagtaaaggttgatacctgcctaagcggtacggaagcgatagaacttgtaaaacagaataaatacgatcttatttttatggatcacatgatgccggacatggacggcgtagaagcgaccagcataataaggaagatgggcggaaaatataaagaactgaccattatagctttaaccgcaaacgctgttcagggcgcaaaggaaatgtttttatccagcggattcaacggatttattccaaaacccattgatatgcgtgaaatgtacagaacgctgaaagaatggctgcctgccgataaaatagagcttaaaaaagaagaagtgccggagaaagaacaagaagcgagtgaatttatttactctatgaaaaaaatcaacgaaataaacactgatatcggtcttgaacgcgtttccaacatggaagatatgtacaaggatacgctggaacttttttacaaaaaacttacggcgcaatgcgacgctatgactgaaaagttaaacgcaaaggacgtaaacggatttgcgatttcaatacacgcaatgaaatcccagctggcgactgtaggagcgatgggtttatccgatcttgcgttaagaatggaaacagccgccaaaagcggcgatcttcagttatgcgaacaacgctatccgtctttcaaggagaaaatgttaatcctgcatgatgatttgtcagtcgttttctcggacacgacaacaaaagaaacgtctaaaaagaagggcgaccctgcttccttaaaaataaatattgataaagcgtttgaagccgccaatgattttgacaaggacacaggcgttaacgccttaagcgatttcctaaactatgatttcggcgagcaaaacaacgccgatctgaaaaacgtcattgcggcgtttgaggattttaattttgactctgttaaggaaatattaaacagactgaaatcaaaaatatga

SEQ ID NO: 69814 - protein, 440 aa, Unknown
  Obtained from environmental sample
  DOMAIN (269)...(352): Hpt domain
  misc_feature (1)..(440): Xaa is any amino acid
MNFATALYREEWFYVFSSYGLYERIKPVMEQDNAVFRGGKRPPLALMTEWSTESFIPNVRFISIPIQSLSIANTLNGKSDRQDYFKVSGSTGAVRCTFPYARLLVVDDIATNLKVAEGLLSPYKVKVDTCLSGTEAIELVKQNKYDLIFMDHMMPDMDGVEATSIIRKMGGKYKELTIIALTANAVQGAKEMFLSSGFNGFIPKPIDMREMYRTLKEWLPADKIELKKEEVPEKEQEASEFIYSMKKINEINTDIGLERVSNMEDMYKDTLELFYKKLTAQCDAMTEKLNAKDVNGFAISIHAMKSQLATVGAMGLSDLALRMETAAKSGDLQLCEQRYPSFKEKMLILHDDLSVVFSDTTTKETSKKKGDPASLKINIDKAFEAANDFDKDTGVNALSDFLNYDFGEQNNADLKNVIAAFEDFNFDSVKEILNRLKSKI

SEQ ID NO: 69815 - DNA, 1770 bp, Unknown
  Obtained from environmental sample
  misc_feature (1)..(1770): n is a, c, g, or t
atgcggctgcgtctggcaaccgcagtagacagcgagcttgcccttctgtcgaaaatggcggatacaccggtaattcaggagtattttttaaatcctgctgatccagtcctaaaatttcaggcagacgccgaatttgccatttataaggaacatttcaataataaaataatttattgggttaatgacgtggataaaatattttatacaacaagaaacgctccttatgttatcaaccctgaagatcccaagaattattggtacaatttaacattatacgaaacagagaaacatgtttttaacataaattataatcctgatttggaccaaatatacctttgggtcaatgtcccggtatttgttaaaactgagacaggcaaaatgcctatagggatgattggcacaggcataaatctgactgacttttcaagttttatagcttccagctatagggaattcgatacgcatattacaacatatatgtttaataattatgatgaaataacttcggcggttgattatgaactggttcaaaataaagtccatcttgacgagcaccttggcgaaaccggaaaaaaattaattaaggtagcgcatgagctttttggcggtgaaagccggagcttcatctatgataaaaaaatatatctggtgaactccatcccggcgatgagatggtatttgaccgtaagctatccggtgccgggcttgctgtctctgaaccatgccatgaataccgtatttttcagcatgctatccctcatcctgttcctgttcattataataaatatttatgttgcccgttctgaaaacgcgatagcaaagcaaaatttacagttgattgaggcaaacaaaaaggctgaatccgcttcccgggcaaaaagcgactttctggcgaaaatgagccatgaaatccgcaccccaatgaacgccattacaggcatggcggaactgctgctgaggggagaactttcgagcgaagcgcggggttatgtgcaggatataaaacaggcggggaacaatcttgtctctattattaacgatattctggatctttcaaaaattgaggcgggaaaactggaaattgtttccgccaaatatatgctctcgtctttgatcaatgacaccgtcaacattattcgtacaaagttcaaggaaaaaccaatacggttttttacaaatatcgacggggatattccaaacagccttatcggagacgaagtgcgtctgcgccagattcttcttaacctcctgtccaacgctgtaaaatatacggataaaggttgtataggtttgaccattaccatggaaaaacaggacgataaaaatgtcttgctgaggatggatgtatcagacacaggaaaaggaataaaaccggaacatcaggagaagctttttgacgaatttgtccgagtagacgcgaagaagaaccaaggcattgaaggaacaggtcttgggcttcccattacaagaaggttatgcgccgctatggacggtaaattaagcatggaaagcgaatacggcaagggcagcgtattcacggtaattattccgcagggcgttgaatcggaagagcgtttcgccgaggtggaagagcctgaaaaaaagaaaattcttgtttatgaaggccggactgtctacgctaaatcggtgtgctggtcgctgggaaaacatgaagttccttatacttatgtgacaaatcaaaatgaattttgccaccgcgctgtacagggaagaatggttttacgtgttttccagttacggcctttatga

SEQ ID NO: 69816 - protein, 589 aa, Unknown
  Obtained from environmental sample
  DOMAIN (292)...(357): His Kinase A (phosphoacceptor) domain
  misc_feature (1)..(589): Xaa is any amino acid
MRLRLATAVDSELALLSKMADTPVIQEYFLNPADPVLKFQADAEFAIYKEHFNNKIIYWVNDVDKIFYTTRNAPYVINPEDPKNYWYNLTLYETEKHVFNINYNPDLDQIYLWVNVPVFVKTETGKMPIGMIGTGINLTDFSSFIASSYREFDTHITTYMFNNYDEITSAVDYELVQNKVHLDEHLGETGKKLIKVAHELFGGESRSFIYDKKIYLVNSIPAMRWYLTVSYPVPGLLSLNHAMNTVFFSMLSLILFLFIIINIYVARSENAIAKQNLQLIEANKKAESASRAKSDFLAKMSHEIRTPMNAITGMAELLLRGELSSEARGYVQDIKQAGNNLVSIINDILDLSKIEAGKLEIVSAKYMLSSLINDTVNIIRTKFKEKPIRFFTNIDGDIPNSLIGDEVRLRQILLNLLSNAVKYTDKGCIGLTITMEKQDDKNVLLRMDVSDTGKGIKPEHQEKLFDEFVRVDAKKNQGIEGTGLGLPITRRLCAAMDGKLSMESEYGKGSVFTVIIPQGVESEERFAEVEEPEKKKILVYEGRTVYAKSVCWSLGKHEVPYTYVTNQNEFCHRAVQGRMVLRVFQLRPL

SEQ ID NO: 69817 - DNA, 471 bp, Unknown
  Obtained from environmental sample
  misc_feature (1)..(471): n is a, c, g, or t
atgaaacaagattattcccaatacaaagtaaggggtcattatgataaaaacggagtgcttggcgcgtacttccgcgcgcttatgtggtttggcagaatcaactttaatcttggcggtgaagacagcaatgttagagagatagcaaaacaatatgcccctgtggctctttttattaccgacataacggaaagttcacccgaaataaaaaaaatctggcagtccctttttgatcccattacggagcttattggtatatcagatgatattagtttttatgaactcgctccgctttggaataaaatcaaaggagcaggttttgccggttggtataagaattctgcaaaactcgaaacttttatttcaaaagagtacaaagaactgcgtactcccgtagtttccggttatgctttattcgaagaaaacgaaggaatcgctgatgtcgggaaaaaggagaactccttcctccggtag

SEQ ID NO: 69818 - protein, 156 aa, Unknown
  Obtained from environmental sample
  misc_feature (1)..(156): Xaa is any amino acid
MKQDYSQYKVRGHYDKNGVLGAYFRALMWFGRINFNLGGEDSNVREIAKQYAPVALFITDITESSPEIKKIWQSLFDPITELIGISDDISFYELAPLWNKIKGAGFAGWYKNSAKLETFISKEYKELRTPVVSGYALFEENEGIADVGKKENSFLR

SEQ ID NO: 69819 - DNA, 1005 bp, Unknown
  Obtained from environmental sample
  misc_feature (1)..(1005): n is a, c, g, or t
gtgtcggctccaagagttgagtttcgtactatggtacagggacttgatatcatgaaagttttcggttcaaaaacagcagacaggttgttaaaggaaagcgattatccaaagtatcccggagataaaaaacccggatttgaaaaggtactgaattcgatacagcaaaacatggcgaaaacaaaagacgatttttggttttcgacatattattcaaacattctgtttcagataaaaactctggcgctttttgaaaatggagcgggtttttattttacggaaaaaccgggttggaatttaaaagcaatgaactccgcacacggaacatgggcggaactcaggcatgatacgattctttatgtaaaacaaagttacgccgaaatgtcaggaggaggtccggatataacatttagaaccaaacctcttccgtcgccgatccattatattgagcctaatgtgccgttctggattacttcggctataggaattcaaaagttatatgcggtattggataaatataattttctggacggaaaatcagctcaggttttggcaggtctccatgatatatttgtaaaagctttggaaatttccaaacaagaagctgaagacaaagaaatttccgacgccgatcttgcatggattaaaaatgtcccctatcaactgtcccaccttgtgatagcccttttatcaagcggaagcacgtgggtagacgatccggattcgctgcgcatggcgttagtggcggatgtatttaccaacgcggagagcagaatagtattggaaaccgctgtaggtattccataccgcctttatatccccttgaacgacaaacagggaggaaagcggatcgtgataggttacggtttcagttattacgaattcacccatcccatgtcggacaggcttaataatactcaatggaaagccgttgtatataaagaaaaccctgacatgaaaaactatcttcctttctggatgcagggaaaagttagcccggcgaaatag

SEQ ID NO: 69820 - protein, 334 aa, Unknown
  Obtained from environmental sample
  misc_feature (1)..(334): Xaa is any amino acid
MSAPRVEFRTMVQGLDIMKVFGSKTADRLLKESDYPKYPGDKKPGFEKVLNSIQQNMAKTKDDFWFSTYYSNILFQIKTLALFENGAGFYFTEKPGWNLKAMNSAHGTWAELRHDTILYVKQSYAEMSGGGPDITFRTKPLPSPIHYIEPNVPFWITSAIGIQKLYAVLDKYNFLDGKSAQVLAGLHDIFVKALEISKQEAEDKEISDADLAWIKNVPYQLSHLVIALLSSGSTWVDDPDSLRMALVADVFTNAESRIVLETAVGIPYRLYIPLNDKQGGKRIVIGYGFSYYEFTHPMSDRLNNTQWKAVVYKENPDMKNYLPFWMQGKVSPAK

SEQ ID NO: 69821 - DNA, 858 bp, Unknown
  Obtained from environmental sample
  misc_feature (1)..(858): n is a, c, g, or t
ttgttggttaaacgcgcatttattctgatttttctcgttctttcctgttgcgggaaagaagcgcctgtataccacacatggcagtctctaaaggagatgaaatacggagagactattccccctccgagcgatgaaattccgccgcccgaattctttccgtgggcgggaaccgtaagccatcaccttcttgcccatgaatatattgattcgtggttttcgcgccttgcggaaatgagacaggtgcgctgtttttacattttatgcccttcgcattggggtttttcaacagagcctttttcgttaacaaacggttcatgggtaagtgattttggtcttgttcactcagacaagaaaaaagtgcgcaatctggcaaaaatgttggaagttggttttgacaatagagtgttcgatgttgaacatggagcgtcagtattaatgccgtatatcaaaaaatattttccaaaagcggcggtagtggttgttgcttactcaggcgaggctcccgtgaatgttcctaagagtacaaaacttgcggacgctctggaaaatgcttttgacaaaaatggaaagcgtaaaaattttttgttaatatcaaccgatttttcccatcacggcgatttggaactaacggaaaaaagagacaacgattctatgcgttacttaaaaaatcctattgataattcatgggttacggttggctgcgataacgctccgggaattttcgttcttgaccgtcttggtaaaaaaaatatggagtcttttatactttaccataccgattcatggaaaatctccaacgagtgggaccatgatgttacaagctatttttttgtgtatttgggtgataaaaaactttaa

SEQ ID NO: 69822 - protein, 285 aa, Unknown
  Obtained from environmental sample
  SIGNAL (1)...(18)
  DOMAIN (40)...(279): Protein of unknown function DUF52
  misc_feature (1)..(285): Xaa is any amino acid
MLVKRAFILIFLVLSCCGKEAPVYHTWQSLKEMKYGETIPPPSDEIPPPEFFPWAGTVSHHLLAHEYIDSWFSRLAEMRQVRCFYILCPSHWGFSTEPFSLTNGSWVSDFGLVHSDKKKVRNLAKMLEVGFDNRVFDVEHGASVLMPYIKKYFPKAAVVVVAYSGEAPVNVPKSTKLADALENAFDKNGKRKNFLLISTDFSHHGDLELTEKRDNDSMRYLKNPIDNSWVTVGCDNAPGIFVLDRLGKKNMESFILYHTDSWKISNEWDHDVTSYFFVYLGDKKL

SEQ ID NO: 69823 - DNA, 639 bp, Unknown
  Obtained from environmental sample
  misc_feature (1)..(639): n is a, c, g, or t
atgcgtaaatgcggattatttctttttggggcattgtttttactcatttcctgcaattcaccagaccaaaaaatacataaaaatacaaaacttcaggaatcctatgacacggacaggcttagggatattcttcaatcagccagagagagcattttccgggtttggaatgagggtaaggagccgcctttacctcctattggtacaaacgaaggattggctgtccgccttattgttgacggaaaagaccgcggctgtcttgcgtggtataaaaattcaggcgatatgaatctctttgcggcattctgcgccgcgcaagccctaaacgacccccgttatgagccgcttcgtccgccggaagcgggggatacgttggtggaactgcttatattcggcgaatgggaagatatgtccacacctgaggactttattcccggcagtcacaatctttggctttccgacggctttgacaatacaatccttcaggcttcgctggcagttcaaaggcgctattcaaaaaaagactttctggaaaaaatctgcgttaaagcggggctggataaagacgcatggaagaaaaataaaaaacttatatggcggcgaagccctgcggtttggattgtagagcctttggtaaattaa

SEQ ID NO: 69824 - protein, 212 aa, Unknown
  Obtained from environmental sample
  SIGNAL (1)...(19)
  DOMAIN (38)...(209): AMMECR1
  misc_feature (1)..(212): Xaa is any amino acid
MRKCGLFLFGALFLLISCNSPDQKIHKNTKLQESYDTDRLRDILQSARESIFRVWNEGKEPPLPPIGTNEGLAVRLIVDGKDRGCLAWYKNSGDMNLFAAFCAAQALNDPRYEPLRPPEAGDTLVELLIFGEWEDMSTPEDFIPGSHNLWLSDGFDNTILQASLAVQRRYSKKDFLEKICVKAGLDKDAWKKNKKLIWRRSPAVWIVEPLVN

SEQ ID NO: 69825 - DNA, 966 bp, Unknown
  Obtained from environmental sample
  misc_feature (1)..(966): n is a, c, g, or t
gtgttcagcgcttgccgcgaccagtttaaccgcatgacggttatcaggaaggaagcttatgtcttaaaagacagtttctgcgttatcggctcggacgcgacttctatgacagataacggccttataacctttcaggaaaattatcccaacgtaggcacttacgccgttgccgctaatatgatgctttcaaacgaatttataaccgatacgcctcggtttgtcccggcaataatcgcgttaatatattcattgttattaggttttcttttaagccgtttcgacacacgcctttcaatcattacgggaatatcgggactgttgttattaaccggagctttcgcggtattttttatgataagcaaaatatacataggttttgccgtgccgttatccgcgactgctttaacctttattatgatgattactgttaaattcctgacagcaagccgcgaaaaagcgtttttgcacaacgcgttttcccgctaccttgcccccgaagttattaccgagcttatcaacgatccggacaaacttaacttgggcggcgaaaaaagggaaatgaccgcgatatttacagacattcagggtttctcgacaatttccgaaaaacttgatcctgtccgacttgtccagcttcttaaccgctaccttaccgcgatgagcaatataatcatggaaaatctgggaaccattgacaaatacgaaggggacgcgattatcgcgtttttcggagctcctgttttccgcgaaaaccatccggcccttgcctgccgcagcgcgcttgctatgaaggcggcggaagaagaactgaacaaaaccgtgcttgaagaaaagtttaagccccacaccgatttttacccgcattggaataaccaccggagacatggtagtaggaaacatgggcgcggaaaacaaaatggactacacaataatgggcaacgccgtaaacctggccgcacgtcttga

SEQ ID NO: 69826 - protein, 321 aa, Unknown
  Obtained from environmental sample
  DOMAIN (182)...(310): Adenylate and Guanylate cyclase catalytic domain
  misc_feature (1)..(321): Xaa is any amino acid
MFSACRDQFNRMTVIRKEAYVLKDSFCVIGSDATSMTDNGLITFQENYPNVGTYAVAANMMLSNEFITDTPRFVPAIIALIYSLLLGFLLSRFDTRLSIITGISGLLLLTGAFAVFFMISKIYIGFAVPLSATALTFIMMITVKFLTASREKAFLHNAFSRYLAPEVITELINDPDKLNLGGEKREMTAIFTDIQGFSTISEKLDPVRLVQLLNRYLTAMSNIIMENLGTIDKYEGDAIIAFFGAPVFRENHPALACRSALAMKAAEEELNKTVLEEKFKPHTDFYPHWNNHRRHGSRKHGRGKQNGLHNNGQRRKPGRTS

SEQ ID NO: 69827 - DNA, 543 bp, Unknown
  Obtained from environmental sample
  misc_feature (1)..(543): n is a, c, g, or t
ttgaagaaaagtttaagccccacaccgatttttacccgcattggaataaccaccggagacatggtagtaggaaacatgggcgcggaaaacaaaatggactacacaataatgggcaacgccgtaaacctggccgcacgtcttgagggagtaaacaagcagtaccacacaggcggaatattgataagcgacaacacccgtaataagttaggtgatgaattcctgctgcgccgccttgactgcgtgagagtagtgggcatacacaaaccgctgagattgtatgaactgctggcaaataacagtgaacagataacaaataacaatgaacagataacaaaacttaaagaaatgatagagaagtgggaaaaggcgattgatttgtatgaacagaagcaatttaaggaagcggagaaaatatttacttccattaagcagcaaaaccccaacgacaaagttgcggaactgtacgccggccgctgcgtaaaatacgagacaaacccgccgccggaagactgggacgctgtaaataacctgacggaaaaataa

SEQ ID NO: 69828 - protein, 180 aa, Unknown
  Obtained from environmental sample
  misc_feature (1)..(180): Xaa is any amino acid
MKKSLSPTPIFTRIGITTGDMVVGNMGAENKMDYTIMGNAVNLAARLEGVNKQYHTGGILISDNTRNKLGDEFLLRRLDCVRVVGIHKPLRLYELLANNSEQITNNNEQITKLKEMIEKWEKAIDLYEQKQFKEAEKIFTSIKQQNPNDKVAELYAGRCVKYETNPPPEDWDAVNNLTEK

SEQ ID NO: 69829 - DNA, 1659 bp, Unknown
  Obtained from environmental sample
  misc_feature (1)..(1659): n is a, c, g, or t
gtgaaaaaaaataaaagttttcagacaaaaagcaaaataccaaatatccgctctttgttacctgttatctgttacctgttatttgttctctctccttgtttctctgaaaatgaattctcactgtctcttgcgcctgtttttgaaatacctcaaggcgtcgaacagttgggtcccggcatgggagcggcggcattttttgactggtccttccttgaattaaccaaagattttactcttggcattagcgcgggaggcggtttttcaaacctcgcttctcaggtaggtgaatctttttcagttgttgaaggaaagttagggccttttttaagctggcggccttacagtccgaaaggtatgtttgaccgatgggctttccgggtcggagttaacggcggcgtctacaagtattcaagaggcgatctaagcgatacaaaagcgttgctttcttttaatttaggcgcggaattccgtctcttgccctatatttcattatttgccgaaggcgtttataattaccggttttacaatccgccgaagaatatttcttctgtaaacgccgttttgggattgaaatttaacctttccgagattatgagcggcagggcccgggtaaatgttgaaaaaacgcagcagtaccgcgtatttccggtttcatgggcatggtacgaaaacaaccctatcgcgatgattaaatttacaaacgaggaaccaaacgccataacagacgtaaatctttcattcttcatggaaagctttatgagccagccgtggactttcgcatccctgccgcgcgtcggggcgggagaaagcgtggaacttccggtaacggccttgttcaacgaaatattaattaacctgacggaaaacaccaataccgccggcactatacaaattaaataccggagtttaggggcaaaaaaggaaagcacatcaacggttcttatgccgatatttcaccgtaatgccttcagttgggaagacgacaggcgcgccgcggcttttgtctctccgcgcgacagcgccgtgcgcatattctcgcgttatgtggcaagcgcggtacaggcgcaggaattatcgggagcgccttccgccgcgcctaagaacgtccgctatgccgccgctatgtttgaggctctgcgtttgtacggcataagctatgttgtggttccggcgacatcctacaaaaatctttcagctaacgaagcggctcttgataatgtaagctatccctatcaggcattatactaccgaggcggcgactgtacctacctttcaatcctttattgctcgctccttgaggcgctggacatagaaaccgcgtttataaccgtaccgggacatctctacctcgcttttgaagttggagacaataattggcagaaagccaacaaagacataattgaaattgaaggagacgacggtatacgtcgccgctggcttcccgttgaaattaccatccccggcgaaggctttacccgcgcgtggcggacaggagcgggcgagtggaggcggtacggaaaagacgccgcaatgtacccaatccgcgaagcgtggaaattgtatccccccgttaccgtcaccgcttccggcgaccacccccccgaaatgcccgaagccgcgaacataatacgcgccatggaagccgagctgaaaaaatag

SEQ ID NO: 69830 - protein, 552 aa, Unknown
  Obtained from environmental sample
  misc_feature (1)..(552): Xaa is any amino acid
MKKNKSFQTKSKIPNIRSLLPVICYLLFVLSPCFSENEFSLSLAPVFEIPQGVEQLGPGMGAAAFFDWSFLELTKDFTLGISAGGGFSNLASQVGESFSVVEGKLGPFLSWRPYSPKGMFDRWAFRVGVNGGVYKYSRGDLSDTKALLSFNLGAEFRLLPYISLFAEGVYNYRFYNPPKNISSVNAVLGLKFNLSEIMSGRARVNVEKTQQYRVFPVSWAWYENNPIAMIKFTNEEPNAITDVNLSFFMESFMSQPWTFASLPRVGAGESVELPVTALFNEILINLTENTNTAGTIQIKYRSLGAKKESTSTVLMPIFHRNAFSWEDDRRAAAFVSPRDSAVRIFSRYVASAVQAQELSGAPSAAPKNVRYAAAMFEALRLYGISYVVVPATSYKNLSANEAALDNVSYPYQALYYRGGDCTYLSILYCSLLEALDIETAFITVPGHLYLAFEVGDNNWQKANKDIIEIEGDDGIRRRWLPVEITIPGEGFTRAWRTGAGEWRRYGKDAAMYPIREAWKLYPPVTVTASGDHPPEMPEAANIIRAMEAELKK

SEQ ID NO: 69831 - DNA, 567 bp, Unknown
  Obtained from environmental sample
  misc_feature (1)..(567): n is a, c, g, or t
ttgcgcaatatgctcctattcgtaaccgtcgcgggggtgaccgtcgcggcgatgctgatcggcgtctcccgatccaaggtatccgcaatgccgacgcagcagacgtccgccgtgccgccggttgataccaacagcgtcgacacgtcgtcattatcatcaacatccccactgcctgcgacaccgttgccgacggctacaccggcgacaccatcgcccgccgccaccgcgccgcagacaaaaaccgcgtcaacccaaacggccaagatgctcgcctccgtacccagcataggcagcgtccaagtgctcaacggctgcggcgcggaaggggcggccaaccgcgtggcggacttcctccgctcaaaagggttcgacgtaaaggacatcggcaacgcctccacctggaaccaccagtcaactatggtcatatccagaaccacggacatggggctggccaacggaatcgaaaagctgctcaaaacgggcaaggtggtactgataagaaacggggactcgatgtacgacgtgaccgtcgtcgcggggccggacttcgaggagaagataaagtga

SEQ ID NO: 69832 - protein, 188 aa, Unknown
  Obtained from environmental sample
  SIGNAL (1)...(16)
  misc_feature (1)..(188): Xaa is any amino acid
MRNMLLFVTVAGVTVAAMLIGVSRSKVSAMPTQQTSAVPPVDTNSVDTSSLSSTSPLPATPLPTATPATPSPAATAPQTKTASTQTAKMLASVPSIGSVQVLNGCGAEGAANRVADFLRSKGFDVKDIGNASTWNHQSTMVISRTTDMGLANGIEKLLKTGKVVLIRNGDSMYDVTVVAGPDFEEKIK

SEQ ID NO: 69833 - DNA, 336 bp, Unknown
  Obtained from environmental sample
  misc_feature (1)..(336): n is a, c, g, or t
atgcacagaatgttcttgaacggcaagctgcgagatgttcggataacgggcgtcaaccttgagtacgaaggcagcatcacaatagacgaggactaccttgaacgggcggggattttgcccaacgaggaggtgcacgttctgaacgtgaacacgggcgtccggttgactacctatgttataaagggcgaacggggctccggaatcatggaactgaacgggccggcggcgaggctggggatggtgggcgaccggattatggtgctgacctacgcaatgctcagcccggaggagatcgcggggcacaagccgaccatcgtcagcgtcggggtcaagtaa

SEQ ID NO: 69834 - protein, 111 aa, Unknown
  Obtained from environmental sample
  DOMAIN (1)...(111): Aspartate decarboxylase
  misc_feature (1)..(111): Xaa is any amino acid
MHRMFLNGKLRDVRITGVNLEYEGSITIDEDYLERAGILPNEEVHVLNVNTGVRLTTYVIKGERGSGIMELNGPAARLGMVGDRIMVLTYAMLSPEEIAGHKPTIVSVGVK

SEQ ID NO: 69835 - DNA, 2466 bp, Unknown
  Obtained from environmental sample
  misc_feature (1)..(2466): n is a, c, g, or t
atgagcgacaagagcacggaaatcgctgaaaacgcaacattcggccactttgacgactccgcacgcgagtatgtgatcactgacccgcagacgccgtacccttggatcaactacctcgggaaccaggacttcttctccctcatctccaacactgccggcgggtactgcttctacaaggacgcccggctgcgccgtatcacgcgataccggtacaacagcgtccccgtggacactaacgggcgctacttctacataaacgacggcggcgacgtctggtcgccggggtggaagccggtcaaggcaaccgtcgacggctactcgtgccggcacggcatggggtacacgatcattagcggcggccataacggcataacggccgaggcgctcttcttcgtcccgctaaatttcaacggcgaggtgcatagggtcaagctgaccaatacctccaagggcgccaagaagttcaccctcttctctatggtggagttctgcttgtggaacgctcaggacgactccacgaactaccagcgcaacttgaacaccggcgaggtcgagatcgacgggtcgaccatctaccacaagaccgagtaccgcgagaggcgcaaccactacgccttctacacggtgaacaggcccgttaccggcttcgacagcgaccgcgactccttcacggggcgctacagcggcttcgagcggccggaggcggtcttcgagggcaagtcccgcaactccgcggcggacgggtggtgcccgatagcctctcacagcctcgacatctccttaggcgcgggagagtctacggagctggtcttcgtgcttggctacgtggaggtggacgacaaggagaagtgggcggcgccgggcgtcgtcaacaagaagggcgctttggagatgatcaagcgcttctccacgccggaggcggtgaacaaggcgatggcggagctgcgggcgttctgggacgacctcctctcacgctacacggtgaagagcggcgacgagaagctcgataggatggtcaatatatggaatcagtaccagtgcatagtgacttacaacctgtcgcgcagcgcctcctacttcgagtcgggaatcgggcgcggcatgggcttccgcgactccaatcaggacatcgcgggcttcgtgcaccagctgccggacagggcgcggcagaggattatcgacatagcctccacgcagttcgaggacggcggcgcctaccaccagtaccagccgctcactaagaagggcaataacgaaataggcggcaacttcaacgacgacccgctgtggctcatctactccgtcgcctcctatataaaggagactggcgactgggatatactgaaagagcggacgcccttcgacaacaacccggcctccgcgaaacctctgctcgaccacctgacggcctccttctaccacgtcgtcaacaatttaggcccgcacgggctgccgctgatagggcgggcggactggaacgactgcctcaacctcaactgcttctccaccacgccggacgagtctttccagacctgcacgagcaaggacggcaagacggcggagtcggtgctcatagcgggcatgttcgtctgcatcggcaaggagtacgtgaggattctggagaagctgggcaagagggacgaggcgaaaaaggcggaggggcacatagagtccatgaggaagacaatcctcaccgccggctgggacggcgagtggttcgtgagggcctacgacgactccaagcataagataggcagcaaggagtgcgaggagggcaagatattcatagagtcgcagggcttctgcgtgatggccgaagtaggggtgcaggagggctacgcggccaaggccctggagtcggcgaggaagtatttagacaccgaacacggcctggtgctgctcaacccgccgtacacgaaataccacgtagaactcggcgaggtcagctcctacccgcccggctataaagagaacgccggcatcttctgccacaacaacccgtggataataatagccgagacggtgctgggccaggggaacgaggccttcgggcattacaggaagatagccccggcgtaccgcgaggagataagcgatctgcataggatggagccgtacgtatactcgcagatgatagccggaaaggacgccaagcgccacggggaggccaagaactcgtggctgaccggcacggcggcctggaatttcgtggcggtctcgcagtggatattgggaataagacccgattacgacgggttgatagtcgacccgtgcatcccgtcggattggaaaggcttcacggccgtaagaaaattcagggggatgacaatcaacatcaccgtgaagaacgagagccattcatgcaaaggtgtcaaggtgctgacggtagacggaaacgcgatcccgggaaatgtggttccggtattcacggacgggaaaacgcatgatgtagtggctgttatgtga

SEQ ID NO: 69836 - protein, 821 aa, Unknown
  Obtained from environmental sample
  DOMAIN (12)...(75): Putative carbohydrate binding domain
  misc_feature (1)..(821): Xaa is any amino acid
MSDKSTEIAENATFGHFDDSAREYVITDPQTPYPWINYLGNQDFFSLISNTAGGYCFYKDARLRRITRYRYNSVPVDTNGRYFYINDGGDVWSPGWKPVKATVDGYSCRHGMGYTIISGGHNGITAEALFFVPLNFNGEVHRVKLTNTSKGAKKFTLFSMVEFCLWNAQDDSTNYQRNLNTGEVEIDGSTIYHKTEYRERRNHYAFYTVNRPVTGFDSDRDSFTGRYSGFERPEAVFEGKSRNSAADGWCPIASHSLDISLGAGESTELVFVLGYVEVDDKEKWAAPGVVNKKGALEMIKRFSTPEAVNKAMAELRAFWDDLLSRYTVKSGDEKLDRMVNIWNQYQCIVTYNLSRSASYFESGIGRGMGFRDSNQDIAGFVHQLPDRARQRIIDIASTQFEDGGAYHQYQPLTKKGNNEIGGNFNDDPLWLIYSVASYIKETGDWDILKERTPFDNNPASAKPLLDHLTASFYHVVNNLGPHGLPLIGRADWNDCLNLNCFSTTPDESFQTCTSKDGKTAESVLIAGMFVCIGKEYVRILEKLGKRDEAKKAEGHIESMRKTILTAGWDGEWFVRAYDDSKHKIGSKECEEGKIFIESQGFCVMAEVGVQEGYAAKALESARKYLDTEHGLVLLNPPYTKYHVELGEVSSYPPGYKENAGIFCHNNPWIIIAETVLGQGNEAFGHYRKIAPAYREEISDLHRMEPYVYSQMIAGKDAKRHGEAKNSWLTGTAAWNFVAVSQWILGIRPDYDGLIVDPCIPSDWKGFTAVRKFRGMTINITVKNESHSCKGVKVLTVDGNAIPGNVVPVFTDGKTHDVVAVM

SEQ ID NO: 69837 - DNA, 510 bp, Unknown
  Obtained from environmental sample
  misc_feature (1)..(510): n is a, c, g, or t
atggccatacaattcaaaataaatacgcaaaaagccgttgagagcgttctttggcttatccaaagaggcgaggccaatatgtacaatatttggaagatgctctttgccgccgaaaaatatcatttaaacaaatacggacgcccgataaccggcgacggttatatcgctatgaaatacggaaccgtccccagctggctttacaaccaagccaaaaattatccacggggaatcggcttcataagaagcgaaaactttttatttgcggaacgtccccccataacaatgctcttctcagaatccgatgaagaagccttagaacacggctataacgaatacgccggattaagtttcggcgaggtcatggcaaagaaccacaaggaacctacttggataaaaaactacgaattacgcggtaacaacgaaagcgctccgataccgtttgaagaccttatagactcagattggctgaaagaagacctgacattagattctcattttatggtaatataa

SEQ ID NO: 69838 - protein, 169 aa, Unknown
  Obtained from environmental sample
  misc_feature (1)..(169): Xaa is any amino acid
MAIQFKINTQKAVESVLWLIQRGEANMYNIWKMLFAAEKYHLNKYGRPITGDGYIAMKYGTVPSWLYNQAKNYPRGIGFIRSENFLFAERPPITMLFSESDEEALEHGYNEYAGLSFGEVMAKNHKEPTWIKNYELRGNNESAPIPFEDLIDSDWLKEDLTLDSHFMVI

SEQ ID NO: 69839 - DNA, 483 bp, Unknown
  Obtained from environmental sample
  misc_feature (1)..(483): n is a, c, g, or t
ttgtataatggagggagaatggctgcaccggtagaacatgataaaagacagaaaaagattctggaaaaagcccttgccgtttttatggaagaaggctatgaagacgctacttatcagaaaatagccgataagtgcgggattaccagaacaatactttatctttattttaaaaacaaaaaagaaatatttacctacagcattaaacattttttattaaccattgaggagcatattaattcaatacgcgccaataattcattaagttgtcaggaaaagcttactaaagtgatttttgagatttttaaacttttggaacaaaataataaactggtttctgttttacttgagtatattttgtacattgcaaaaaaagatattaacccggcaacgcgggtacggcgcagagtattaaaacttcagcatattatatcgacaattattattgacggtgtaaaatccggagaactaaaaaaagttacataa

SEQ ID NO: 69840 - protein, 160 aa, Unknown
  Obtained from environmental sample
  DOMAIN (20)...(66): Bacterial regulatory proteins, tetR family
  misc_feature (1)..(160): Xaa is any amino acid
MYNGGRMAAPVEHDKRQKKILEKALAVFMEEGYEDATYQKIADKCGITRTILYLYFKNKKEIFTYSIKHFLLTIEEHINSIRANNSLSCQEKLTKVIFEIFKLLEQNNKLVSVLLEYILYIAKKDINPATRVRRRVLKLQHIISTIIIDGVKSGELKKVT

SEQ ID NO: 69841 - DNA, 1245 bp, Unknown
  Obtained from environmental sample
  misc_feature (1)..(1245): n is a, c, g, or t
atggaaaaaacagaaacagctgtcgccctgtgcgcggtcggcgcggaaaaagttgtctcaaacgaattaaaaaaactgactgacaaagacggaaatccatatatcaaagttgaagattctctttacggcagagtgcgctttcaagcggacaaaaaaggcttgtacaaagcgttaatcggtcttcgcgccgctgatagagtccttcttgaaatcgcaaattttaaagccacagattttgacgctctttttgaaggaaccgccgcggcggaatgggaacggctagtgccgaatggcatggggctgaaagtcgcaaaagtccgcacaaaccgctcgcagttaaaagcggaaacaagtatacagtcaattgttcacaaggcggcggcgcagagactttgcggcaagtataaagtcagccgtcttcctgaacagacaatgacgcgtaagggcgaagacgctcaggtaaaaattgcggaagtgcgggtttacatagagaaagatatagtttccctgcttgtagatttaagcggagagccgctttttaaaagagggtacaggagcgaaggcggagccgcgccgcttagggaaacgactgcggcttctattttgcttttatccggctggaaacggaaatttccgctttacgacccattctgcggttccggcacaattttgatagaagccgcaatgtacgcgtgggacatggctcccgggcttggcagaaattttgccgttcaggatatgttgatagcggactcaaaaacagaacaacaggtacgcgatgaattccgcgcaaaaatcaattttagcggcgcggacgggggacggcttgtcagaatagcgggcagcgacgaagaattgcgttctatatcaatcgcggcttcaacgcgggcgcgtttgcgcgacattgcggagggcagggaaccgcaaagggggattcgcgccgcggataaatccttgggaatggagttaaaagttctgcccatggcgcaggcgcaatccccgtatccggacgcgggcttattgataactaacccgccttacgggaaaaggcttggagaccagtccgcggcggagcagatatacaaggatatggcgggttttgcacaacgtttttcaggctggaaactggcaataataaccgatcatagcggatttgagagctttttcgggaaaaaagcggactcgtgccgtgaaataagtaatggcgcaataccttcctttttttaccaatatgatgtattataa

SEQ ID NO: 69842 - protein, 414 aa, Unknown
  Obtained from environmental sample
  DOMAIN (182)...(410): Putative RNA methylase family UPF0020
  misc_feature (1)..(414): Xaa is any amino acid
MEKTETAVALCAVGAEKVVSNELKKLTDKDGNPYIKVEDSLYGRVRFQADKKGLYKALIGLRAADRVLLEIANFKATDFDALFEGTAAAEWERLVPNGMGLKVAKVRTNRSQLKAETSIQSIVHKAAAQRLCGKYKVSRLPEQTMTRKGEDAQVKIAEVRVYIEKDIVSLLVDLSGEPLFKRGYRSEGGAAPLRETTAASILLLSGWKRKFPLYDPFCGSGTILIEAAMYAWDMAPGLGRNFAVQDMLIADSKTEQQVRDEFRAKINFSGADGGRLVRIAGSDEELRSISIAASTRARLRDIAEGREPQRGIRAADKSLGMELKVLPMAQAQSPYPDAGLLITNPPYGKRLGDQSAAEQIYKDMAGFAQRFSGWKLAIITDHSGFESFFGKKADSCREISNGAIPSFFYQYDVL

SEQ ID NO: 69843 - DNA, 1329 bp, Unknown
  Obtained from environmental sample
  misc_feature (1)..(1329): n is a, c, g, or t
atgaaaaaagataaaaccattatttacaaatgcacttcctgcggacatgaagaatcaaaatggcttggacgctgtcctgaatgcggtgaatggaacaccttgatagaaactattttaaaaaatgaaaactttagtaaacgcagcgcggtaaggaaagacagcggtatggcgcaaaccatgcctctttccgcggtagacccaatggaaggcagccgcattggaagcggcatcggagaacttgatcgcgtactcggcggcggcattatgaaacgatccgccgttcttgtcggcggtgaaccgggaataggcaaatcaactttacttttgcaaaccgccgccgccgcgctgacaaagggacgcgttttgtatgtctccggcgaagagtctgcgggacagttacggttaagggcggacaggctcgggcttagcgcggacaaaaatgttatggagagaattgaaattctctgttccggaaatcttgaagaaattgaaactgtcttaaataaaattaaacccgttcttgttttaattgattccactcagacactttactccgaaaacgccgattccgcgccgggcggcgtaaaccagatgaaattctgctcctttgaattaatctcttgggcgaaagaacatgacgcggctttgattttaacggcgcatgttacaaaagagggagttatatcgggaccaaaaacattggaacacatggtagacaccgttctttattttgaggaaaacgataaaaccgccggattaaacggaaacgccgattgccgatttttgcgggcgtcgaaaaaccggtttggctctacagatgaaatcgggatttttacaatgggagaaaaagggcttacccccgtggaagacacggggcgaatgttccttgtaaggcgcgaaggggaactgcccgccggagtagcgatcgcggcggttcttgaggggacaaggacgatacttgtggaaattcaggcgcttactattcctgcaaaagggacaatcagccgtgttttttccgataaaattgattcgggcagggtttcgcgcattgccgccgctctggaaaagcatttaagccttgaaggaaagcccggattaagactttcggatcaagatttgtatgtaaatgcagccggcggcatcagaataaccgaggttggagtggaattagcccttgcctgcgcgctttattccgccagaacggggcttgcgctgcccgcggatatggcaatcgcgggagaattatcgctaacaggggaaattcgacccatacaccgcccttccaacagggtaaaaaacgcaactgaactgggttttactcatttttaa

SEQ ID NO: 69844 - protein, 442 aa, Unknown
  Obtained from environmental sample
  misc_feature (1)..(442): Xaa is any amino acid
MKKDKTIIYKCTSCGHEESKWLGRCPECGEWNTLIETILKNENFSKRSAVRKDSGMAQTMPLSAVDPMEGSRIGSGIGELDRVLGGGIMKRSAVLVGGEPGIGKSTLLLQTAAAALTKGRVLYVSGEESAGQLRLRADRLGLSADKNVMERIEILCSGNLEEIETVLNKIKPVLVLIDSTQTLYSENADSAPGGVNQMKFCSFELISWAKEHDAALILTAHVTKEGVISGPKTLEHMVDTVLYFEENDKTAGLNGNADCRFLRASKNRFGSTDEIGIFTMGEKGLTPVEDTGRMFLVRREGELPAGVAIAAVLEGTRTILVEIQALTIPAKGTISRVFSDKIDSGRVSRIAAALEKHLSLEGKPGLRLSDQDLYVNAAGGIRITEVGVELALACALYSARTGLALPADMAIAGELSLTGEIRPIHRPSNRVKNATELGFTHF

SEQ ID NO: 69845 - DNA, 399 bp, Unknown
  Obtained from environmental sample
  misc_feature (1)..(399): n is a, c, g, or t
atgtataagtgggtaaaaaaatatatcggtattccctttgtttcaaacggaagaacgcttgccggctgtgattgttacggtcttgtgcgtttagttttgaaaaacgagtacggaattaatttgccggaattatcaaataattacgatgacgcattaaacgtaaaagaaacagctaggctgtttgaagaaaaacttccggtacttgcaggagaaaaaattaacgcaccagaggaaaaagctgtagtggttataactgaacacggcgttactgcccatgtcggtatcgttgccggcggcggttacattctgcataccggaattaaaacaggatcgatctgccaaagagaaactcatccgggtcttcacggccgcatagaggggtattatcatgtccgttaa

SEQ ID NO: 69846 - protein, 132 aa, Unknown
  Obtained from environmental sample
  DOMAIN (10)...(126): NlpC/P60 family
  misc_feature (1)..(132): Xaa is any amino acid
MYKWVKKYIGIPFVSNGRTLAGCDCYGLVRLVLKNEYGINLPELSNNYDDALNVKETARLFEEKLPVLAGEKINAPEEKAVVVITEHGVTAHVGIVAGGGYILHTGIKTGSICQRETHPGLHGRIEGYYHVR

SEQ ID NO: 69847 - DNA, 1773 bp, Unknown
  Obtained from environmental sample
  misc_feature (1)..(1773): n is a, c, g, or t
ttggccgagagaagaatgaatcgcaaatggatggcgggcttttacatttgcggtacggggcaggcgatttccgcgatgattccgtccggcagaagggaaaaagtccctaccctgcccgcaggcgatgaggaaataattccctcgctttcaatatccgacgaacaggcggcggctttaaacgcgataacctctccggtagaaaataccgattccaattccaacctgccgccgatgttctacctttacggcgttacgggatcaggcaaaacggaagtatttcttagagcggctcagtatatgttaaacgaaggaaaatccgttatctatcttgtgcctgaaatatcgcttacccaccaaaccgcgcagatgattggaaaccgtttcggctctcttgccgccaccttacattcgggtatgactccatcaactcgtctttccgaatggatcaggataaaaagcggaaaagcgccgattgtcgtaggaccgcgaagcgcggtattcgctcccgtgcctaatcttggacttatcataatcgacgaagaacacgacggctcatataaatcaggtaacacgccccgctaccacgcgcggcaaatcgcgcttcaccgctgttcaaaagaaggggcgcgtcttgttatgggctccgctactccttcggcagaagcgtggaaacttatgcaggaaggcggcataaaaaggcttgacctttcacgccgtctttctggcggaggaatgccggaaataaaagcggtaagcctcgctaaaaccgaaggctgtctttcaaaagaattaaaagaggaaattctgcttactcatcaaatgggaagacagacgattctttttttgaaccgcagaggtttcgctcatttttatcaatgtcccgaatgcggctgggaacaaacttgcaagcgctgttcggtatcgcttacatggcataaaaagcgcaaccgctgtatttgccactactgcggctacagcgaagcgccgcctaccgtctgccccaactgcggctgtgtggaagcgggctatcgcggcttcggcacggaaatgatcgaggaagaagtgcgccgtactttccccaacctgcgccttcgccgtgttgacgcggacacagcttcaaaaaaaagcggcggcggcggtcttgaggaaacgcttaaattattcaaaaaaggagacatcgacattttgcttggaacgcaaatggtagcgaaagggttaaactttcccggagtgcggcttgtcggcgtagtctttgccgacacaggtctccacctgcccgactttcgcgccgccgagagaactttctctctcattgttcaagtagccggtcgcgccggcagatatttccctgacagcaaagtaattgtgcaaaccctgcgcactgacgaccctgtaattacaaagtcgtgcatattagacgtaaccggcttttttaacgcagagttaaaacaccgccgctccctcggcttcccgccctactcaagacttattcgtttcactatccgcgccaaagaggaagccaaagcgaacgccgctattaaaaagcttgcaagcatcgccgaaaaaatacttcccaaagacgccgacatgctcggtcccgcggaatgtcccatcggcgttataaacaacaattacaggcggcagttaattcttcgcagtccttcaatcggcgcgattcactccatggcgcgcgagcttgtttccctttatgaaaaaggcaaagaaagcaaagcctacctggaaattgatgttgatcctttgagtatgttataa

SEQ ID NO: 69848 - protein, 590 aa, Unknown
  Obtained from environmental sample
  SIGNAL (1)...(24)
  DOMAIN (356)...(449): Helicase conserved C-terminal domain
  misc_feature (1)..(590): Xaa is any amino acid
MAERRMNRKWMAGFYICGTGQAISAMIPSGRREKVPTLPAGDEEIIPSLSISDEQAAALNAITSPVENTDSNSNLPPMFYLYGVTGSGKTEVFLRAAQYMLNEGKSVIYLVPEISLTHQTAQMIGNRFGSLAATLHSGMTPSTRLSEWIRIKSGKAPIVVGPRSAVFAPVPNLGLIIIDEEHDGSYKSGNTPRYHARQIALHRCSKEGARLVMGSATPSAEAWKLMQEGGIKRLDLSRRLSGGGMPEIKAVSLAKTEGCLSKELKEEILLTHQMGRQTILFLNRRGFAHFYQCPECGWEQTCKRCSVSLTWHKKRNRCICHYCGYSEAPPTVCPNCGCVEAGYRGFGTEMIEEEVRRTFPNLRLRRVDADTASKKSGGGGLEETLKLFKKGDIDILLGTQMVAKGLNFPGVRLVGVVFADTGLHLPDFRAAERTFSLIVQVAGRAGRYFPDSKVIVQTLRTDDPVITKSCILDVTGFFNAELKHRRSLGFPPYSRLIRFTIRAKEEAKANAAIKKLASIAEKILPKDADMLGPAECPIGVINNNYRRQLILRSPSIGAIHSMARELVSLYEKGKESKAYLEIDVDPLSML

SEQ ID NO: 69849 - DNA, 552 bp, Unknown
  Obtained from environmental sample
  misc_feature (1)..(552): n is a, c, g, or t
atgaaactccttcttcactgctgctgcgctccctgttccgtctcctgtatccgcagtcttcgcgccgaacaaacagagccgcatttgttctggtacaacccgaatatccacccctacacggaatataaatcccgcagagactgcctgaatgaattcgccaaaagcgaaaatttggcgcttacgtctgttgatgaatacgggctaagggaattcctaaacgaagtccattcacaggacagcgattcaatttcccatccgcagagatgcaaaaaatgttaccgcatgcggcttgaaaaaaccgcttctttcgccaagcaggaaggattttccgcctttagcacaaccttgctgataagcccgtatcaggagcatgaggagataaagcgacaaggcgaagaaacggcggaaaaatacggagttgagtttttatacagggatttccgtccgctcttccgtgaagggcagtctaacgcccgcgaggcgaatatgtacatgcagaaatactgcggctgtgtgttcagcgaagaagagcggtatttggtcgagaaataa

SEQ ID NO: 69850 - protein, 183 aa, Unknown
  Obtained from environmental sample
  SIGNAL (1)...(22)
  DOMAIN (3)...(178): Uncharacterized BCR, COG1636
  misc_feature (1)..(183): Xaa is any amino acid
MKLLLHCCCAPCSVSCIRSLRAEQTEPHLFWYNPNIHPYTEYKSRRDCLNEFAKSENLALTSVDEYGLREFLNEVHSQDSDSISHPQRCKKCYRMRLEKTASFAKQEGFSAFSTTLLISPYQEHEEIKRQGEETAEKYGVEFLYRDFRPLFREGQSNAREANMYMQKYCGCVFSEEERYLVEK

SEQ ID NO: 69851 - DNA, 312 bp, Unknown
  Obtained from environmental sample
  misc_feature (1)..(312): n is a, c, g, or t
atgtacacattaaaatattctgcctttttccgtgatgaattaagagccgcgatacaatatattagacaaaatttgaaaaatcccagtgccgctgaaagattaaaagaagaaacaaaaaagacctataaaaaaataaaagaaaatccttttttgtatccggcagtacccgatgaatatttggcatctaaaggatttagatttactatggtaaaaaattatatgttattttataaagttaaagaaaaacaaataaatatagatcgttttttatatggatacagagactggatgaatctcctggataatccatga

SEQ ID NO: 69852 - protein, 103 aa, Unknown
  Obtained from environmental sample
  DOMAIN (4)...(96): Plasmid stabilisation system protein
  misc_feature (1)..(103): Xaa is any amino acid
MYTLKYSAFFRDELRAAIQYIRQNLKNPSAAERLKEETKKTYKKIKENPFLYPAVPDEYLASKGFRFTMVKNYMLFYKVKEKQINIDRFLYGYRDWMNLLDNP

SEQ ID NO: 69853 - DNA, 867 bp, Unknown
  Obtained from environmental sample
  misc_feature (1)..(867): n is a, c, g, or t
atgcctaaatatgtactggcgctggatcaggggacaaccagttcgcgcgcgattttgtttgatcaggaacaaaatatcgttgctcaggaacagaaagagtacacgcagatttatccccgcgagggctgggtcgagcatgatcccatggagatatattcatctcagtatggggtgatgatggagttaatggcgcggcaaaacattgcgccggcggatatagccgcgattggcattgccaaccagcgggaaacaacgattctgtgggaaaaggcgagcggcaggcccatttataacgctatagtctggcagtgccgccgcacggccgccattgtggattcgctggttgaagccgaccttgccgatcatatcaaaaaaaccacgggtctggtgccggacgcttatttttccgggacaaaaattaaatggattcttgaccatgttgaaggggcgcggaacaaggcccgtaacggagaaatcctttttggcacggtggactcctggcttatctggaaattgtgcggacttcatctgaccgattacaccaatgccagccgcaccatgttattcgacattcacaaactggattgggatgacactttgcttgcttccctggacataccacgctccatgctgcccgaagtgcggccttcaagcgcggtatacggggaggccgttattcagggtacaaagattcccattaccggcgttgccggggatcaacaggcggcgctgttcgggcagggctgctttgaaaagggacaggcgaagaatacctacggaaccggctgtttcttgctgatgaataccggaaacagcgccgccgccagcgccaacgggcttttaaccaccgttgccgcggggctttga

SEQ ID NO: 69854 - protein, 288 aa, Unknown
  Obtained from environmental sample
  DOMAIN (4)...(246): FGGY family of carbohydrate kinases, N-terminal domain
  misc_feature (1)..(288): Xaa is any amino acid
MPKYVLALDQGTTSSRAILFDQEQNIVAQEQKEYTQIYPREGWVEHDPMEIYSSQYGVMMELMARQNIAPADIAAIGIANQRETTILWEKASGRPIYNAIVWQCRRTAAIVDSLVEADLADHIKKTTGLVPDAYFSGTKIKWILDHVEGARNKARNGEILFGTVDSWLIWKLCGLHLTDYTNASRTMLFDIHKLDWDDTLLASLDIPRSMLPEVRPSSAVYGEAVIQGTKIPITGVAGDQQAALFGQGCFEKGQAKNTYGTGCFLLMNTGNSAAASANGLLTTVAAGL

SEQ ID NO: 69855 - DNA, 630 bp, Unknown
  Obtained from environmental sample
  misc_feature (1)..(630): n is a, c, g, or t
ttgccgcggggctttgacaaaaaagttcagtacgcgctggaaggttcggtctttacaggcggcgcggttatccagtggcttagggatgaaatgcgccttatcaccgacagcgcggacagcgagtattttgcgtccggcgtaaaagacacgggcggcgtttaccttgttcctgcttttacaggtttaggcgcgccgtattgggacatgtatgcgcgcggctgtatcgtaggaataacaaggggaacaaaacgcgcccacataataagggctgcgcaggaatcaatcgcgtatcaggtcatggatcttctgcacgcgatggaaaacgatttgggaataaaattgaaggaaatgaaagtagacggcggagcgagcagggacaagttccttatgcagttccaatccgatatttgcggcatctctcttgtgcggccgctggtaaaagaaacgacagcgttgggagccgcccagcttgccggaattaccgtgggtttctggaaagaccaaaatgaagtaaaaaaactctggcagaaacaagccgtgtttgaaacaatgatggacgagaaaaaacgggaagaattaatcgacggctggcacaaggctgtaggcagaagccgaggctgggctcaataa

SEQ ID NO: 69856 - protein, 209 aa, Unknown
  Obtained from environmental sample
  DOMAIN (1)...(191): FGGY family of carbohydrate kinases, C-terminal domain
  misc_feature (1)..(209): Xaa is any amino acid
MPRGFDKKVQYALEGSVFTGGAVIQWLRDEMRLITDSADSEYFASGVKDTGGVYLVPAFTGLGAPYWDMYARGCIVGITRGTKRAHIIRAAQESIAYQVMDLLHAMENDLGIKLKEMKVDGGASRDKFLMQFQSDICGISLVRPLVKETTALGAAQLAGITVGFWKDQNEVKKLWQKQAVFETMMDEKKREELIDGWHKAVGRSRGWAQ

SEQ ID NO: 69857 - DNA, 306 bp, Unknown
  Obtained from environmental sample
  misc_feature (1)..(306): n is a, c, g, or t
ttgtgccagccgtcgattaattcttcccgttttttctcgtccatcattgtttcaaacacggcttgtttctgccagagtttttttacttcattttggtctttccagaaacccacggtaattccggcaagctgggcggctcccaacgctgtcgtttcttttaccagcggccgcacaagagagatgccgcaaatatcggattggaactgcataaggaacttgtccctgctcgctccgccgtctactttcatttccttcaattttattcccaaatcgttttccatcgcgtgcagaagatccatgacctga

SEQ ID NO: 69858 - protein, 101 aa, Unknown
  Obtained from environmental sample
  misc_feature (1)..(101): Xaa is any amino acid
MCQPSINSSRFFSSIIVSNTACFCQSFFTSFWSFQKPTVIPASWAAPNAVVSFTSGRTREMPQISDWNCIRNLSLLAPPSTFISFNFIPKSFSIACRRSMT

SEQ ID NO: 69859 - DNA, 1278 bp, Unknown
  Obtained from environmental sample
  misc_feature (1)..(1278): n is a, c, g, or t
atgaaatactttaattcggcgaatcttgcaataatagcctgccccgggggcgagactttcgcagatgaagtaatttcccatttaaagcaaaaataccgccataatcacgcgcagatcatatataagcttgcccagcggtttaatcttaccgaagaacaagttgagttacagattgatatagtcaacagaatcgttacccacagtcctaacgcgcagagcgggaacgacatacataacaaccaatttaaggttcctgtaaaatttaccctgtttccgaacggggagataaaatcagaagtgcaggaatcaatacgcggaaaggacgtgtatatttttcaggatgttgaaaaccactatcccgtaaaattttctacgggcgttgtaaacaatctttctacaaacgatcaccttatgacagtttttgtaacgattgacgccgtccgtcaggcgggagccgagcgtatcacacttgtcattcccaactacccgtattcaagacagcacaaggcaaaaggcagagaaggattaaccgcgagccgcataggaaaaatttttgaaagcctgggagtaaaccacattattacccttgatatccattcaagagatattacaaacgcctttgataaaatgcggcttgaaaaccttcacgccagttaccagataattcatactttatcaaaaatgaacggaattctaaacgacgattttgtcgttgtatcccctgacacaggcgcggtagaccgtaataaattttacgcttcagcgcttaaaaaacctctggcgctcttgtataaggaaagagattattcaaaaatcagcaaagacgcgacccaaaccaacatttcacagatacgcctgttgggaaatgtacaggacaaaaccgttttcatggcggacgatcttcttgggacgggcggtactttgattaaaggcatgaggcatctgaaagaaaacggagcgcgcaagattatatgttctatcagcctgccgcttttttcggggaacgcgatttctcattttgacgaggcatacagcgaagggcttttttaccgcatcatagggacaaacgcggtttatcaggaagaagtcttaaaacgcgaatggtatattaatgtaaacatttcacggcttttcgcgcatgtaatttcgcgccttcatcaaaatcaatctgtttccagtctgctggacaatgccgcgattattaaccgcctggtttcccaaaccctgcttcccgagtcacagaacgaattgccgttcaatcaaaccgacgttgaatga

SEQ ID NO: 69860 - protein, 425 aa, Unknown
  Obtained from environmental sample
  SIGNAL (1)...(21)
  DOMAIN (208)...(343): Phosphoribosyl transferase domain
  misc_feature (1)..(425): Xaa is any amino acid
MKYFNSANLAIIACPGGETFADEVISHLKQKYRHNHAQIIYKLAQRFNLTEEQVELQIDIVNRIVTHSPNAQSGNDIHNNQFKVPVKFTLFPNGEIKSEVQESIRGKDVYIFQDVENHYPVKFSTGVVNNLSTNDHLMTVFVTIDAVRQAGAERITLVIPNYPYSRQHKAKGREGLTASRIGKIFESLGVNHIITLDIHSRDITNAFDKMRLENLHASYQIIHTLSKMNGILNDDFVVVSPDTGAVDRNKFYASALKKPLALLYKERDYSKISKDATQTNISQIRLLGNVQDKTVFMADDLLGTGGTLIKGMRHLKENGARKIICSISLPLFSGNAISHFDEAYSEGLFYRIIGTNAVYQEEVLKREWYINVNISRLFAHVISRLHQNQSVSSLLDNAAIINRLVSQTLLPESQNELPFNQTDVE

SEQ ID NO: 69861 - DNA, 666 bp, Unknown
  Obtained from environmental sample
  misc_feature (1)..(666): n is a, c, g, or t
atgaaagtatttaaacttcccgccgaattgacggctcccgcgcttctctttgacatggacagcaccctctacacccatgacgaatacgcgaaaacccagatcgatctgccaataaaacgccttgcggaaaaaaaaggaaaaacatttgaacagatgaatgacgaagttacccagtaccggaaaaactgggcgcaaaaccataacgggcaggctgtcagtctttcaaatacatttttggcgttcggcgtttctatcgaagaaaatatcagttggagagatgaattgctcaggccggaagactaccttaaacctgacaaccagcttcgatgtgttcttcaggtattggcttcccgtttcagccttgcggttgtcaccaataacacggtatcaattacggtacgcacactctctgttttgggaatagacgacataataaaaaacattgtaggtcttgacacagtaaaagcttcaaagcccgataaaattcattttttaaaagcggctgatctttgcggaacatccgcagaacaatgtatttccataggagatcgatatgatatagatattgcccttccgttggaaatgggaatgggaggaattcttgtagataatgtcgaggacgtatacaaactgccggatttgttcgcttccggcaacgccgtttaa

SEQ ID NO: 69862 - protein, 221 aa, Unknown
  Obtained from environmental sample
  DOMAIN (12)...(205): haloacid dehalogenase-like hydrolase
  misc_feature (1)..(221): Xaa is any amino acid
MKVFKLPAELTAPALLFDMDSTLYTHDEYAKTQIDLPIKRLAEKKGKTFEQMNDEVTQYRKNWAQNHNGQAVSLSNTFLAFGVSIEENISWRDELLRPEDYLKPDNQLRCVLQVLASRFSLAVVTNNTVSITVRTLSVLGIDDIIKNIVGLDTVKASKPDKIHFLKAADLCGTSAEQCISIGDRYDIDIALPLEMGMGGILVDNVEDVYKLPDLFASGNAV

SEQ ID NO: 69863 - DNA, 690 bp, Unknown
  Obtained from environmental sample
  misc_feature (1)..(690): n is a, c, g, or t
atgaaaaaatttaatgaaaaaactgctttctccaacgtgccgaaggatgaaagaccccgagaaaaactgttgtcaggcggtccggcttctctttccgacagcgaactgctggctgttcttttgaacaccggtattcagggaaaagacgtaaaagcgctcgccggcgatttgctcggctttctggacgataacaaggacattccatccgtagaggaaatttcctctttgtcggggattgggcagtccaaggcgtgtgctgtcgccgcaatgctggaattcggcagaagacgctatggagctttttccatgcggattaaaaaacctgtcgatattttcactcttgtgcggcactatgcggatcgcaaacaggagaggtttatcagtctctcgctgaacggcgctcacgaggtgattgcggtgcgggttgttaccatcgggcttgtaaacaaaacaatcgtccacccgcgcgaagtgtttgccgacttgattcaggacagggcggcggctttttgcgttgcgcataaccatccgtcgggacagcttgcaagctctcctgaagacgacgatataacggatcggcttcaggacgcggcgaaaattctggggcttcattttgtagaccacattattttttcgcagaccgcgtggtggagttttagggagaacggaaaattgacagacgggtattga

SEQ ID NO: 69864 - protein, 229 aa, Unknown
  Obtained from environmental sample
  DOMAIN (102)...(225): RadC, DNA repair protein
  misc_feature (1)..(229): Xaa is any amino acid
MKKFNEKTAFSNVPKDERPREKLLSGGPASLSDSELLAVLLNTGIQGKDVKALAGDLLGFLDDNKDIPSVEEISSLSGIGQSKACAVAAMLEFGRRRYGAFSMRIKKPVDIFTLVRHYADRKQERFISLSLNGAHEVIAVRVVTIGLVNKTIVHPREVFADLIQDRAAAFCVAHNHPSGQLASSPEDDDITDRLQDAAKILGLHFVDHIIFSQTAWWSFRENGKLTDGY

SEQ ID NO: 69865 - DNA, 687 bp, Unknown
  Obtained from environmental sample
  misc_feature (1)..(687): n is a, c, g, or t
atgatcgtaactataaaagacctctggaaaatctaccctatgggcggccttgaagttcaagccctaaaaggcataaaccttgaaatttccgaaggcgatttcgtcgctgtagccggtccttccggctcgggaaagaccaccttaatgaacatcatcggtttaatcgacagcttcagccggggcagtcttacaattaacaatctggaaattaaatcccaaagaagaagggaacttgcccgtctccgccgcgatcttttaggctttattttccagtcttttaacctcctgcctgtcttaaatgtttttgaaaatgtggaactgccgcttattatctccggcaaaggcggaacaaaggcgcagaggcgggacagggtagattatttgctggaagaagtagggcttgcggacagaagccgccatattcccacggaactttccggcggacagcagcagcgcgtcgctatcgcgcgggcgttggctacaagtccaagaatcgttattgcggatgaacctaccgctaaccttgattcgggaacaggcgaaaaagttttaagccttatgaagcagataaaccgcgatgaaaaaaccacgtttatcttttcaacgcacgatcctgaaatttggaaaatggcggatcatgttatcttcttgcaggacggccttataaaatcggagcaaaggcagtaa

SEQ ID NO: 69866 - protein, 228 aa, Unknown
  Obtained from environmental sample
  DOMAIN (32)...(220): ABC transporter
  misc_feature (1)..(228): Xaa is any amino acid
MIVTIKDLWKIYPMGGLEVQALKGINLEISEGDFVAVAGPSGSGKTTLMNIIGLIDSFSRGSLTINNLEIKSQRRRELARLRRDLLGFIFQSFNLLPVLNVFENVELPLIISGKGGTKAQRRDRVDYLLEEVGLADRSRHIPTELSGGQQQRVAIARALATSPRIVIADEPTANLDSGTGEKVLSLMKQINRDEKTTFIFSTHDPEIWKMADHVIFLQDGLIKSEQRQ

SEQ ID NO: 69867 - DNA, 705 bp, Unknown
  Obtained from environmental sample
  misc_feature (1)..(705): n is a, c, g, or t
atgagtaaaacactaaaacgcttttttgctgtcttttttatcactttttttgttgtattttttgcaatntcctgcgccggaggggcgaaaatcgcttccaccggtctgggaaaggctgcggatccggttccttttatggaaaacgccagaactggtctgcttccatccggccttcgctattaccttctggaaaatacccagcctgagggaagggcttttctgactctggcggtaaacgccggatcggttctggaaaacgagaatgaacgcgggctggcccattttgttgaacacatggcctttaacggcaccgccaggtttgccaaatcggagctgataaattacttacgttctttgggtatgcgcttcggcccggagataaacgcatatacgtccttcgacgaaacagtttacggcattgaagttcctgttgaaacaggttcaggcggccgaaaaactgtccccgctatggctttagcggttcttgacgactggtgccacagcatcacttttgatgcggaagaggtagacaaggaacggcttgtggtaatggaagaataccgctcgcgcctgggagcgcaggaacgcgtaaacaggcaaatttatcctgttatattcaaaggttcgccgtatgccgacaggctccccatcggtcttcctgaggtaatagagaacgcacctgcggcaacgcctctgccaatctga

SEQ ID NO: 69868 - protein, 234 aa, Unknown
  Obtained from environmental sample
  SIGNAL (1)...(26)
  DOMAIN (60)...(215): Insulinase (Peptidase family M16)
  misc_feature (1)..(234): Xaa is any amino acid
MSKTLKRFFAVFFITFFVVFFAXSCAGGAKIASTGLGKAADPVPFMENARTGLLPSGLRYYLLENTQPEGRAFLTLAVNAGSVLENENERGLAHFVEHMAFNGTARFAKSELINYLRSLGMRFGPEINAYTSFDETVYGIEVPVETGSGGRKTVPAMALAVLDDWCHSITFDAEEVDKERLVVMEEYRSRLGAQERVNRQIYPVIFKGSPYADRLPIGLPEVIENAPAATPLPI

SEQ ID NO: 69869 - DNA, 912 bp, Unknown
  Obtained from environmental sample
  misc_feature (1)..(912): n is a, c, g, or t
atgaagcttattaccagatcagactttgacggcttggcttgcggagctcttttgtcgtatttagggcttattgaagagtggaaatttgtccacccgaaggatattcaggacggtcttgttgaagccacagataacgatattttggcaaatatcccatacattaaaggctgtaaactttggtttgatcaccattccagcgaatctgagcgtttaggcaaaagcgcttattttgagggcgtatcaaaacaagctccaagctgcgcccgtgtagtttatgaatattacggcggcgacgccaaattgggcaaatttgccgaaatgatacactatgttgacaaagtagattcaggcgaccttaccaaagatgaaattcaggacccgaaaggctggatattgttaggctttattatggacccgcggacaggacttggacgtttcagaaattttacgattagcaattacgatttaatgacaactctcgcgaaagcctgcgctgaaaaaacaatttacgaaatattggaaatgcccgatgttaaagaacgccttgatttttattatcaacaaaaagaactttttattgacatggtaaaaaaacacgccaaagtaatagataatatcataaaggtcgatttaagagacgtagagacgatctatgccggaaatcgttttattatctatacactttatcccgagcaaaatatttctatctggattgttgacggtcgtaataaatccaatgtcgccattacagtcggtcatagcataacaaaccgcacctcaaacacggatgtaggctctatgctgctttattacggcggcggcggtcataaacaggttggaacttgtcaggttgattacaatggcgctgataaaactattgacgaaataatcaagaaaattaagcaaagctaa

SEQ ID NO: 69870 - protein, 303 aa, Unknown
  Obtained from environmental sample
  misc_feature (1)..(303): Xaa is any amino acid
MKLITRSDFDGLACGALLSYLGLIEEWKFVHPKDIQDGLVEATDNDILANIPYIKGCKLWFDHHSSESERLGKSAYFEGVSKQAPSCARVVYEYYGGDAKLGKFAEMIHYVDKVDSGDLTKDEIQDPKGWILLGFIMDPRTGLGRFRNFTISNYDLMTTLAKACAEKTIYEILEMPDVKERLDFYYQQKELFIDMVKKHAKVIDNIIKVDLRDVETIYAGNRFIIYTLYPEQNISIWIVDGRNKSNVAITVGHSITNRTSNTDVGSMLLYYGGGGHKQVGTCQVDYNGADKTIDEIIKKIKQS

SEQ ID NO: 69871 - DNA, 1299 bp, Unknown
  Obtained from environmental sample
  misc_feature (1)..(1299): n is a, c, g, or t
atggcaggcgagcgaaaaaaaattattgtagtagacgacaatccggaaaatctgaatgttctaaaaaataccatgaaagagctttacatggtatatccctgcccctcagcggcgcagatgtttgaactgcttacgcatgtcaaaccggatttaattctcctggacgtagaaatgccggagatgaacgggtatgaagccataaaaaaacttaaaaacagcagtataaccaaggaaatacccgttatattccttacgtcaatgacggacgcgcagagcgaattggaaggattaagctacggcgccgttgactatatacgaaagcccttcgtaactccnctattgctccagcgcataaaaacccagctttctattctggaacagcagaatgaaatcaggcatcttcttgacttaaaaacggaagaagttaaaatgcgcgaagcggccgagcatgaggcggaaagcgcctctcaggccaagggcgacttcctttcccacatgagccatgaaataaggtccccgttaaacgccgtaataggaatgataaacatcgccaacgaggaaaaaacccttgaaggcgtaaaagtttatcttgaaaaagcggagaacgcggcaaagcatgtgttaggcgtcataaacgacattcttgacatgtctaaaatcgaggcgaacaagcttgagctttccgacagcgaatttgatttcccgaagatgatgacgaacattgtggacgtaacgggcataaaagcgcaggaaaaacacatacagatagaaaccgatatcagcaaggatattccggttgtcgtaatctgcgacgaattacggctggcgcaggttattacaaaccttatgaccaacgcgataaaatttacgccggataacggcaagataaagttgaacgcgcaaaagctggaagaaaaggaagatgaagttactataagaattgaagttgcggactccggcatagggatttcgccggaacagcaggcaaaacttttctcggcttacaatcaggccgaccgcaccatctcgaaacaattcggcggcacggggcttgggcttgccatttccaaacgtattatcgagcttatgcagggaaagatttggattgaatcggaactgggcaagggcgcgaaatttatttttaccttaaaaatgaaaaagggaaaacccgtcgcggcctcggccgagacttcagcttccgcttcagccgaagcccccaacccacagtcccagcataaaagctacggatctgcatttacagggttataccatattggcggcggaagacatggactttaa

SEQ ID NO: 69872 - protein, 432 aa, Unknown
  Obtained from environmental sample
  DOMAIN (158)...(223): His Kinase A (phosphoacceptor) domain
  misc_feature (1)..(432): Xaa is any amino acid
MAGERKKIIVVDDNPENLNVLKNTMKELYMVYPCPSAAQMFELLTHVKPDLILLDVEMPEMNGYEAIKKLKNSSITKEIPVIFLTSMTDAQSELEGLSYGAVDYIRKPFVTPLLLQRIKTQLSILEQQNEIRHLLDLKTEEVKMREAAEHEAESASQAKGDFLSHMSHEIRSPLNAVIGMINIANEEKTLEGVKVYLEKAENAAKHVLGVINDILDMSKIEANKLELSDSEFDFPKMMTNIVDVTGIKAQEKHIQIETDISKDIPVVVICDELRLAQVITNLMTNAIKFTPDNGKIKLNAQKLEEKEDEVTIRIEVADSGIGISPEQQAKLFSAYNQADRTISKQFGGTGLGLAISKRIIELMQGKIWIESELGKGAKFIFTLKMKKGKPVAASAETSASASAEAPNPQSQHKSYGSAFTGLYHIGGGRHGL

SEQ ID NO: 69873 - DNA, 369 bp, Unknown
  Obtained from environmental sample
  misc_feature (1)..(369): n is a, c, g, or t
atgggtgacaagaaaaaaattgtagcggtggacgacaacccggaaaatctgggcgttcttaaaaacactttaaaagaaaaatacacggtatttcccgtcccctccgcgccggaaatgtttgacctgttggggcacgttaaaccgaatttaatacttttagacgtggaaatgccgggaatgagcgggcatgaagcggcgcaaaagctgaaagccgatgacaattttaaggatattccatttatattcctgacttccagggacgacgaggagagcatcaagaaagggttcagtctgggcgcgattgattatataccaaaaccaattgtggcgacggttctgattgaacgtatagaaaagcatttatcataa

SEQ ID NO: 69874 - protein, 122 aa, Unknown
  Obtained from environmental sample
  DOMAIN (5)...(118): Response regulator receiver domain
  misc_feature (1)..(122): Xaa is any amino acid
MGDKKKIVAVDDNPENLGVLKNTLKEKYTVFPVPSAPEMFDLLGHVKPNLILLDVEMPGMSGHEAAQKLKADDNFKDIPFIFLTSRDDEESIKKGFSLGAIDYIPKPIVATVLIERIEKHLS

SEQ ID NO: 69875 - DNA, 855 bp, Unknown
  Obtained from environmental sample
  misc_feature (1)..(855): n is a, c, g, or t
gtgtttatggaccacatgatgcccggaatggacggcatagaaacggccgacaacatccgcgctttaggcactgaatacgccaggaagatacctattatagcccttaccgccaacgccatacagggaaccgaaaaaatcttcttcgagcacgatttccaggcgtttgtgaccaaacccatagacgtaacggagatggactctgtcttaagaaaatggctgtatgaccccaaacgcgagggcactgttctttccgagcctgccgcggctgaagaagaagagattaatataaatatagagataccgggagtggacgtgaataaagctctttccctgtacaacggggataagagtatttatctgcccctcttgcgctcatacataacaaacacgcccgaaactttggaaaaacttaaaaatgtaacggcagagaacctgccaagctatgttatttccgtacacgggttaaaaggaacaagcgccggcataggagccgaaaatatacggataatggcgctggaactggaaaacatgtccaggggcggcgacttgcagggcgttttatcaaagaacggcaaacttatcgccgaaacggaaatcattgtaaacaatgttaaaaagtggctggaagaaaacgacgttcaagcggaaaaaccgcgcttganatcccccgacaaggaaattcttgccaagcttagggaaagctgtgaaagttacgacatggacggcatagacgaagccatgaaatcgctggaaagctatgactacgatgaanacgccggcccttgtaaatggataagggaaaaaatcgacatgtccaaaatgggcgaagtggcaaaacggctgtcagaaatataa

SEQ ID NO: 69876 - protein, 284 aa, Unknown
  Obtained from environmental sample
  DOMAIN (121)...(196): Hpt domain
  misc_feature (1)..(284): Xaa is any amino acid
MFMDHMMPGMDGIETADNIRALGTEYARKIPIIALTANAIQGTEKIFFEHDFQAFVTKPIDVTEMDSVLRKWLYDPKREGTVLSEPAAAEEEEININIEIPGVDVNKALSLYNGDKSIYLPLLRSYITNTPETLEKLKNVTAENLPSYVISVHGLKGTSAGIGAENIRIMALELENMSRGGDLQGVLSKNGKLIAETEIIVNNVKKWLEENDVQAEKPRLXSPDKEILAKLRESCESYDMDGIDEAMKSLESYDYDEXAGPCKWIREKIDMSKMGEVAKRLSEI

SEQ ID NO: 69877 - DNA, 1713 bp, Unknown
  Obtained from environmental sample
  misc_feature (1)..(1713): n is a, c, g, or t
gtgctggctcaatttccggacctcatgtacacaaaggacaaagatttaagatatacgcaatgcaaccatgcctatgaaaaatttatgggcgcaagcgaagaaatactgctgggaaaagccaacagcgacgggacctggtttccagccgaagacgttgataagattcagcttaccgacgaaatcgtaattaatgaaaacaggataatttcccatgaaacaagaatccactctcccgcgacagggaaagaaggcttttatgaaaccgttaaagccccgctgatacgggaagggaaggtcgtagggatagtttccattattcgcgacgtgaccaaacgcaaagagatggaaagggatctgtccctgcagacttcattgtttaagactatgctcagttccctccccgacgccgtattctgcaaaaacctggatttcaagtacaccttatgcaacaactatctggcggatttagtaggcaagcaaattgaggaaatgcttggcaaggatgatattgccgccctggggctgtctgccgaaacggcgaaaatttcttttgaaaacgacttaaaagtcgtgaacgaacaagaacgcgtagcttatgaagaaccgattccatgcgcggacggcgttacgcggctttttgaaaccgtaaaatctccgcttatactggacggcgacgtagtaggcattatggcgatagggcgcgacataacccggcgcaaagaaatggaagaggaagcccttgccgccaaccgcgccaaatcatccttccttgccaatatgagccatgaactgcgaacgccgcttaacgtggttatagggcttaccgatttaacgcttgaggaagatttggaaaccagcacaaaggaaaatctggtaaagataaacaacgcgggcacgacgcttttgagcatcgtaaacgacatccttgacttctcaaaaatcgagtccggcaaacttaccttgtcgcctgttgaatattatttgtcaagcttaattaacgacattatcacccttgtccttacccgcctgggggaaaaacccattaagttcaaattgaacattaaagacgatcttccgaacaaactcttaggcgacgatttacgcgttaaacaagtacttacaaaccttctaaccaacgctattaaatacacccgcgagggaagcatagagcttatcatgcgctccacgaagataaacgacaaagtctggctggacgccgccgtctgcgacacgggcatgggcatcccggaagaagacatctcaagcctgttccttgatttttatcaggtttcctcaaacgccacacgcaacattgagggcacggggttgggccttgcgattaccaaaaagctcgtggaaatgatggaaggggaaataggagtcgccagcgagtacgggaaaggctcaactttcagtttccgtataaagcagggttttgtagacgattctgttctgggggcggaagtttccgagaaactccgcacgttcaacttcttcgacgacaaacgcgttgtttccaaaaaactgataagggtgaatctaagttatgtcagagtgcttgtcgtagacgacatgcagaccaacctggacgtcgccgccggaatcttgcgcaaatacaagatgcaggtagacttattaaccaacggacctgccgcgattgacaggatacgctgtgggactcctgtttcgatctggtgtttatggaccacatga

SEQ ID NO: 69878 - protein, 570 aa, Unknown
  Obtained from environmental sample
  DOMAIN (252)...(317): His Kinase A (phosphoacceptor) domain
  misc_feature (1)..(570): Xaa is any amino acid
MLAQFPDLMYTKDKDLRYTQCNHAYEKFMGASEEILLGKANSDGTWFPAEDVDKIQLTDEIVINENRIISHETRIHSPATGKEGFYETVKAPLIREGKVVGIVSIIRDVTKRKEMERDLSLQTSLFKTMLSSLPDAVFCKNLDFKYTLCNNYLADLVGKQIEEMLGKDDIAALGLSAETAKISFENDLKVVNEQERVAYEEPIPCADGVTRLFETVKSPLILDGDVVGIMAIGRDITRRKEMEEEALAANRAKSSFLANMSHELRTPLNVVIGLTDLTLEEDLETSTKENLVKINNAGTTLLSIVNDILDFSKIESGKLTLSPVEYYLSSLINDIITLVLTRLGEKPIKFKLNIKDDLPNKLLGDDLRVKQVLTNLLTNAIKYTREGSIELIMRSTKINDKVWLDAAVCDTGMGIPEEDISSLFLDFYQVSSNATRNIEGTGLGLAITKKLVEMMEGEIGVASEYGKGSTFSFRIKQGFVDDSVLGAEVSEKLRTFNFFDDKRVVSKKLIRVNLSYVRVLVVDDMQTNLDVAAGILRKYKMQVDLLTNGPAAIDRIRCGTPVSIWCLWTT

SEQ ID NO: 69879 - DNA, 4224 bp, Unknown
  Obtained from environmental sample
  misc_feature (1)..(4224): n is a, c, g, or t
atgttgacggaagactctatcatgtccgacgagtccgcgttgcagatgatgatggccgacgcaggctccgacgaccagatcagcggggacgatctcgccgggcagcttgacgccatgttcggcgatccgacgtcgggggacgggcttgagttgcctgaggcgccgccggacgaatccttatcgatcgacgaatccgcgccggacgacgggtcgtcgttacctgatgtatcggcattgaccgaagattccgtaatgacggaagagtctctgatggccggtttggccgaaggcgcggcatcggccgacgacggccaccccagcggcgacgacgtcgcgggtcagctcgacgcgttgttcggcgagtcggagcccgccgcctccgccgacgaatccttgccggccgagggatcggtatcaatcgacgaattcgcgccggacgacgggtcgtcgttacctgatgtatcggcattggccgaagactccgtagtgacggaagagtctctgatggccggcttggccgaagctgcggcatcaaccgacgacggccaccccagcggggacgacgtggccgggcagcttgacgcgatgttcggcggtgctccggaggcggcgcctgcgccgaccgatgaatctgtattgacgggggaacccgaacagaccggcatgatcgacggggtcgtaaccgacggcgacatcgccgccgacctcggccacgcgggcgcggcggttcccagcggcgacgccgtggttgatcagctggacgagctcttcggcggccagtcggtcctatccgcggaatccgtaccgacctccgcgccagtcgccatcggccccatggttcccagcggcaacgcggtggttgatcagcttgacgagctcttcggcggccaggccgtcttgtccgccgacgccatacagacatccgcccctgtcgacatcagcccaacggttccgggtggcgccgccgccgctgaccagttggacgagctcttcggcggccagtccgtactatccgccgacgccatacagacgtccgccccggtagatatcagccccacggttcccggcggtgacgccgttgttgaccagcttgacgaactcttcggcggccaggccgtcctgtccgccgacgccatacagacgtccgcccccgtagacatcagctccactgttcccagcggcgacgccgttgtcgaccagcttgacgaactcttcggcggccaggccgtcctctccgccgatgccgtaacgtcgtccgcccccgtagacatcagccccgcggtccccagcggcaacgccgtggtcgaccagctggacgagcttttcggcggcggcggtcagtctgtcctctcggcggacggcatacccgacggcgcatcttcggactttacgccgacggtttccgacggcgccgtccaggcgggcggcggcggggcggatcagctggacgagctgttcggcgggagcggccagtccattctctcggcggacgaaatacccgccggcgccgccgcggatttcacgccgacggccgccggcggcggcgttacggagggcggcggggcggatcagctggacgagcttttcggcgggagcggtcaggccgttctctccgccgacgaaatacccgccgacatcggcggcgccgccgacctctcccccattgtccccagcggcaacgccgtggtcgaccagctggacgagcttttcggcggccaagcgatcctgccgccggcggcgatgccggccggcgatacccacgccgcccttgatacggaggttccaagcggcaacgccgtggtcgaccagctggacgccctgttcggcggccggacgatcctgccgccggcggccgcgcccgaagaagagatcgacggcgctcccgccgagcccgacatgttgaacgatatcacaagcgagcttgatcttccggtatcgtcggagataaacgacgcgttgtcggagatctccggcgacgacatagagggccagctggacgccatgttcggcggatcggaaccggccgtttcggctccgctcaacgaccggtctgcttcggcggatcaaccgccggttgttgacgacgaggccgctttggttgcggcgttagaggcggagggcgccgccgcgccgccggcagagccgccgcctgacgaagcggctctgatcgtcgacggggtcgacgccgtgccggccgaagaaccggcgcaaccgtccgacgccggcgacgccaaaaaactcccgtcgtccatagtattggacgaaaacggcgtggacatagccgcgacgccgacctctgacgacatagaagaccgcatagacgacatgttcggaatgtccgacccggccgccacgaaagacccgctggtcatagacgaggacgaagaagggaccctagccaaagccgaagccgcgcccccagcccccgccgcagaacgggaagacctagggacggcgacggacaacattccgacagacaacattccgaccgacaacgacgaagacgcgtcgttcctgaacgccgaaacgggcgaggccgccggagcgatagagggcgccgatatgacaggcgacgacgtggaggagcgccttgcggagatgttcggagcgtcggcgtccgataccacgacggagatgacgatcgaggaggtcatggcggtcgatgttgacagtataatcgacggcggcggcgtttcaaccccgctcaacgaccggccggcttcggcggatgaagatgtatcgacgggtgatttggcggaggcggtcgttgacacaacaggtattgtcgaaactgatgacgctgttgatatagcgggtattgttggtacggatgatgttgttgacacaacaggtattgtcgaaactgatgatgctgttgacacaaccggtattgttgaaactgatgatgttgttgacacaaccggtattgtcgaaactgatgatgctgttgatatcgcaagtattgttggtacggatgatgctgttgacacaaccggtattgtcgaaactgatgatgttgttgatatcgcaggtattgttggtactgatgatgctgttgacacaaccggtattgtcgaaactgatgatgctgttgatatagcaggtattgttggtacggatgatgttgttgacacaacaggtattgttgaaactgatgacgctgttgatatagcaggtattgttggcactgatgacgctgttgacacaaccggtattgtcgaaactgatgatgttgttgatatcgcaggtattgttggtactgatgatgctgttgacacaaccggtattgtcgaaactgatgatgctgttgatatcgcaggtattgttggtactgatgacgctgttgacacaaccggtattgtcgaaactgatgacgctatcgacacaaccggtattgtcgaaactgatgacgctgttgacacaaccggtattgtcgaaactgataatgctgttgatatagcaggtattgttggcactgatgacgctgtcgacacaaccggtattgttgaagtcgaaactgacgacgctgcaatcaacgttaatgcgaatgatgttcttgatacggaaaccgttattgacggtaatgatattatcggtactgaagagccgccgatgattgacatcgtcgataccattgatttgattaatgtgaacgaaatgttaggcaccggcgacgtagtcaccatgatggacatggacgatgagatccgcgccgcgatgcgcgccgcggccgaagcgaccgccgccgcgtcggccgcccataaattcatggacatggacgacgagatccgcgccgcgatgcgcgccgacgtttcggttcagcccgtttcggatccgatcgtttcggctccgctcaacgaccggtttgcttcggcggacgaggttgtcgagcaaacggacgaagcggcggttggtcagatggacatggacgacgagatccgcgccgcgatgcgcgccgccgccggcaatgtttcgcttccggtcgattcggatgcggtcgattcggatacagtcatttcagatacagtcatttcagatacagtcgtttcggatccggtcgattcggatactgtcatttcagatacggtagtttcggatctagtcgattcggatactgtcatttcggacacagtcgtttcggatccggtcattaacaacttagttgatattggatacccccctcccccgccgccgctcccgtcgccgcggacgaagacccgataa

SEQ ID NO: 69880 - protein, 1407 aa, Unknown
  Obtained from environmental sample
  misc_feature (1)..(1407): Xaa is any amino acid
MLTEDSIMSDESALQMMMADAGSDDQISGDDLAGQLDAMFGDPTSGDGLELPEAPPDESLSIDESAPDDGSSLPDVSALTEDSVMTEESLMAGLAEGAASADDGHPSGDDVAGQLDALFGESEPAASADESLPAEGSVSIDEFAPDDGSSLPDVSALAEDSVVTEESLMAGLAEAAASTDDGHPSGDDVAGQLDAMFGGAPEAAPAPTDESVLTGEPEQTGMIDGVVTDGDIAADLGHAGAAVPSGDAVVDQLDELFGGQSVLSAESVPTSAPVAIGPMVPSGNAVVDQLDELFGGQAVLSADAIQTSAPVDISPTVPGGAAAADQLDELFGGQSVLSADAIQTSAPVDISPTVPGGDAVVDQLDELFGGQAVLSADAIQTSAPVDISSTVPSGDAVVDQLDELFGGQAVLSADAVTSSAPVDISPAVPSGNAVVDQLDELFGGGGQSVLSADGIPDGASSDFTPTVSDGAVQAGGGGADQLDELFGGSGQSILSADEIPAGAAADFTPTAAGGGVTEGGGADQLDELFGGSGQAVLSADEIPADIGGAADLSPIVPSGNAVVDQLDELFGGQAILPPAAMPAGDTHAALDTEVPSGNAVVDQLDALFGGRTILPPAAAPEEEIDGAPAEPDMLNDITSELDLPVSSEINDALSEISGDDIEGQLDAMFGGSEPAVSAPLNDRSASADQPPVVDDEAALVAALEAEGAAAPPAEPPPDEAALIVDGVDAVPAEEPAQPSDAGDAKKLPSSIVLDENGVDIAATPTSDDIEDRIDDMFGMSDPAATKDPLVIDEDEEGTLAKAEAAPPAPAAEREDLGTATDNIPTDNIPTDNDEDASFLNAETGEAAGAIEGADMTGDDVEERLAEMFGASASDTTTEMTIEEVMAVDVDSIIDGGGVSTPLNDRPASADEDVSTGDLAEAVVDTTGIVETDDAVDIAGIVGTDDVVDTTGIVETDDAVDTTGIVETDDVVDTTGIVETDDAVDIASIVGTDDAVDTTGIVETDDVVDIAGIVGTDDAVDTTGIVETDDAVDIAGIVGTDDVVDTTGIVETDDAVDIAGIVGTDDAVDTTGIVETDDVVDIAGIVGTDDAVDTTGIVETDDAVDIAGIVGTDDAVDTTGIVETDDAIDTTGIVETDDAVDTTGIVETDNAVDIAGIVGTDDAVDTTGIVEVETDDAAINVNANDVLDTETVIDGNDIIGTEEPPMIDIVDTIDLINVNEMLGTGDVVTMMDMDDEIRAAMRAAAEATAAASAAHKFMDMDDEIRAAMRADVSVQPVSDPIVSAPLNDRFASADEVVEQTDEAAVGQMDMDDEIRAAMRAAAGNVSLPVDSDAVDSDTVISDTVISDTVVSDPVDSDTVISDTVVSDLVDSDTVISDTVVSDPVINNLVDIGYPPPPPPLPSPRTKTR

SEQ ID NO: 69881 - DNA, 1713 bp, Unknown
  Obtained from environmental sample
  misc_feature (1)..(1713): n is a, c, g, or t
atgtccatgaatttatgggcggccgacgcggcggcggtcgcttcggccgcggcgcgcatcgcggcgcggatctcatcgtccatgtccatcatggtgactacgtcgccggtgcctaacatttcgttcacattaatcaaatcaatggtatcgacgatgtcaatcatcggcggctcttcagtaccgataatatcattaccgtcaataacggtttccgtatcaagaacatcattcgcattaacgttgattgcagcgtcgtcagtttcgacttcaacaataccggttgtgtcgacagcgtcatcagtgccaacaatacctgctatatcaacagcattatcagtttcgacaataccggttgtgtcaacagcgtcatcagtttcgacaataccggttgtgtcgatagcgtcatcagtttcgacaataccggttgtgtcaacagcgtcatcagtaccaacaatacctgcgatatcaacagcatcatcagtttcgacaataccggttgtgtcaacagcatcatcagtaccaacaatacctgcgatatcaacaacatcatcagtttcgacaataccggttgtgtcaacagcgtcatcagtgccaacaatacctgctatatcaacagcgtcatcagtttcaacaatacctgttgtgtcaacaacatcatccgtaccaacaatacctgctatatcaacagcatcatcagtttcgacaataccggttgtgtcaacagcatcatcagtaccaacaatacctgcgatatcaacaacatcatcagtttcgacaataccggttgtgtcaacagcatcatccgtaccaacaatacttgcgatatcaacagcatcatcagtttcgacaataccggttgtgtcaacaacatcatcagtttcaacaataccggttgtgtcaacagcatcatcagtttcgacaatacctgttgtgtcaacaacatcatccgtaccaacaatacccgctatatcaacagcgtcatcagtttcgacaatacctgttgtgtcaacgaccgcctccgccaaatcacccgtcgatacatcttcatccgccgaagccggccggtcgttgagcggggttgaaacgccgccgccgtcgattatactgtcaacatcgaccgccatgacctcctcgatcgtcatctccgtcgtggtatcggacgccgacgctccgaacatctccgcaaggcgctcctccacgtcgtcgcctgtcatatcggcgccctctatcgctccggcggcctcgcccgtttcggcgttcaggaacgacgcgtcttcgtcgttgtcggtcggaatgttgtctgtcggaatgttgtccgtcgccgtccctaggtcttcccgttctgcggcgggggctgggggcgcggcttcggctttggctagggtcccttcttcgtcctcgtctatgaccagcgggtctttcgtggcggccgggtcggacattccgaacatgtcgtctatgcggtcttctatgtcgtcagaggtcggcgtcgcggctatgtccacgccgttttcgtccaatactatggacgacgggagttttttggcgtcgccggcgtcggacggttgcgccggttcttcggccggcacggcgtcgaccccgtcgacgatcagagccgcttcgtcaggcggcggctctgccggcggcgcggcggcgccctccgcctctaacgccgcaaccaaagcggcctcgtcgtcaacaaccggcggttga

SEQ ID NO: 69882 - protein, 570 aa, Unknown
  Obtained from environmental sample
  SIGNAL (1)...(21)
  misc_feature (1)..(570): Xaa is any amino acid
MSMNLWAADAAAVASAAARIAARISSSMSIMVTTSPVPNISFTLIKSMVSTMSIIGGSSVPIISLPSITVSVSRTSFALTLIAASSVSTSTIPVVSTASSVPTIPAISTALSVSTIPVVSTASSVSTIPVVSIASSVSTIPVVSTASSVPTIPAISTASSVSTIPVVSTASSVPTIPAISTTSSVSTIPVVSTASSVPTIPAISTASSVSTIPVVSTTSSVPTIPAISTASSVSTIPVVSTASSVPTIPAISTTSSVSTIPVVSTASSVPTILAISTASSVSTIPVVSTTSSVSTIPVVSTASSVSTIPVVSTTSSVPTIPAISTASSVSTIPVVSTTASAKSPVDTSSSAEAGRSLSGVETPPPSIILSTSTAMTSSIVISVVVSDADAPNISARRSSTSSPVISAPSIAPAASPVSAFRNDASSSLSVGMLSVGMLSVAVPRSSRSAAGAGGAASALARVPSSSSSMTSGSFVAAGSDIPNMSSMRSSMSSEVGVAAMSTPFSSNTMDDGSFLASPASDGCAGSSAGTASTPSTIRAASSGGGSAGGAAAPSASNAATKAASSSTTGG

SEQ ID NO: 69883 - DNA, 648 bp, Unknown
  Obtained from environmental sample
  misc_feature (1)..(648): n is a, c, g, or t
ttgtgtcaacagcgtcatcagtaccaacaatacctgcgatatcaacagcatcatcagtttcgacaataccggttgtgtcaacagcatcatcagtaccaacaatacctgcgatatcaacaacatcatcagtttcgacaataccggttgtgtcaacagcgtcatcagtgccaacaatacctgctatatcaacagcgtcatcagtttcaacaatacctgttgtgtcaacaacatcatccgtaccaacaatacctgctatatcaacagcatcatcagtttcgacaataccggttgtgtcaacagcatcatcagtaccaacaatacctgcgatatcaacaacatcatcagtttcgacaataccggttgtgtcaacagcatcatccgtaccaacaatacttgcgatatcaacagcatcatcagtttcgacaataccggttgtgtcaacaacatcatcagtttcaacaataccggttgtgtcaacagcatcatcagtttcgacaatacctgttgtgtcaacaacatcatccgtaccaacaatacccgctatatcaacagcgtcatcagtttcgacaatacctgttgtgtcaacgaccgcctccgccaaatcacccgtcgatacatcttcatccgccgaagccggccggtcgttga

SEQ ID NO: 69884 - protein, 215 aa, Unknown
  Obtained from environmental sample
  misc_feature (1)..(215): Xaa is any amino acid
MCQQRHQYQQYLRYQQHHQFRQYRLCQQHHQYQQYLRYQQHHQFRQYRLCQQRHQCQQYLLYQQRHQFQQYLLCQQHHPYQQYLLYQQHHQFRQYRLCQQHHQYQQYLRYQQHHQFRQYRLCQQHHPYQQYLRYQQHHQFRQYRLCQQHHQFQQYRLCQQHHQFRQYLLCQQHHPYQQYPLYQQRHQFRQYLLCQRPPPPNHPSIHLHPPKPAGR

SEQ ID NO: 69885 - DNA, 843 bp, Unknown
  Obtained from environmental sample
  misc_feature (1)..(843): n is a, c, g, or t
atgtctgtatggcgtcggcggacaagacggcctggccgccgaagagctcgtcaagctgatcaaccaccgcgttgccgctgggaaccatggggccgatggcgactggcgcggaggtcggtacggattccgcggataggaccgactggccgccgaagagctcgtccagctgatcaaccacggcgtcgccgctgggaaccgccgcgcccgcgtggccgaggtcggcggcgatgtcgccgtcggttacgaccccgtcgatcatgccggtctgttcgggttcccccgtcaatacagattcatcggtcggcgcaggcgccgcctccggagcaccgccgaacatcgcgtcaagctgcccggccacgtcgtccccgctggggtggccgtcgtcggttgatgccgcagcttcggccaagccggccatcagagactcttccgtcactacggagtcttcggccaatgccgatacatcaggtaacgacgacccgtcgtccggcgcgaattcgtcgattgataccgatccctcggccggcaaggattcgtcggcggaggcggcgggctccgactcgccgaacaacgcgtcgagctgacccgcgacgtcgtcgccgctggggtggccgtcgtcggccgatgccgcgccttcggccaaaccggccatcagagactcttccgtcattacggaatcttcggtcaatgccgatacatcaggtaacgacgacccgtcgtccggcgcggattcgtcgatcgataaggattcgtccggcggcgcctcaggcaactcaagcccgtcccccgacgtcggatcgccgaacatggcgtcaagctgcccggcgagatcgtccccgctga

SEQ ID NO: 69886 - protein, 280 aa, Unknown
  Obtained from environmental sample
  misc_feature (1)..(280): Xaa is any amino acid
MSVWRRRTRRPGRRRARQADQPPRCRWEPWGRWRLARRSVRIPRIGPTGRRRARPADQPRRRRWEPPRPRGRGRRRCRRRLRPRRSCRSVRVPPSIQIHRSAQAPPPEHRRTSRQAARPRRPRWGGRRRLMPQLRPSRPSETLPSLRSLRPMPIHQVTTTRRPARIRRLIPIPRPARIRRRRRRAPTRRTTRRADPRRRRRWGGRRRPMPRLRPNRPSETLPSLRNLRSMPIHQVTTTRRPARIRRSIRIRPAAPQATQARPPTSDRRTWRQAARRDRPR

SEQ ID NO: 69887 - DNA, 357 bp, Unknown
  Obtained from environmental sample
  misc_feature (1)..(357): n is a, c, g, or t
atgtcgccgtcggttacgaccccgtcgatcatgccggtctgttcgggttcccccgtcaatacagattcatcggtcggcgcaggcgccgcctccggagcaccgccgaacatcgcgtcaagctgcccggccacgtcgtccccgctggggtggccgtcgtcggttgatgccgcagcttcggccaagccggccatcagagactcttccgtcactacggagtcttcggccaatgccgatacatcaggtaacgacgacccgtcgtccggcgcgaattcgtcgattgataccgatccctcggccggcaaggattcgtcggcggaggcggcgggctccgactcgccgaacaacgcgtcgagctga

SEQ ID NO: 69888 - protein, 118 aa, Unknown
  Obtained from environmental sample
  misc_feature (1)..(118): Xaa is any amino acid
MSPSVTTPSIMPVCSGSPVNTDSSVGAGAASGAPPNIASSCPATSSPLGWPSSVDAAASAKPAIRDSSVTTESSANADTSGNDDPSSGANSSIDTDPSAGKDSSAEAAGSDSPNNASS

SEQ ID NO: 69889 - DNA, 651 bp, Unknown
  Obtained from environmental sample
  misc_feature (1)..(651): n is a, c, g, or t
ttggagcgtgccgtcttcggcctatgcgagcactaccgcgaaaagatagcccaagcggagataatagccaaccccggctgctacgtaacaagcgtcctgctgccccttctccccctctacaagagccgtttaaatatagattgggtgatagccgactcaaaatccggcgtaagcggcgccggccgcggcctaaagcagaacacccacttccccgaggcaaacgaaaatttcagcgcctactccataggccacaaacaccgccacacccccgaaatagagcaagagttatcgctagccgccggaaagccggtaacgataaccttctcccctcacctactgcccgtcaacaggggaatattatcaacaatatatttaaagacagaaaaaagcgccaaagagtgcagcgatatagtaaaaaagttctattcaaactcggatttcgtgaggatcagggagtcatccgacctcccgcaaatctcctccgtagtccacacaaactattgcgacatagccttcaccggcggaggcaacggtcaccccgtaatagccgtatccgcccttgataatctagtgaaaggggccagcggtcaggcgttgcagaatatgaatattatgtttggattgaaggagacgatggggcttttgaggtga

SEQ ID NO: 69890 - protein, 216 aa, Unknown
  Obtained from environmental sample
  DOMAIN (36)...(192): Semialdehyde dehydrogenase, dimerisation domain
  misc_feature (1)..(216): Xaa is any amino acid
MERAVFGLCEHYREKIAQAEIIANPGCYVTSVLLPLLPLYKSRLNIDWVIADSKSGVSGAGRGLKQNTHFPEANENFSAYSIGHKHRHTPEIEQELSLAAGKPVTITFSPHLLPVNRGILSTIYLKTEKSAKECSDIVKKFYSNSDFVRIRESSDLPQISSVVHTNYCDIAFTGGGNGHPVIAVSALDNLVKGASGQALQNMNIMFGLKETMGLLR

SEQ ID NO: 69891 - DNA, 1164 bp, Unknown
  Obtained from environmental sample
  misc_feature (1)..(1164): n is a, c, g, or t
atgaactttgaacaatatctagtatcccccgccgtcgccgagataacctccgacgacaagaccggcgcactcaaagagctggcctccgcgctttgcaaggcgctcgacatcaacaagcagaaatacatcgtggaggagatactccggcgcgaggagagcgcctccacgttcatcggtcaaggcgtcgcgctaccccacgcccgcggatgcccgataaaggaggagttcgcgatcatcgtgggaaggagcgtcgcggggatcaactacgacgcggcgcgcggcgcgtcggcgcacatactcgtgctgctggtctcgcgggaggacgccgacaacacacgccagatagagattctctccgagatcgccgcgtttttcaaaacggacgtggtacgcgaaaacatcctctctcaggacgccgtggccgacctgcgggttctcagcgccgccgtgaagaaggggctctttgaaaaacgccgccgaccgcgcacgcccgcaaaactcgccggctcgcccctgctaagcgccgccggacagctcgccaacagccttaaagcgaaagccgtcatcgttttcgccgacgtagtcaaagacaacgatttcctagaccaactcggcgacaagcataaactgatcatcgtcaccaataacaaaacgcggttcgatctcgcaaaggacaagcgcgtgctggggctcgtacaagccccgcccatccccgtctcccgaaccggccagctcaaaatcggcatactcctcgccctgtcaaggggctttatatccaaagaagacaaggtggtatgcgtctcaggcggcacccacgggtctatcttcgacacgatagtctgcgtggacatcgccaaagagtacgagtttttcttcctgacggcgcaaaacctgcttccgcccgacatcaagcccgaagtcttcgagcgcgtgataggcttggccggagaaatatccgttgaaggcagggagggcaaagccgtggggacgatattcgtaataggcgacacaaactccgtgaacgccaacgtccgccagctgataataaaccccttccgaggctacagcgaggccgagcgcaacgtgctcgaccccggtctcgtggagacgaaaaagagtcgccgccatagacggcgcgtttcatataaacgggcgacgggttaa

SEQ ID NO: 69892 - protein, 387 aa, Unknown
  Obtained from environmental sample
  DOMAIN (1)...(149): Phosphoenolpyruvate-dependent sugar phosphotransferase system, EIIA 2
  misc_feature (1)..(387): Xaa is any amino acid
MNFEQYLVSPAVAEITSDDKTGALKELASALCKALDINKQKYIVEEILRREESASTFIGQGVALPHARGCPIKEEFAIIVGRSVAGINYDAARGASAHILVLLVSREDADNTRQIEILSEIAAFFKTDVVRENILSQDAVADLRVLSAAVKKGLFEKRRRPRTPAKLAGSPLLSAAGQLANSLKAKAVIVFADVVKDNDFLDQLGDKHKLIIVTNNKTRFDLAKDKRVLGLVQAPPIPVSRTGQLKIGILLALSRGFISKEDKVVCVSGGTHGSIFDTIVCVDIAKEYEFFFLTAQNLLPPDIKPEVFERVIGLAGEISVEGREGKAVGTIFVIGDTNSVNANVRQLIINPFRGYSEAERNVLDPGLVETKKSRRHRRRVSYKRATG

SEQ ID NO: 69893 - DNA, 414 bp, Unknown
  Obtained from environmental sample
  misc_feature (1)..(414): n is a, c, g, or t
atgagtactgtaagaacaaaaattacgataaagaatgccggtgatgtcatggatgcggaacgtggatatattacggaagagcaaattcgcacgctttcggtagaagctctggctgatacaggagcatggacgcttattattgatgaggatacttgtcaaaaattaggcttggaattaagaggaccggaacccggcattctggcggatggttcaactgttgtttaccaaataacagatggtgtagaagtccattggaaagataggcaaacggtttgtcctgcgcttgttgttcccggtgctaatgaaattctttttggggcattaccaatggaaggtatggatttaatagtccacccccgtaaagaagaggttatcggcgctcatggtgataaggcgctgtatatacttaagtaa

SEQ ID NO: 69894 - protein, 137 aa, Unknown
  Obtained from environmental sample
  misc_feature (1)..(137): Xaa is any amino acid
MSTVRTKITIKNAGDVMDAERGYITEEQIRTLSVEALADTGAWTLIIDEDTCQKLGLELRGPEPGILADGSTVVYQITDGVEVHWKDRQTVCPALVVPGANEILFGALPMEGMDLIVHPRKEEVIGAHGDKALYILK

SEQ ID NO: 69895 - DNA, 1599 bp, Unknown
  Obtained from environmental sample
  misc_feature (1)..(1599): n is a, c, g, or t
atggaagaaactcaatctgataattctccgcagactccacaaactgcggcttcgcttgtgcgtcatggatcgacactttcactcctcactttattttcccgtatcctcggacttcttagggaaatgacaaaggcgaggttcctcggcactaccgctctgtccgacgctttttccgtggcgtttttactgcctaaccttttccgccgtcttttcgccgaaggttcaatctccgtcgcttttattcccacctttaaggagtatatgcttgaaggagacaaggaaaaaacacgggagttttattcgtgcgtgtttacatttcttacatttattgtaacgctgatggtaatggcgggaatacttgccgctcctctgcttgtccgtattttcggaatagaagaatttgacgagaccgttttgcttacaagagtgatgtttccgtttctcggtttcatttcgctcgccgctctgtttcagggagtgttgaacagccttcacatttttacaccgtccgggcttgcgccgattttattaaacattgttacaattctttgcacttacgcattgagtccttttacaaaaaatcccgcccgcgcgatggcggtcggcatcctcatcggcggatttcttgaggcggcaattcagtttccgtttgttgtaaaaaagggatataaattttttattacgggaattaaacgagccattgataatccgggtacacggaaagtgctgaaattgatcagcccgaccgttatcggaatggcagcgtatcaaattaacgatttggtttccacagcgctgggagggcgagcgggggaaggagttgtatcgagcctgcaatattctttgcgtctgcaggaattatttttaggagtgttcgccgtgtcgattgggactgtgcttctcccgaaccttgccgagtacgcaaaaacttctcaatgggatatttacaataagcgattgatttcttccattaacataatcgctttaataacgatacctgtaacttttttctctcttgcggaaggacagaatttaatccgccttcttttccaaagccgcagttttgacgaaacatccgtcgctcttactctttctgcatttaccttccatatgccaggacttttattcatcgctcttaaccgaattatcgctcccgctttttacgctcaaagcaataccgtatcgcctaccatcgccggaattatatcaatggttgtaaatattatccttgccgctgttttggcaatgcaatttaagggggcgggcattgcgttcgccctgtctttcgcaagcgcaatcaacacaattttacttgtgatttttctcggtaaaaaccccaacatcaaattgggcgcagtaatcggttcggcattactctacatattaaaaatgctgattctttccgctgtcgccgccgttccgatttatttcctctcccctgtgttacgcgatattttcgccggacacggacgtattatcagttacggcatacctttgatattaaacgcaatgatttatatgcttttgggtattttcctgcttgcgcttgtaaaagataaaaacttatccggcttactcaaaatgattaggaagaaataa

SEQ ID NO: 69896 - protein, 532 aa, Unknown
  Obtained from environmental sample
  DOMAIN (248)...(413): MatE
  misc_feature (1)..(532): Xaa is any amino acid
MEETQSDNSPQTPQTAASLVRHGSTLSLLTLFSRILGLLREMTKARFLGTTALSDAFSVAFLLPNLFRRLFAEGSISVAFIPTFKEYMLEGDKEKTREFYSCVFTFLTFIVTLMVMAGILAAPLLVRIFGIEEFDETVLLTRVMFPFLGFISLAALFQGVLNSLHIFTPSGLAPILLNIVTILCTYALSPFTKNPARAMAVGILIGGFLEAAIQFPFVVKKGYKFFITGIKRAIDNPGTRKVLKLISPTVIGMAAYQINDLVSTALGGRAGEGVVSSLQYSLRLQELFLGVFAVSIGTVLLPNLAEYAKTSQWDIYNKRLISSINIIALITIPVTFFSLAEGQNLIRLLFQSRSFDETSVALTLSAFTFHMPGLLFIALNRIIAPAFYAQSNTVSPTIAGIISMVVNIILAAVLAMQFKGAGIAFALSFASAINTILLVIFLGKNPNIKLGAVIGSALLYILKMLILSAVAAVPIYFLSPVLRDIFAGHGRIISYGIPLILNAMIYMLLGIFLLALVKDKNLSGLLKMIRKK

SEQ ID NO: 69897 - DNA, 1359 bp, Unknown
  Obtained from environmental sample
  misc_feature (1)..(1359): n is a, c, g, or t
atgctgacaaatataaaataccgcaaccttccaaccgtagtactcgcaggacgccccaacgtgggaaagtcaacgctttttaaccgtctgcttcacaaacgcagggcgattaccgaccctacgcccggcgttacgcgcgatcccgtagaagcggattgccttatcaatgaaaaaccattgcgccttatcgacacaggcggtttcaaacttacagattgcgatgagcttgacaagttggtagttgaaagaacccttgaaacaattaaaaaagccgaccttgttgttttactcctcgaagcgggagaggtaacaagtgaagacgaagaacttataaacactctgcgcccgtaccgagaaaaattaattgtaacggtaaacaagacggaaggcggcagacacgaagcggacgcatggaatgtgctcacctttggctttgacaaggttttgatgatctcagccgagcatggcgacaatatcggggaacttcagcaggagattttaaagcgccttgatttttccaaagtggaagaagaacaggaagaaaaattaataaaaatcgcgctactcggtaaaccaaacacgggaaaatccacgctttcaaatcggctcaccggtgcaaacgcttccatcgtaagcgaaattcccggtacgacaagggatactgttgaggggcgtttcagttggaaatcgcataactttataatcatggacaccgcgggcatcaggcgcaaggcaaaggtgaatgaaaatatcgagtactattcagtgaaccgcgcaattaagacaatcagtgacgctgatattgtcatactgatgatcgacgccgcggaggggctttccgatcaggacaaaaaaatagccgcgctcgcgcatgacaagggcaggggaataattatggcgcttaacaagtgggacacgatgccccagcaaaaaaatacatttaaggccgcggaagaaaaaattcattttcaattcgggcaaatggaatacgcgcccgtaatacccgtcagcgcaaaggacggaaccggcgttgataaattgctgaataccgtaataaagatgtatggacaattaaatctgcaaatagggacatcccagcttaatcaagcgcttgaaaagtggctgcaggaatatcctccgcctacgggaccaagaacgtattttaagattaagtatgccgtacaaaaatccgcaaaccccgtacacttcatcttttttgtttcccgtattcaagttataagcgattcgtatatctcatatttaaggaacaaaatacgcaaagatttaggcttctcccttattcccgtattgattgaagtaaagagttcctcgcctaaagacaggaaaaaaagtaattga

SEQ ID NO: 69898 - protein, 452 aa, Unknown
  Obtained from environmental sample
  DOMAIN (186)...(305): Dynamin family
  misc_feature (1)..(452): Xaa is any amino acid
MLTNIKYRNLPTVVLAGRPNVGKSTLFNRLLHKRRAITDPTPGVTRDPVEADCLINEKPLRLIDTGGFKLTDCDELDKLVVERTLETIKKADLVVLLLEAGEVTSEDEELINTLRPYREKLIVTVNKTEGGRHEADAWNVLTFGFDKVLMISAEHGDNIGELQQEILKRLDFSKVEEEQEEKLIKIALLGKPNTGKSTLSNRLTGANASIVSEIPGTTRDTVEGRFSWKSHNFIIMDTAGIRRKAKVNENIEYYSVNRAIKTISDADIVILMIDAAEGLSDQDKKIAALAHDKGRGIIMALNKWDTMPQQKNTFKAAEEKIHFQFGQMEYAPVIPVSAKDGTGVDKLLNTVIKMYGQLNLQIGTSQLNQALEKWLQEYPPPTGPRTYFKIKYAVQKSANPVHFIFFVSRIQVISDSYISYLRNKIRKDLGFSLIPVLIEVKSSSPKDRKKSN

SEQ ID NO: 69899 - DNA, 480 bp, Unknown
  Obtained from environmental sample
  misc_feature (1)..(480): n is a, c, g, or t
atgaaccttgcaaataaattgtcatttttccgcattatccttgcccctgtgttttttgtcatttatcttttaccccgcttttttccttcgttattcgtgaacggagcggtatggacggtgccggtactttggatcatttctatcgtctctgaaataacggattattttgacggttttgccgcccgcaaactcaacttgacaagcgattttggaaaacttttagaccccttcgccgatacgcttacacaagtcactttttttctttgctttataattgacggtatttttcccgggggcattttacccgcaattttatttttactggtcgtttaccgcgagttcgccatcatgtttcttcgcaacttgatgttgaaaaaagngcgttgctatgggcgcgcgtatcggcggaaagataaagaccgtcatttatatcatcacggcggcaatagcgcttttaatttcaagtatacaacnggttga

SEQ ID NO: 69900 - protein, 159 aa, Unknown
  Obtained from environmental sample
  DOMAIN (44)...(157): CDP-alcohol phosphatidyltransferase
  misc_feature (1)..(159): Xaa is any amino acid
MNLANKLSFFRIILAPVFFVIYLLPRFFPSLFVNGAVWTVPVLWIISIVSEITDYFDGFAARKLNLTSDFGKLLDPFADTLTQVTFFLCFIIDGIFPGGILPAILFLLVVYREFAIMFLRNLMLKKXRCYGRAYRRKDKDRHLYHHGGNSAFNFKYTTG

SEQ ID NO: 69901 - DNA, 1059 bp, Unknown
  Obtained from environmental sample
  misc_feature (1)..(1059): n is a, c, g, or t
ttgagttttgcattcaaaggcaacaacgcaatccgcgaaagtatgcactcctgttttctatactatgcaacaaaagcgggaatggattttggaattgtaaatgccggttcgcttcccatttacgatgatattttggctgaggagaggaatttaatagaagatttgattttcaaccgcagccccgatgcgaccgaccgcttgctgcaatatgcggaaagcgtaaaggagagaaaaagcgagctggcgagtcacgcagatgctttggcgtggcggcagttgcctttggaagagagaatatcttatgctttggttaagggcatagatacctttatagaaagcgatgcggacgaggcgcgagtggcttatggcagtccgctgaaagttattgaagagcctttgatgaacggaatgaacaaggttggcgaactttttggcgcgggaaaaatgtttttgccgcaagttgtgaaaagcgcaagagtgatgaaaaaagcggtggcggttttgcaaccatatatagacagttctgcgacccaaactgcaaaagccggcaaaatattgatggcaaccgtgaaaggcgatgtgcacgatattgggaaaaacatagtgtctcttgttcttgcctgcaataactacgaaattatagaccttggagttatgtgtccagcagagaaaattttggaagcggtaaaggaacacctgccgaatttggttggtctttcggggcttataacgccaagccttgcagagatgagttttgttgtggaaacgctttcaaaagaaaatcttgggattccagtgatgataggcggagccacaacttctgctttgcacaccgctgcaaaaatcgccacagttggaaagcagcctgttgtttacgtgccagatgctggcaaagcggtttttgtggcagaatccattttgaataaatccaagcagaatgtgttttttcaggagaattttgaaaagcagcaaaagctgagggaggctttgagccgtaaagaggaaaaggtgctaacgccgattgaggaagcgaggggcaaggggttggagttgttttga

SEQ ID NO: 69902 - protein, 352 aa, Unknown
  Obtained from environmental sample
  DOMAIN (183)...(303): B12 binding domain
  misc_feature (1)..(352): Xaa is any amino acid
MSFAFKGNNAIRESMHSCFLYYATKAGMDFGIVNAGSLPIYDDILAEERNLIEDLIFNRSPDATDRLLQYAESVKERKSELASHADALAWRQLPLEERISYALVKGIDTFIESDADEARVAYGSPLKVIEEPLMNGMNKVGELFGAGKMFLPQVVKSARVMKKAVAVLQPYIDSSATQTAKAGKILMATVKGDVHDIGKNIVSLVLACNNYEIIDLGVMCPAEKILEAVKEHLPNLVGLSGLITPSLAEMSFVVETLSKENLGIPVMIGGATTSALHTAAKIATVGKQPVVYVPDAGKAVFVAESILNKSKQNVFFQENFEKQQKLREALSRKEEKVLTPIEEARGKGLELF

SEQ ID NO: 69903 - DNA, 924 bp, Unknown
  Obtained from environmental sample
  misc_feature (1)..(924): n is a, c, g, or t
atgtccaaagttgccgccttcaagcgaatcaagaacagcgcaggctggctgcgctggatggcgaaaggagtttgcgagaattccagcctttctcttcccaagccgtcatttttaggacgccgccgggtgattctcgttgatgcaagctcggatgcggtcaagggaagcaagcagagcgattaccgcctgcactacgcttttgacctgttcaacttccaatgcagaagcatggagctgaccggcatcaaggaaggggagaagctgagccgctacaaatttggcagcaatgacatagccgttgccgaccggatatactgcaccatatccggcatggaacatgtcctttcgcagggcgcaagcttcatattgcgtttcaagtccaagggattccatttctacgatgccgaaggcgagaggcttgacattctgcccaggctaaggcatttgaaagccttcggtagcttgtcaatccgttgccattaccgcctgccggacggaacgctgcgcccgctccgcattgtagccatgaagaaaaatggcaagtcaattgctgccagcgagcgcagaatgattcgcaaagtcagcaggaagcaggagagagcggttcaggaagacactgtggaattgaataaatacatagttcttgcgaccaatctggaatattccgatgcgcagattctggagctttaccgtgccagatggcagattgagcaattgtttttccggcttaggtcgctgtttggctacggcgacgttccgagcgtgcgcgacgacaccgcgcaggcgtggttttacggcaagctgctgctggctgcgatttgcgaagacatcctgaaaaggatgtcttttccccccgggctcggcgcggctatcggcgatattgttggggcgaagcttgtggagcgaattatgcctggttcttaa

SEQ ID NO: 69904 - protein, 307 aa, Unknown
  Obtained from environmental sample
  DOMAIN (43)...(273): Transposase DDE domain
  misc_feature (1)..(307): Xaa is any amino acid
MSKVAAFKRIKNSAGWLRWMAKGVCENSSLSLPKPSFLGRRRVILVDASSDAVKGSKQSDYRLHYAFDLFNFQCRSMELTGIKEGEKLSRYKFGSNDIAVADRIYCTISGMEHVLSQGASFILRFKSKGFHFYDAEGERLDILPRLRHLKAFGSLSIRCHYRLPDGTLRPLRIVAMKKNGKSIAASERRMIRKVSRKQERAVQEDTVELNKYIVLATNLEYSDAQILELYRARWQIEQLFFRLRSLFGYGDVPSVRDDTAQAWFYGKLLLAAICEDILKRMSFPPGLGAAIGDIVGAKLVERIMPGS

SEQ ID NO: 69905 - DNA, 639 bp, Unknown
  Obtained from environmental sample
  misc_feature (1)..(639): n is a, c, g, or t
gtgtccggttatgaacttaccattgcttatgacgacggggacagcgcgaaattcgtaattaaagaaaagtacgaagagcacaggaagaaaaaaaatgacgaaagaattgaaaatttatccacatattttaccgattcaagagacggccggaagtatcgcgccgtaaagataggcggcaagacgtggatggcggagaatctgaacataaagacgaacaattcgtggtgctatgacgaagagaattccaattgcgctaaatacggaaggctgtacgagtttgagacggcaaaaaaggcctgcccttccggatggcatctgcctaatccccaggagtggaaagatttaataacggttgccggcgacgccgcggccggtaagaacctgaagacgataacaggttggaataaaaacggtaacgccgcggatagtttcggtttttcggccctgccgggcggaggcataaacaacttcggccttttcgtcagtatcggcgaagtcggcgcttggtggataaacatggacgcggagtacaagggcggccccgtacgcagtaaacgtatgttcgacagccaagacatagtggaagagcactacagcggaaaggactacgggttttcggtgcgctgtgtcgcgaattaa

SEQ ID NO: 69906 - protein, 212 aa, Unknown
  Obtained from environmental sample
  misc_feature (1)..(212): Xaa is any amino acid
MSGYELTIAYDDGDSAKFVIKEKYEEHRKKKNDERIENLSTYFTDSRDGRKYRAVKIGGKTWMAENLNIKTNNSWCYDEENSNCAKYGRLYEFETAKKACPSGWHLPNPQEWKDLITVAGDAAAGKNLKTITGWNKNGNAADSFGFSALPGGGINNFGLFVSIGEVGAWWINMDAEYKGGPVRSKRMFDSQDIVEEHYSGKDYGFSVRCVAN

SEQ ID NO: 69907 - DNA, 639 bp, Unknown
  Obtained from environmental sample
  misc_feature (1)..(639): n is a, c, g, or t
atgccaaaacgacgaccgcccgaccccatcggattctactccgtgcttaccgacccgcttaaagggtacgaatacttaacgtcgctgttagttgataacggcgtctccgtcgtccagttacggatgaaaggagcgcctaagccgcttgttattgacaccgctttacagatgcgaaaaatcaccgaaggtacggatacgctgttgattatcaacgacgatcctcacatagccgtggaggtaggcgccgacggcgttcacgtaggacaaagcgatatgccgtataatgacgttagggctattgtcggggatgatatgttgattggagtatcaacacataatcttgaccaaacaataaacgcctgtaaactgccggccgattacatcggcgtggggccggtcttcgccacgcctacaaagaaaattccagatccggtgatagggattgacggaatgaaaaatatgctgtcggcgtcaattgttccggcggtggcgataggcggcatagatttggaaaacttacctagcgttttagcggccggagccaaaaacttctgcatggtcaggcagttgacacagagcgaaaatcctaaatcggtgttagagaagattgtccggatagtcaacggctttaaaatttga

SEQ ID NO: 69908 - protein, 212 aa, Unknown
  Obtained from environmental sample
  DOMAIN (12)...(190): Thiamine monophosphate synthase/TENI
  misc_feature (1)..(212): Xaa is any amino acid
MPKRRPPDPIGFYSVLTDPLKGYEYLTSLLVDNGVSVVQLRMKGAPKPLVIDTALQMRKITEGTDTLLIINDDPHIAVEVGADGVHVGQSDMPYNDVRAIVGDDMLIGVSTHNLDQTINACKLPADYIGVGPVFATPTKKIPDPVIGIDGMKNMLSASIVPAVAIGGIDLENLPSVLAAGAKNFCMVRQLTQSENPKSVLEKIVRIVNGFKI

SEQ ID NO: 69909 - DNA, 999 bp, Unknown
  Obtained from environmental sample
  misc_feature (1)..(999): n is a, c, g, or t
atgaagaagatactagtaacaggcggcgccggattcataggctcgaacttcatccgcatgatgttgaacggccacgacgatatctctattgtcaactacgacctgttgacttacgccggccgtttggagaacctgagcgatgttgacgacaacccgcgttacgcgtttgttaggggcgatatatgcgacgcggcgacggtgaagagcgtgttcaacaaatacggctttgacgcggtggcgcacttcgccgccgagagccacgttgacaatagcataaaggggccggcgcggttcgtcacgacaaacgtcctcggcacgcagaccctgttgcaggcggcgaaagaggcgtgggaggcggcgccgggcgacttcggcgggaggcgcttcgtccacatatcgacggacgaggtctacgggacgctcggggaggagggatccttcacagagtctacgccccttgccccgaacagcccgtattccgcgtctaaggcgggcagcgaccttctggcccgcgcctactttgagacctacggctttccggtcattatcacccgctgctcaaacaactacggcccgtaccaattcccggagaagctgatcccgctgatgatcacaaacgccctgaacaacaggccgctgcccgtctacggcgacggcatgaacgtgagggactggctctacgtgggcgaccactgccgcgccgtggatattgtattggaaaagggcagggccggggaggtatacaacatcggcgggaacacggagatgcgtaatgtggacatagtaaaacagatactctcgttgctggagaagccggagagtttgatatcgtttgtcgcggacagattgggacacgacagacggtatgccatcgacgcttcgaagattaagcaggaactggggtggaagccggagatggagtttgaggcggggatgcgggagaccattaagtggtatatctataggaacggggggttgccgccggcgtctttgagttaa

SEQ ID NO: 69910 - protein, 332 aa, Unknown
  Obtained from environmental sample
  DOMAIN (4)...(293): Polysaccharide biosynthesis protein
  misc_feature (1)..(332): Xaa is any amino acid
MKKILVTGGAGFIGSNFIRMMLNGHDDISIVNYDLLTYAGRLENLSDVDDNPRYAFVRGDICDAATVKSVFNKYGFDAVAHFAAESHVDNSIKGPARFVTTNVLGTQTLLQAAKEAWEAAPGDFGGRRFVHISTDEVYGTLGEEGSFTESTPLAPNSPYSASKAGSDLLARAYFETYGFPVIITRCSNNYGPYQFPEKLIPLMITNALNNRPLPVYGDGMNVRDWLYVGDHCRAVDIVLEKGRAGEVYNIGGNTEMRNVDIVKQILSLLEKPESLISFVADRLGHDRRYAIDASKIKQELGWKPEMEFEAGMRETIKWYIYRNGGLPPASLS

SEQ ID NO: 69911 - DNA, 864 bp, Unknown
  Obtained from environmental sample
  misc_feature (1)..(864): n is a, c, g, or t
atgaaactactgataataggctcaaccggtcaattaggcggcgattttgttaagatcgcgggacaacatcatgccgtcgtccccgtcgactacccgcaggttgacatacgcgacaaatcatccgtggaatccgtcataaaaaattccgctccggacgccgtgataaactgcgccgcgtttacggctgttgacgattgcgaagataaccgcgacgccgccttcgcgttgaacgccgacgcctgcgaaaatctggcgcttgccgcgaaggcccaaggggcgctgctcgtgcacataagtacggactacgtcttcgacggcgccgcctcgtcgccctacactgaagagtgccctgcaaacccgcggacggtctacgggaagtcgaagttgcgcggcgaggagattataaaggagctgtacggcggcggcggcatgattttcaggatcgcgtggctgtacggcgccggcggcgccaactttgtcaaaacgatccgccgcgtcgcgctatccaatcgtcaggaaaacaaaccgcttaaggtggtgaacgatcagttcggaacgcccacgtggacggtcagcgtctgccggcagatactctctgtcattgacagcggggaacgcggagtgtttcacgccacgtgcgagggggcgtgcacgtggtttgattttgcgagggagatcgtcgccgcctgcggcatagacgcggacgtcttaccttgcgcgacggaagagtttccgcgcaaagcgccgcgcccgcgctacagcgtgctcgaaaacgcgaggctcaaagctatgaacgcgcatatcatgccggattggcgtgaggcgtttcgtgaatttttatccacggaaagggggatgcaatga

SEQ ID NO: 69912 - protein, 287 aa, Unknown
  Obtained from environmental sample
  DOMAIN (5)...(198): Male sterility protein
  misc_feature (1)..(287): Xaa is any amino acid
MKLLIIGSTGQLGGDFVKIAGQHHAVVPVDYPQVDIRDKSSVESVIKNSAPDAVINCAAFTAVDDCEDNRDAAFALNADACENLALAAKAQGALLVHISTDYVFDGAASSPYTEECPANPRTVYGKSKLRGEEIIKELYGGGGMIFRIAWLYGAGGANFVKTIRRVALSNRQENKPLKVVNDQFGTPTWTVSVCRQILSVIDSGERGVFHATCEGACTWFDFAREIVAACGIDADVLPCATEEFPRKAPRPRYSVLENARLKAMNAHIMPDWREAFREFLSTERGMQ

SEQ ID NO: 69913 - DNA, 603 bp, Unknown
  Obtained from environmental sample
  misc_feature (1)..(603): n is a, c, g, or t
atggggcggattaatcggctgggatgggcgctattgctggctgcggcgttggcggttatgccggtcggggcggaggttgcgcatacggggacgctcattgacaacagggacgggaagacgtacaagacggtgaggatcggcgagcagacgtggatggcggagaatctgaattataagacggaaagcggttcttggtgctatgacgatgataattccaactgcgataaatacggcaggctatacgattggaatacggctaaggcggtctgtccgaaagactggcgccttccgtcaaaaaacggatggagagaattggccgccgcggcaggttctaagacaggcgctactaagctgaaatcaaagagcgggtgggatgaaaacggtaacggtacggacgattacggattttcggccctgcccggcggccggcgcatcaacgacggcaaattccgcaatgccggcaagcgcggctactggtggacggccacggggcacggtagcgggttcgccttcaaccggtacatgtaccatgccaaagaatacgtggacgaggacttcaacttcaggagcgacggtttttcggtacgttgcgttacggattag

SEQ ID NO: 69914 - protein, 200 aa, Unknown
  Obtained from environmental sample
  SIGNAL (1)...(24)
  misc_feature (1)..(200): Xaa is any amino acid
MGRINRLGWALLLAAALAVMPVGAEVAHTGTLIDNRDGKTYKTVRIGEQTWMAENLNYKTESGSWCYDDDNSNCDKYGRLYDWNTAKAVCPKDWRLPSKNGWRELAAAAGSKTGATKLKSKSGWDENGNGTDDYGFSALPGGRRINDGKFRNAGKRGYWWTATGHGSGFAFNRYMYHAKEYVDEDFNFRSDGFSVRCVTD

SEQ ID NO: 69915 - DNA, 609 bp, Unknown
  Obtained from environmental sample
  misc_feature (1)..(609): n is a, c, g, or t
atgcgggcgctatttatgacagcggcgttgattgccgtgttggtcggaacggcggcggctcaacaggcagggacactcaccgacggcagagacgggaagaagtacaggacggtgaagatcggtaagcagatatggatggcggagaatctgaattatcagacggacagcgggtcttggtgctatgagaacaaagccgacaattgcaagaaatacggcaggctgtatgattggaatacggctgtgacggtctgcccggccggatggaagctgcccgatacggcggggtgggacaggttgaagacgtcggcgagcggacgagagaccgcgggtaagaagttgaaatcaaagagcgggtggcataatcagagcgacgggagcagcggcaacggcacggacgattacggattttcggccctgcccggcggccaccggtactccgacggcggtttctacgacgccggcaacttcggctactggtggacggctacggagtacgatgccagcgacgcctacctccggtacatgaattacggcaacgacggcatgtacgaaaactactactacctcaaccgcggcgcggggtactccgtgcgttgcgtcagggattag

SEQ ID NO: 69916 - protein, 202 aa, Unknown
  Obtained from environmental sample
  SIGNAL (1)...(20)
  misc_feature (1)..(202): Xaa is any amino acid
MRALFMTAALIAVLVGTAAAQQAGTLTDGRDGKKYRTVKIGKQIWMAENLNYQTDSGSWCYENKADNCKKYGRLYDWNTAVTVCPAGWKLPDTAGWDRLKTSASGRETAGKKLKSKSGWHNQSDGSSGNGTDDYGFSALPGGHRYSDGGFYDAGNFGYWWTATEYDASDAYLRYMNYGNDGMYENYYYLNRGAGYSVRCVRD

SEQ ID NO: 69917 - DNA, 702 bp, Unknown
  Obtained from environmental sample
  misc_feature (1)..(702): n is a, c, g, or t
atgaacgcatcagccacggcagacccggatttggcggctcggctcaacgaagtccgcgaacggattgagcgcgcctgcggccgggcgggacggtcgccggactccgtgcggttggtggcggtcacaaagaaccatccggcggagactgcgcagcgcctgatcgacctcggagtgcgcgatatcggcgaaaaccgcgttcaggagattgaggagaaggcgccgcggctggtcggggagttcacggtgcacttgatcggccatctgcaaaccaacaaggcgcagaaggtctggccgctggcggggtggatacagtcggttgaccgcgaaaaactggtgcggcggctggaggggctgtacgacggcgggggcaagaagagggcgctcgtggaggtcaacacctccggggaggagtctaagtccgggtgtacgccggaggagtgcggacgtctttgcgagatcgtcgcggagagcgaagctttggaacttagggggcttatgacgatagggccgcttggcggcgacgaggcggcggttcgaagggcgttcgcgacgcttagggagctgtcgcaaaaatactgcggcggcgcggttggtacgccggagttgtccatgggaatgagcggggattttgagtgggcgattgaggaaggggcgactatggttaggatcgggacggtgcttgtcggcggtcgcgggtattaa

SEQ ID NO: 69918 - protein, 233 aa, Unknown
  Obtained from environmental sample
  DOMAIN (8)...(233): Alanine racemase, N-terminal domain
  misc_feature (1)..(233): Xaa is any amino acid
MNASATADPDLAARLNEVRERIERACGRAGRSPDSVRLVAVTKNHPAETAQRLIDLGVRDIGENRVQEIEEKAPRLVGEFTVHLIGHLQTNKAQKVWPLAGWIQSVDREKLVRRLEGLYDGGGKKRALVEVNTSGEESKSGCTPEECGRLCEIVAESEALELRGLMTIGPLGGDEAAVRRAFATLRELSQKYCGGAVGTPELSMGMSGDFEWAIEEGATMVRIGTVLVGGRGY

SEQ ID NO: 69919 - DNA, 3636 bp, Unknown
  Obtained from environmental sample
  misc_feature (1)..(3636): n is a, c, g, or t
atgcctactaaagaaagcggcgaaaaatgctcaacgccggggcgccgcgccgccatcgtcgacgcgttgaacaagtcgatagacatcttttccgcccaagaagaaaatacctttgacgaggtgatgaccaacggaatacggcctatggccgaggcggtgggtttagaccgcgtcgttttttacgccctggttgaaaaggacgggataaatcgcctggggcaagtctaccgctgggacaagtcggagggcgggcttatgtccatagccgacgaactgcgggtcctgcccaatgtcccggttgtggaaaagtggatatccgtcgcgtcgcaaggcgagcccatacgaatccgggagagcgattacgccgaggacgaggcggacttcttgcgtcgctacggcgtaaggtctatattggtggcgcccattttcacgcacgggaaactttggggcctcgtaaactttcaggatcacacgagcgaccgctattttgacgaagactgcgtcgatttgctgttttcggcggccagagtgttttcaaacgcggtcataagggcggaatcggagcacaacacccagaaagccctcaaagcgttggaacgccgcgaaaatatgtcggataccctaaatcgggtctccgtcatgtttctatcgcaacggaaagagacctttgaagagaccatgacgacgggcgtgcgggagatagccgatttgttcaacttggacaggctctcgatttggcgcaacttaaaaaaaaccggcgccttgcacgcctcccaaatataccgctgggacagggactccggcggcaccacagaagccacgcccggattggaagacgtcgcgtacgtgcggctcgcgccgcgatgggaaggcgttttcgccaaaggcgaaatcatcaacagtccggtaggccttctgcccgaagcgtctatgctgcggtcgttcggcgttgtgtcggcgcttatagcgccgatttttttcaacaacgccttgtggggtttcgccctccttgaagaccgccatacggagcgcttctttgaaaaagactgcgtcgaaatgatgctctcggcggtgctcctatgcgccaataccgtcatgcgcgccgacatggagcgcgagataataaacgcgaacgaatttacccgcgccgtcctcgacgcctccccgttgggattcaccgttttcgacgaaaacatccaaatactcgactgcaacgatattactttgaacgcgcttggaacaaccaaacaatactacatggaacatattttcgagttttcgcccgaataccaggacgacgggtcaaaatcctcagacaaggcggcggagataatcaggcgggtgcttaacggtgaaacgctgtcgttggagtggaagaaccgttcggcctcgggagagattattccttacgaccttacgctggtgcgcacaatatataatgggaagtacgtggcgctgtcttatcgatacgatctgcgcaaaataaaagcgatgtccgaaagcatacgcgaacaaggcgaactgcttaaaatcaggctggagcaacaagagttgatcgccgaactctcaaggggctttatctcatccggcgattccgagatgctggtaagagaggccatcgcaaaactcgggcgctaccataacgtttcattggtattcgttttctccatagattatgagcgtgaaaacacgcgtttagcctatcattggtgcgccgacggagcgccgccgcgactggcaatatctaatctgttcaagtatttaatatccctttttccggaaaccctgccggagagcgacgagataccgatagtcgtctgcgacgacaccggcgtcaattccgaacctgtttttcaggcgctccactccgtggacgtaatggcggtaatcggagcgccgctctatgtggacggccgcttatggggggtggtctgcgtggaacagaacggtacgccgcgccattggaccgagagagagcaagaattcgtctccgtaacggcaagcaccatagccggcgtaattatgcgcgacatatataccataaaactcaaagacgcgctgcataaggcgactcaagcaagcaaggcgaaaggcgaattcctatccaacatgagccacgagatgcgcactcccctaaacgcgataaccggcatgacggcaataggcaaaaacgcgaaagatatggaccgtaaagactacgccttaggcaaaatacaagacgcctcgacgcacttgctcggcttaatcaacgacattcttgatatgtctaagattgaggcgaacatgctgaaattgtcggccattgagttcagctttgacaagcttctgaaaaaagttgtcgaaatggtcaacttcagggtggatgagaagcaccaaaaattcatggtacgcatagacaactcgattcccgacgccctgtacggcgacgaccaacggctggttcaggttattataaacctgcttggaaacgcaatcaagttcacccccgaatacggctccatcacccttgacgcgcgctttttgggagaagaagacggcctctacaccatagagatttcggtaagcgataccggaatcggcataagccccgaacagcaaacgcacctgttccagtcatttcagcaggccgacggcagcacggtgcgcaaattcggcggcaccgggctcggcctcgccatatcaaaaaatatcgtggagatgatgggcggtaagatccggatcgaatcggagctcggaaagggttcaaaattcatttttaccgttcgtatgaaacgcgggacggcgaaaaaacgctctccggcgtcttcgggcgtgaatatgaacaatatccgaattctggccgtggacgacgaccacgatattctggaatatttcgaagaaacggcgctgagcttgggccttcactgcgataccgccgcaagcggagaggaggcgctcgcccttatggaccaacgcggcgcctatcatgtttgctttttggactggaagatgccgggcatggacggcatacagctcgcccacgaactgaaaacccgcgcgtccttagactcttttgtgataatgatctccgccgccgagtggagcgtcatcgaagaagacgcgaaaaaagccggcgtcgacaaattcatgtccaaaccgctgtttcaatccaccataaccgaaatcatccacgaatatctcggcgtcggctcgctctccaaagaatcgttcgcgaaggatgcgccgtcagctcttgaaaccgtcttcgccggacgatgcgtgctcttggccgaagacgtggagattaaccgcgagattgtgctggccctgcttgagcccacacaactgcaaatagactgcgcggaaagcggcgcggaagccgtccgcatgttcgcccaatcgccggataaatacgacctaatcttcatggacgtgcaaatgcccggcatggacggctacgaggcgacgcagcacatacgggcgctggacaccccctgcgccaaaaccgtccccatcgtggccatgaccgccaacgtattccaagaagacatagaaaaatgtctcgttgccggtatgaacagccacgttggcaagcctctggatttcgaggaagttataagcagtcttcgctcatatttagaggcgggaaaaagatga

SEQ ID NO: 69920 - protein, 1211 aa, Unknown
  Obtained from environmental sample
  DOMAIN (696)...(761): His Kinase A (phosphoacceptor) domain
  misc_feature (1)..(1211): Xaa is any amino acid
MPTKESGEKCSTPGRRAAIVDALNKSIDIFSAQEENTFDEVMTNGIRPMAEAVGLDRVVFYALVEKDGINRLGQVYRWDKSEGGLMSIADELRVLPNVPVVEKWISVASQGEPIRIRESDYAEDEADFLRRYGVRSILVAPIFTHGKLWGLVNFQDHTSDRYFDEDCVDLLFSAARVFSNAVIRAESEHNTQKALKALERRENMSDTLNRVSVMFLSQRKETFEETMTTGVREIADLFNLDRLSIWRNLKKTGALHASQIYRWDRDSGGTTEATPGLEDVAYVRLAPRWEGVFAKGEIINSPVGLLPEASMLRSFGVVSALIAPIFFNNALWGFALLEDRHTERFFEKDCVEMMLSAVLLCANTVMRADMEREIINANEFTRAVLDASPLGFTVFDENIQILDCNDITLNALGTTKQYYMEHIFEFSPEYQDDGSKSSDKAAEIIRRVLNGETLSLEWKNRSASGEIIPYDLTLVRTIYNGKYVALSYRYDLRKIKAMSESIREQGELLKIRLEQQELIAELSRGFISSGDSEMLVREAIAKLGRYHNVSLVFVFSIDYERENTRLAYHWCADGAPPRLAISNLFKYLISLFPETLPESDEIPIVVCDDTGVNSEPVFQALHSVDVMAVIGAPLYVDGRLWGVVCVEQNGTPRHWTEREQEFVSVTASTIAGVIMRDIYTIKLKDALHKATQASKAKGEFLSNMSHEMRTPLNAITGMTAIGKNAKDMDRKDYALGKIQDASTHLLGLINDILDMSKIEANMLKLSAIEFSFDKLLKKVVEMVNFRVDEKHQKFMVRIDNSIPDALYGDDQRLVQVIINLLGNAIKFTPEYGSITLDARFLGEEDGLYTIEISVSDTGIGISPEQQTHLFQSFQQADGSTVRKFGGTGLGLAISKNIVEMMGGKIRIESELGKGSKFIFTVRMKRGTAKKRSPASSGVNMNNIRILAVDDDHDILEYFEETALSLGLHCDTAASGEEALALMDQRGAYHVCFLDWKMPGMDGIQLAHELKTRASLDSFVIMISAAEWSVIEEDAKKAGVDKFMSKPLFQSTITEIIHEYLGVGSLSKESFAKDAPSALETVFAGRCVLLAEDVEINREIVLALLEPTQLQIDCAESGAEAVRMFAQSPDKYDLIFMDVQMPGMDGYEATQHIRALDTPCAKTVPIVAMTANVFQEDIEKCLVAGMNSHVGKPLDFEEVISSLRSYLEAGKR

SEQ ID NO: 69921 - DNA, 2565 bp, Unknown
  Obtained from environmental sample
  misc_feature (1)..(2565): n is a, c, g, or t
atgacagatcggccgagatgtccggcacaggcaattcctgtttggaatgccttgaggaacgcttttgagcaagagcgttttccgcagatgctgcttttggatgggcagcccggcgttggcaaaaaactcctcgctatgaatttggcaaaaatgctctgcgagcacagcagcgaacctgttatttggctaacacccatagatggcaaagccgatgatagagacactccagcaaaaatagattccaaggtgtcggagctttcgcagaaatttatgcaaaacccttttaatattggatatataacggaatctgcaattatatccgtgggaatggtggagcatctgctgaaaaattttgagtttaaagccgatggcaaccgcgccgttataataacaaatgcggatttgatgaatgaaaacgccgctaacaaacttttgaaaacatttgaggaagttccaccaaacacgtatttcgtattgacggcaaattccagacactcccttttgccaaccgtacgttctcgctcatcttgtttttctgttcctttattaaaaaacgaagaggtggtgaaaattttagcggattatggctataattcaccgcctgaaagcattttggaatttgccgctggctcggtagggaaggcgatgtttgcgatggattcaaattattcggaattgaaggagaagattgcagtttatgcggactatgccctcaaaggcgatgcttccgctgcaattttatatgcgcaaacaatagaaaaatcagcaaataccgctgcgttttttttagagggcttggctttgcattgccccggatatgtgcagagcattcattttctttttgcagcggtgtctgcaaaaagttcaccgcagaacaagcaattcaaaatatggcgcttagattggcgcaaaggcaatatgacaaacgcacaattagcattagaaatatcgaaaaggcataaggtatctattcttttggctaggattttggttttgcggggggttaaaacctgcgaagaatcggactcttggttgaattgggatacgccttgcgagcacgacccatttttgatgaaaaacatggaccaagccatagagttggtttgttccatgcgagaagccaaaaagaaggtgtggatttacggggactacgacttggacggaatttccggcgttgcaattttggcaggggctttggacgactggggccttccgtcaaattggatgctgcctaaccgttatgacggaggctacgggctttctctcacaaccttgcaaaagatgaaagactccggcgcagaatgtttgattttaatagacacgggcatcacggcagtggaagagataaaagccgctaaggaatatgggatgcaggttttggttatagaccatcacagaccgtcgggtgatggattgccttgtgccgatgcgattttagacccatgtttagatggttgcgaatatccaaacaagtctttgtgtgctgttggggttgcctataaatttttatatgctctttaccagaaaacaggcaaaccgctgagcgacttggaaaaatatttgccattggtttctatgggtactttggcagatatagtccctatgaatacggaaaatctttaccttgtgagaaagggaatgggaaaatttttaaactccgattgccttgcaattcaacttttatacgaaagatttgcaacagacaaaaattttgtgaatagcaacgacattcactaccgcatggcaccgctcttaaatgcgcccggcagaatagaaagcccagatatctccctaaaatttcttttgtgcaaggataaaggggaaatagagagcttgtttgaaaaacttatggggtgcaatgcccagcgcagaaaaatagagctggatattcacgctcaggcgattaagagaattgaggaaatttatggaaatgatttgccaaaggttctgatagtggattctttggaatggaatataggtgttgtgggaattgttgcagcgcgagttgctcaggggtataaacgcccaacggcgataatctccattcaaagcgatgggattgcggttgcgagcgcacgttccgctggttcgtttgattggcacgccgcacttttcccgtgcaggtctctttttatccgttggggcgggcacgtgaaagctgccggttttaacatagccgcagagaagataaacgagcttagagttcgtatggaagaacaggcaaacattcagggttttgcaccgatagttgaagagaatgttcattatgatttggaggtttcgctttcggaaatcaacgcaagttttttgaatgaattaaaaagattggaaccttttggcaacgaaaatccctatcccgtatttttggcaagacagattacggttaagaatttaaagctattgaacgaaagccatttgcgtttttatgcggttcagggcagaagttctatttccgccatagcgttccataaggcttatttgtctgattcgcttcaaaaagacgaagtaaatttgatttttgaggcccgttttaatgtcatcaaggagtggagaacgttcagttga

SEQ ID NO: 69922 - protein, 854 aa, Unknown
  Obtained from environmental sample
  DOMAIN (674)...(739): DHHA1 domain
  misc_feature (1)..(854): Xaa is any amino acid
MTDRPRCPAQAIPVWNALRNAFEQERFPQMLLLDGQPGVGKKLLAMNLAKMLCEHSSEPVIWLTPIDGKADDRDTPAKIDSKVSELSQKFMQNPFNIGYITESAIISVGMVEHLLKNFEFKADGNRAVIITNADLMNENAANKLLKTFEEVPPNTYFVLTANSRHSLLPTVRSRSSCFSVPLLKNEEVVKILADYGYNSPPESILEFAAGSVGKAMFAMDSNYSELKEKIAVYADYALKGDASAAILYAQTIEKSANTAAFFLEGLALHCPGYVQSIHFLFAAVSAKSSPQNKQFKIWRLDWRKGNMTNAQLALEISKRHKVSILLARILVLRGVKTCEESDSWLNWDTPCEHDPFLMKNMDQAIELVCSMREAKKKVWIYGDYDLDGISGVAILAGALDDWGLPSNWMLPNRYDGGYGLSLTTLQKMKDSGAECLILIDTGITAVEEIKAAKEYGMQVLVIDHHRPSGDGLPCADAILDPCLDGCEYPNKSLCAVGVAYKFLYALYQKTGKPLSDLEKYLPLVSMGTLADIVPMNTENLYLVRKGMGKFLNSDCLAIQLLYERFATDKNFVNSNDIHYRMAPLLNAPGRIESPDISLKFLLCKDKGEIESLFEKLMGCNAQRRKIELDIHAQAIKRIEEIYGNDLPKVLIVDSLEWNIGVVGIVAARVAQGYKRPTAIISIQSDGIAVASARSAGSFDWHAALFPCRSLFIRWGGHVKAAGFNIAAEKINELRVRMEEQANIQGFAPIVEENVHYDLEVSLSEINASFLNELKRLEPFGNENPYPVFLARQITVKNLKLLNESHLRFYAVQGRSSISAIAFHKAYLSDSLQKDEVNLIFEARFNVIKEWRTFS

SEQ ID NO: 69923 - DNA, 477 bp, Unknown
  Obtained from environmental sample
  misc_feature (1)..(477): n is a, c, g, or t
atgacagattcggccgagatacccgtccttagaaaggattttgttgtcgatccctaccagatctgcgaggcgaagcttttgggggcgcaagcggtgctgcttatcgcggctatactggacgtgaaggctcttgaggtttttatcaagactgcttcggaagtggggctttcggcgttagttgaaattcacagcgaggcggaagttgagcaggcgctggaagccggggcgaaaatcatcggcataaataaccgcgatttaaaaaccttcaaggtggataccggcattactacccggctgaaaaagcgcatacctgccgggatcatcaccgttgccgaaagcggcatcaagtcagcggacgatgctaaggcgatgaaagaggtcggcgttgacgctgtattaatcggagagagcctgatgcgctcggctgataaaaaacaattccttgaggaactgaaagcggcggctggcggtaggtga

SEQ ID NO: 69924 - protein, 158 aa, Unknown
  Obtained from environmental sample
  DOMAIN (2)...(151): Indole-3-glycerol phosphate synthase
  misc_feature (1)..(158): Xaa is any amino acid
MTDSAEIPVLRKDFVVDPYQICEAKLLGAQAVLLIAAILDVKALEVFIKTASEVGLSALVEIHSEAEVEQALEAGAKIIGINNRDLKTFKVDTGITTRLKKRIPAGIITVAESGIKSADDAKAMKEVGVDAVLIGESLMRSADKKQFLEELKAAAGGR

SEQ ID NO: 69925 - DNA, 654 bp, Unknown
  Obtained from environmental sample
  misc_feature (1)..(654): n is a, c, g, or t
gtgaaaatgaaaattaaaatctgcggtttattccgcgaacaggatattgactacgttaacgaggcgaggcccgattatgccggctttgtgtttgccgaaagcaagcgcaaagttatgcccgctcaggcggcaaaactgcgacagcgtcttgccgaagggatagcggcggtgggcgtttttgtggactcttccattgacgatgtcgtcggcctttgccgcgacgggatcatttcgcttgtccagcttcacggagcggaaggcgactcgtacatagcgcggcttanagaagctgctcacggcgttccagtgataaaggttatcaaaagcgcggagctgttgtcgcttgtggaagcgggaaaagccgtaacaccgtgcgccgactattatcttgtcgactcaggagctggcagtggcaaggcctttgactggaatctcttgcgagcctgtacgccctgcgcttcgtggctgcaatcgtcgggaaagcagtggtttctggcgggcggcataactcctgaaaatatcgagcgggcaatggagcttaatccgttcgccatcgacgtttccggtggtgccgaaaccgacggtataaaagacagaaataaaatagtacaattaacggcaatggtcaggaaacttaaggaaaaagcagtatga

SEQ ID NO: 69926 - protein, 217 aa, Unknown
  Obtained from environmental sample
  DOMAIN (5)...(208): N-(5'phosphoribosyl)anthranilate (PRA) isomerase
  misc_feature (1)..(217): Xaa is any amino acid
MKMKIKICGLFREQDIDYVNEARPDYAGFVFAESKRKVMPAQAAKLRQRLAEGIAAVGVFVDSSIDDVVGLCRDGIISLVQLHGAEGDSYIARLXEAAHGVPVIKVIKSAELLSLVEAGKAVTPCADYYLVDSGAGSGKAFDWNLLRACTPCASWLQSSGKQWFLAGGITPENIERAMELNPFAIDVSGGAETDGIKDRNKIVQLTAMVRKLKEKAV

SEQ ID NO: 69927 - DNA, 1185 bp, Unknown
  Obtained from environmental sample
  misc_feature (1)..(1185): n is a, c, g, or t
atgaacaaaggacgattcggagattacggcgggcagttcattcccgagactttgatgaacgagatcatcagtctggaaaaagctttcaatcactataaagatgacgttgcgtttagggcggaacttgacgatcttcttaaaaattacgcgggacgcccttcgcttttgtatttcgcgcggaagatgagcctggatttgggcggtgcaaagatctaccttaagcgggaagacttgaaccataccggttcccacaagatcaacaatgtgctgggacagaccctactcgcaaaaaagatgggcaagaccagaattatcgccgaaaccggagcgggccagcacggagtagcggcggctacggcggcggccctgctgggaatggagtgcgagatttttatgggaaaggaagacacggagcgccaggcccttaacgtgtaccgcatggaactgttaggtgctaccgtccatcctgtaacatcgggaacccaaacgctgaaagacgcggttaatgaaaccatgcgggaatggacaagccgcgttcatgacacccactatgtgcttggttccgtcatggggccgcatccctttcctgtcatggtgagggagttccaaagtgtaatcggcagagaggcgcgggaacaaattctggaaaaggaaggccagcttccctcggctgttctggcctgtgtcggcggcgggagcaacgcgatgggtattttttaccactttattccctccccggaagtgcggcttatcggctgcgaggcggcggggcttggggtggacacagacaaacacgccgccacaatcgcgaaaggttcggtagggatttttcacgggatgaaatcctatttttgtcagaattccgagggccagattgccccggtgtattcaatttcggcgggccttgattatccgggcatagggccggaacacgcctggcttaacgacagcaaacgcgcgacctacgtgcccgttaccgacgaggaagcggtggacgcgtttgagtaccttgcccgtaccgaggggatcatttgcgcggtggaaagcgcccacgcggtagcccacgccagaaagatagcgcgtaacttcggaaaaaacgaaaacatcgtcatatgtctttccggcaggggggacaaggatgtcttggcaatcgcacgataccggggggaaaagatacatgagtaa

SEQ ID NO: 69928 - protein, 394 aa, Unknown
  Obtained from environmental sample
  DOMAIN (47)...(376): Pyridoxal-phosphate dependent enzyme
  misc_feature (1)..(394): Xaa is any amino acid
MNKGRFGDYGGQFIPETLMNEIISLEKAFNHYKDDVAFRAELDDLLKNYAGRPSLLYFARKMSLDLGGAKIYLKREDLNHTGSHKINNVLGQTLLAKKMGKTRIIAETGAGQHGVAAATAAALLGMECEIFMGKEDTERQALNVYRMELLGATVHPVTSGTQTLKDAVNETMREWTSRVHDTHYVLGSVMGPHPFPVMVREFQSVIGREAREQILEKEGQLPSAVLACVGGGSNAMGIFYHFIPSPEVRLIGCEAAGLGVDTDKHAATIAKGSVGIFHGMKSYFCQNSEGQIAPVYSISAGLDYPGIGPEHAWLNDSKRATYVPVTDEEAVDAFEYLARTEGIICAVESAHAVAHARKIARNFGKNENIVICLSGRGDKDVLAIARYRGEKIHE

SEQ ID NO: 69929 - DNA, 699 bp, Unknown
  Obtained from environmental sample
  misc_feature (1)..(699): n is a, c, g, or t
atggagaaaacaaaggaatttatcctggagatgtcccgtgccggttccgatctggttgaaatcggaattcccttttccgaccctatagccgaaggtcctgttattcaggaagcgaacattcgcgccctccgcgcgggagccaccgtggaaaaactgttcgcgcttgtcgaagatgtccgcaaagtaactgacgcgccgctggtgtttttgacttacctcaacccggtctttcattacggatacgacgctttttttaagcgctgcggcgctgtcggccttgacggaatcatcatccccgatcttccctttgaggagcaggccgacgtgcgggaaagctcgtcaaaacacggcgtagacctcatctctcttattgcccctacctcggaagcgcgtatcaaagaaatcgctaaaaccgcctcgggctttatttacctcgtttcctcaatgggcgtaacaggcgttcgcggtgaaattaccaccgacatcgcttcgattgccgcctcggtcaagtcggtaacggaactgccggtggctgtcggttttggcattcacacgccggcgcaggcccgcgaaatggcccgctttgccgacggcgtaattgtaggaagcgcgattgtaaaaatcgtcgccgaacatggggagaatgcgggttcgtacatttatcaatacgtcagtgaaatgaagaaagcaataacatga

SEQ ID NO: 69930 - protein, 232 aa, Unknown
  Obtained from environmental sample
  DOMAIN (1)...(232): Tryptophan synthase alpha chain
  misc_feature (1)..(232): Xaa is any amino acid
MEKTKEFILEMSRAGSDLVEIGIPFSDPIAEGPVIQEANIRALRAGATVEKLFALVEDVRKVTDAPLVFLTYLNPVFHYGYDAFFKRCGAVGLDGIIIPDLPFEEQADVRESSSKHGVDLISLIAPTSEARIKEIAKTASGFIYLVSSMGVTGVRGEITTDIASIAASVKSVTELPVAVGFGIHTPAQAREMARFADGVIVGSAIVKIVAEHGENAGSYIYQYVSEMKKAIT

SEQ ID NO: 69931 - DNA, 1026 bp, Unknown
  Obtained from environmental sample
  misc_feature (1)..(1026): n is a, c, g, or t
gtgattccaggaaggttttttatccaagtttctgagaatgccattcaatgcgttctgtgccccaggcgttgcgtcctgtctgaaggcggagcgggcagttgcaaggtcaggtttaaccacggggggaaaggcgggatcccttactacgggtacatcacggccctcgcccttgaccctattgaaaaaaagcccctataccactttcgtcccggcacggagatactttcgctgggatttgccgggtgtaaccttcactgtccattttgccaaaactggcggatttcccaaagcacggacgtttccgggcaggtttatacgccgacagaaataattgccgccgcaaaaaaatccgcaaagaccgctcaggtttcaatcgcgtacacctattccgaaccccttgtacatatcgaatttcttttggattgcatgagggaagcgcgcaaggccggaatcgcaaacgtgcttgtaagcaacggctgtatcaatcccgaagcggcggaagaaatactgcccctaaccgatgctgccaacatcgatcttaaatgcttttcggaagaaacctacaaaaaagtccttggaggcgatcttggcgcggttacagcttttatccgcatggctgtcgaaaagggagtacacctggagcttaccaccctgctcgtaaccggccttaacgacagcaaagccgaacttgaaaaatgcggggattttatcgccgaactggaaaccggaaaaagttatgtgccctggcatctttcagcatatcaccctgattacaaatggcaggctcctgccacttctccacgcagcatcacagacgcggtaaaggcggccaaagaaaaactcttcttcgtttatgccgggaacattgccggggataacgacacactttgcccgtcttgcggaaaaagtattatcggtcgcaggggttacaggatcgacacgtcagggctctcccttaaaaacgaaaacggaattttttcttattactgcgcgttatgcggaaaaaaagcgccggtgaaatattag

SEQ ID NO: 69932 - protein, 341 aa, Unknown
  Obtained from environmental sample
  DOMAIN (76)...(237): Radical SAM superfamily
  misc_feature (1)..(341): Xaa is any amino acid
MIPGRFFIQVSENAIQCVLCPRRCVLSEGGAGSCKVRFNHGGKGGIPYYGYITALALDPIEKKPLYHFRPGTEILSLGFAGCNLHCPFCQNWRISQSTDVSGQVYTPTEIIAAAKKSAKTAQVSIAYTYSEPLVHIEFLLDCMREARKAGIANVLVSNGCINPEAAEEILPLTDAANIDLKCFSEETYKKVLGGDLGAVTAFIRMAVEKGVHLELTTLLVTGLNDSKAELEKCGDFIAELETGKSYVPWHLSAYHPDYKWQAPATSPRSITDAVKAAKEKLFFVYAGNIAGDNDTLCPSCGKSIIGRRGYRIDTSGLSLKNENGIFSYYCALCGKKAPVKY

SEQ ID NO: 69933 - DNA, 1599 bp, Unknown
  Obtained from environmental sample
  misc_feature (1)..(1599): n is a, c, g, or t
atgctgaacgataccgttacccttattcttgcccgcatcggggagaaagacataaagttccatttgaatatagacgacaacctgccatacaaactttacggtgacgatctgcgggtgaagcagatttttaccaacctgcttaccaacgccgtcaaatacaccaacgaaggaagcgtagagctcaatgtaagctgtgagcatgaaggggactcggtgtgggttcacgccgccatcaaagataccggcatgggtatgtccgcagatgacatgaaaaacctgtttcttgattatcacaggatagattcaaaatccaaccatcatgttgagggtacgggtttgggtttgtccatcaccaaaaaatttgttgaaatgatgggcggggaaatcaaggtggagagcgagctcggcaaaggctcaactttcagtttccgcataaagcagggatttgtcaccaacgaggttctgggagcggatgtttcaaacaaactccgcaacttctgcttcagcgacgacaagcgcattgtctcgcaaaagctggtaaagatcgatttgagttatgccaaagtgctggtagtggacgacattacgaccaatctggacgttgcggcgggcattttaagcagttacaaattgcatgttgactgtttaaccaacggaccggccgctatcgaaagaatacggtcgggaacaccagtttacaacgccatttttatggatcacatgatgcccggaatggacggcgttgaggcgaccgccataatagaaaaactgggcggaaaatttaaagatatgcccattatcgcgcttacagctaacgctgttcagggcgcgaaggaaatgtttttatccagcggatttgacggcttcatctcaaagccgattgatattcaggaaatgtacagaatcctgaaagaatggcttccggttgaaaaaatagagataagaaaagaaaaaacaatagaagaagaccacgcaaaagaaacagagagtgaatttatctccgaactgtataaaattgacgagatcgacgtggagatcggccttaaacgcgtttccggcatggaaaacatgtaccgggaaacaatagagcttttcaaccaaaaattggtgactgaatgtatcggcatgtacgacaagctgaattatggtgatataagcggcttcgccatttcggtacactccatgaaatccgcgctgtccaccataggggcgatgagcctgtccgaagctgctttaaggctggaaaccgcggccaaaggcaatgattttgatttctgcgtgcaaaggttcccggttttcaggaataagcttttaaagctgaacaatgatttgacggctgttttacaggaacacgctgaaacggaaaataaaaagaaaatgggcggggatcaagcctttctaaaagaacaagttgaaaaggcccttgaagccgcctctgactttgacagcgacgcgggccttaacgccgtaaacgatttgctgatctatgatttcggcgaacagagcaacgctatactggaaaaagccgccctcgcgtttaaggaatttaattatgacgacgttacggaacagttaaataagataaaagctcaggcgtaa

SEQ ID NO: 69934 - protein, 532 aa, Unknown
  Obtained from environmental sample
  DOMAIN (187)...(304): Response regulator receiver domain
  misc_feature (1)..(532): Xaa is any amino acid
MLNDTVTLILARIGEKDIKFHLNIDDNLPYKLYGDDLRVKQIFTNLLTNAVKYTNEGSVELNVSCEHEGDSVWVHAAIKDTGMGMSADDMKNLFLDYHRIDSKSNHHVEGTGLGLSITKKFVEMMGGEIKVESELGKGSTFSFRIKQGFVTNEVLGADVSNKLRNFCFSDDKRIVSQKLVKIDLSYAKVLVVDDITTNLDVAAGILSSYKLHVDCLTNGPAAIERIRSGTPVYNAIFMDHMMPGMDGVEATAIIEKLGGKFKDMPIIALTANAVQGAKEMFLSSGFDGFISKPIDIQEMYRILKEWLPVEKIEIRKEKTIEEDHAKETESEFISELYKIDEIDVEIGLKRVSGMENMYRETIELFNQKLVTECIGMYDKLNYGDISGFAISVHSMKSALSTIGAMSLSEAALRLETAAKGNDFDFCVQRFPVFRNKLLKLNNDLTAVLQEHAETENKKKMGGDQAFLKEQVEKALEAASDFDSDAGLNAVNDLLIYDFGEQSNAILEKAALAFKEFNYDDVTEQLNKIKAQA

SEQ ID NO: 69935 - DNA, 1704 bp, Unknown
  Obtained from environmental sample
  misc_feature (1)..(1704): n is a, c, g, or t
atgaagaagagaagaacatacnggcttaataacgccgacatactcaagatgtacatacggcggtatagagatgaaatttgcgatccaattatgaaagccgcccttgccggagattatgaaaaagccatagatatactcaacaccacagaagagctcgtgaaagaaacaagatcgcttgtttccgcgatgcgcgagatggcgaccgtcgtggcggaaagatcaagccacaacgcgcaagataccgccggacaatctaaaatgatgctcggtataacttccgtcgtttccattgttatttcaattttattggctttgttgatagcctcgcttatcgccgggccgataaaaaacatgacggccgtggcgaatgatgtggcgaaaggcaacctgagcgtaaatatcgacacgtcagctaaagacgaaacaggtgaactggcaaagagtttcgcggatatcgtaaacgtcgtcaatctgcttaccacagacctgaaaaatttaaacaaaaacatacaaaccgacagcgatgtggacacgaaattggacaccacccatttctcaggcacatactgcgaagttgtcgaaagcataaatactttcatttccgccctccttaacgcccagaaatcggcgctgctcaccgtgtctaccatgtttgagtcaaacccccaaatcaacttattgtttgacgaccgcttcaacgtaatcgactgcaatccggaagcgtttgtattcctgggcttncaaacaaaagaagaactgcttgacggattttacaatcgcgtgaacaaaagcattcctgaaattttgtccaacggtcagcgctcgctgtctttggacgaacagttaaggaagaccgcagaggaaggcgaggcaaaaatagagacggaactgcattttgaagacggcatacgcaaattgaacgttgagttaaggaaaataccctataaaggcagctttgccatagccgcctatgtttatgacttcaccgaaatcattaagcgggaaatgcagttggcaaacaccagggaaataaaggaattagttgaacttaccaaattgaaattggttgtccaggcgtccaaaatcggcttgtgggatatggaaatagtacatgatgatcccgtaaacccgaacaacacatttatatggtcggatgaattcaggaacatgctcggctatacggacgagaatgatttccccaacctgcttagcagttggagcgacctcttgcacccggatgacaaggaagcgacgctggccattttcgaaaaacatatacttgacaatacgggacaaacgccctacgacatagaataccgccttaaacgcaagaccggtgaatacgcctattaccgagcttgcggtgagtcaattcgctatcaggacggtaacgccgtacatgtggccggtacgctcgtggatattacagaaaccaagaaaatgcttctggaaaaggagaagcaaacggaggaagcgctagccgccaaccgcgctaaaagcaccttccttgccaacatgagccatgaactacgcacgcctctcaatgtggttatcgggcttaccggtttaataatggaagataanaacctggaaaaacatataacggataatctggtaaaaataaacaatgcggggagcacgctactaagcattgtaaacgatattcttgatctttcaaaatcgagtcgggcaagcttgaattaa

SEQ ID NO: 69936 - protein, 567 aa, Unknown
  Obtained from environmental sample
  DOMAIN (89)...(158): HAMP domain
  misc_feature (1)..(567): Xaa is any amino acid
MKKRRTYXLNNADILKMYIRRYRDEICDPIMKAALAGDYEKAIDILNTTEELVKETRSLVSAMREMATVVAERSSHNAQDTAGQSKMMLGITSVVSIVISILLALLIASLIAGPIKNMTAVANDVAKGNLSVNIDTSAKDETGELAKSFADIVNVVNLLTTDLKNLNKNIQTDSDVDTKLDTTHFSGTYCEVVESINTFISALLNAQKSALLTVSTMFESNPQINLLFDDRFNVIDCNPEAFVFLGXQTKEELLDGFYNRVNKSIPEILSNGQRSLSLDEQLRKTAEEGEAKIETELHFEDGIRKLNVELRKIPYKGSFAIAAYVYDFTEIIKREMQLANTREIKELVELTKLKLVVQASKIGLWDMEIVHDDPVNPNNTFIWSDEFRNMLGYTDENDFPNLLSSWSDLLHPDDKEATLAIFEKHILDNTGQTPYDIEYRLKRKTGEYAYYRACGESIRYQDGNAVHVAGTLVDITETKKMLLEKEKQTEEALAANRAKSTFLANMSHELRTPLNVVIGLTGLIMEDXNLEKHITDNLVKINNAGSTLLSIVNDILDLSKSSRASLN

SEQ ID NO: 69937 - DNA, 666 bp, Unknown
  Obtained from environmental sample
  misc_feature (1)..(666): n is a, c, g, or t
atgaactccaaaactattttactcgttgaggacgatgcaataatcgcgtccggccttgcgtacgcgcttgaacgggatggatattccgttattcacacagcaagcgtcaaagaagccgcaagcgcggcattaaagaacaagttcgacctcgcgatactggatatgcagttgccggacggaacaggctttgacgttcgggaacaccttaaaaatacggaaaccgccgtcatatacctgaccattgttgacgatgagggcaacattgtccgtgcgttcgatggcggcgcggacgattatattaccaagccgtttcgcctgcgggagtttctcgccagggtaaaacggactttaaacgcgcatggcggtaaagagcgttcgtcagcgttgacactcggcggcgttacaatcgacacggcggcaaggcaagcgcgaattaacggtaatttgcttgaccttacagcgttagaatatcgtttgctcttaattttcgcgtcaaataaagggcaaattttgacacgatcacagatacttgaaagcatttgggattctgcggagaatttcgtggaagataacactctcactgtatatatcaagcgtctgcgcgaaaaagtcggcagcgccgtaaatattgaaactgtgcgggggcttggttatcgtgctgattag

SEQ ID NO: 69938 - protein, 221 aa, Unknown
  Obtained from environmental sample
  DOMAIN (147)...(220): Transcriptional regulatory protein, C terminal
  misc_feature (1)..(221): Xaa is any amino acid
MNSKTILLVEDDAIIASGLAYALERDGYSVIHTASVKEAASAALKNKFDLAILDMQLPDGTGFDVREHLKNTETAVIYLTIVDDEGNIVRAFDGGADDYITKPFRLREFLARVKRTLNAHGGKERSSALTLGGVTIDTAARQARINGNLLDLTALEYRLLLIFASNKGQILTRSQILESIWDSAENFVEDNTLTVYIKRLREKVGSAVNIETVRGLGYRAD

SEQ ID NO: 69939 - DNA, 870 bp, Unknown
  Obtained from environmental sample
  misc_feature (1)..(870): n is a, c, g, or t
ttgaaactgtgcgggggcttggttatcgtgctgattagaaaaagtgaaattaaaaatttatccgacaatattcgcagaattatcgacgggcagacggttgacttgcgtgataaccgcgagggcgtgttcagcatattaagaaacgatattcatacccttgccaatcttaaaaatgaacaagttaacgcattgcagcgtgagcgggataaattaaaagacgcgcttacggatatatcgcaccaacttaaaacgccgctgacttcaatgttgattatggctgaccttctcgaaaacgctctcttgtcggacgccccgccgcttgaaaagcaaacggaatttattacgaatataaaaactggtcttacccgcatggagtggcttgtttccgcacttcttaaaatggcgaaacttgatacgggcgcggcggagtttcggagagaaaccgtatcatcaaacgttctcgcaagccttgcgctggaaccattgcaaatactacttgacataaaaaatcaatgtgtagaagtttctggcgttacggaacttgtctgcgataaacgctggactgccgaagcgttgacaaacgtattgaaaaacgcttctgagtattcgcctgacggagagataatccgtattgaatccggcatgaatcccatctgcaaatggatttccgttacggacagcggcgaaggtataccgaaagaaaaaattgcctctctgttcaaacgatttgaaggttcgcggagcgataaaggctacggtatcggtttgccgctcgcgctcgccatcatgcgcggacaaaacggcgacatagaggtatcaggcggcggtaacgactccggcgcggtatttacgttgaaattctataagtga

SEQ ID NO: 69940 - protein, 289 aa, Unknown
  Obtained from environmental sample
  DOMAIN (70)...(140): His Kinase A (phosphoacceptor) domain
  misc_feature (1)..(289): Xaa is any amino acid
MKLCGGLVIVLIRKSEIKNLSDNIRRIIDGQTVDLRDNREGVFSILRNDIHTLANLKNEQVNALQRERDKLKDALTDISHQLKTPLTSMLIMADLLENALLSDAPPLEKQTEFITNIKTGLTRMEWLVSALLKMAKLDTGAAEFRRETVSSNVLASLALEPLQILLDIKNQCVEVSGVTELVCDKRWTAEALTNVLKNASEYSPDGEIIRIESGMNPICKWISVTDSGEGIPKEKIASLFKRFEGSRSDKGYGIGLPLALAIMRGQNGDIEVSGGGNDSGAVFTLKFYK

SEQ ID NO: 69941 - DNA, 726 bp, Unknown
  Obtained from environmental sample
  misc_feature (1)..(726): n is a, c, g, or t
ttggcttgtcagaataactttatcaagaatgttaggaggtttcagatgtctattctgcaagttcaaaatttgacaaaaacctacggcaaaggcgatacgaccgtcacagcgttgggcggcgtttcgtttgccgtggaaaaaggcgagtttgtcgcggttgtcggcgcgtccggctccggcaaatccacgctcatgcacttaatcggcggtgttgaccgcccgacatcgggcagcgtaacggttgacggcaatgaaatttacaaattgaacgaaagcgaactggcgattttccgccgccggaacatcgggataatctaccaattctacaacctgattccgacgcttaccgccggggaaaacatcatgctgccgcgtctgctcgacaaccgaaagccggacgaagacaaactgcgggctatccttgaaacgattggcctttccgaccgggcgaaacatttgccgagtgaactgtccggcggccaacagcaaagggtgtctgtcggcagggtgctaatcaacgatcccgcgcttattctagcggacgaacccacgggcaaccttgacagcaaatcaagccgcgagattatcgatctcttaaaattggcgaacaagcgttacaaccaaacgctgctcataatcacgcacgatgaaaaaatcgcgctccaggcaagccgtgtaatcactattgaagatggtttaatcattcgggacgaggagatgcgctga

SEQ ID NO: 69942 - protein, 241 aa, Unknown
  Obtained from environmental sample
  DOMAIN (33)...(235): RecF/RecN/SMC N terminal domain
  misc_feature (1)..(241): Xaa is any amino acid
MACQNNFIKNVRRFQMSILQVQNLTKTYGKGDTTVTALGGVSFAVEKGEFVAVVGASGSGKSTLMHLIGGVDRPTSGSVTVDGNEIYKLNESELAIFRRRNIGIIYQFYNLIPTLTAGENIMLPRLLDNRKPDEDKLRAILETIGLSDRAKHLPSELSGGQQQRVSVGRVLINDPALILADEPTGNLDSKSSREIIDLLKLANKRYNQTLLIITHDEKIALQASRVITIEDGLIIRDEEMR

SEQ ID NO: 69943 - DNA, 1266 bp, Unknown
  Obtained from environmental sample
  misc_feature (1)..(1266): n is a, c, g, or t
atgaaactaaccgcaaaattggcgtacagccagctaataaacaacaaggcgacgaccctttggactcttttcggcgttgttttaagtatcagtatgcttacggcgataggcggcgttgccaattcaatttacagaatggttagacgcggcttccagcggcttatggacgaaggctttatcacgggagaaatagccgatgcgcagatggttggaatgtatgtggttatcggtattttcacagccattattgtcataatcggcgctgtcgttatgtcaaacgcgttttcaatgtcggctgacaaaaggataaaccattttggcatactgaaaagcgtcggcgcgacaaaacggcagattatttcaaccgtgatgtatgaagccgtttggctaagcgtaatcggcatacccgtcggcctggttttgggcacagcattgcagttcggcgttacggcgattatgaaccaagcgttggtgtccgttaatatctccaatggttatgaccagtatgtggagtatttgataaacgcgcccgttgcctttttatcaaccgtcatcggtttctttaccgtgcttatgtcggcatggcttcccgcgagtaaggcggcgcggatttccgctatggacgcaataaggggcaatacgcgaaccgataaaaagaaagcgaaaaaaccaggaatgcctttgttattgccccgcgtttttggcgcggaggggcttttggcgggtaaatatatgtcgcttaacaaaaaacgctacgcggctgtggtacgttcgctaacgataagcacgattttgcttatcatgggcggtgctttcgctgaaaacctccattcggcgtttgttctcgctttccctgaaatacgctacacaagtgccgttacggtaggcgtcaatttatacaggatcgtggaaagcgccgacgccgaaagttcgattatcgagaaagtatcggcggctcttgattcttacaaagatccgctagctgcggcggtattgttcaatcccaactataccgccgaattaagagcggacgcgtttacggcggactaccggaaatatgtctcaggcgaaaatacggttaaggcaaatgtcatcagcttcgacgacgggatgtacagaaaaatccttgagttggcgggagcgaaatacggagaagccgttttgtttaaccgctggaattacaaaagcggaaataaagtgacgctcttgccccgtttaattcgccgaaggtttactcaccgtttcctcatcggacggggtacgtga

SEQ ID NO: 69944 - protein, 421 aa, Unknown
  Obtained from environmental sample
  DOMAIN (23)...(206): Predicted permease
  misc_feature (1)..(421): Xaa is any amino acid
MKLTAKLAYSQLINNKATTLWTLFGVVLSISMLTAIGGVANSIYRMVRRGFQRLMDEGFITGEIADAQMVGMYVVIGIFTAIIVIIGAVVMSNAFSMSADKRINHFGILKSVGATKRQIISTVMYEAVWLSVIGIPVGLVLGTALQFGVTAIMNQALVSVNISNGYDQYVEYLINAPVAFLSTVIGFFTVLMSAWLPASKAARISAMDAIRGNTRTDKKKAKKPGMPLLLPRVFGAEGLLAGKYMSLNKKRYAAVVRSLTISTILLIMGGAFAENLHSAFVLAFPEIRYTSAVTVGVNLYRIVESADAESSIIEKVSAALDSYKDPLAAAVLFNPNYTAELRADAFTADYRKYVSGENTVKANVISFDDGMYRKILELAGAKYGEAVLFNRWNYKSGNKVTLLPRLIRRRFTHRFLIGRGT

SEQ ID NO: 69945 - DNA, 1092 bp, Unknown
  Obtained from environmental sample
  misc_feature (1)..(1092): n is a, c, g, or t
atgtttcttgaactgatttatcccttattcagattctttacgcctttgtatgtttttgtatatcttaccttccgcggtgcttttgccgcccttaccactcttcttatctgttatatctttggcggaaaaattattgaacttatccgcaaattaaaaataggccagtcaattagggaagacggtccgcagacccatctgcctaaatccggaacgccgactatggggggaatatttatcatcggctcggtgattatttccatggtgctctggggggatcctgataacagaatggtgtggctgcccatgcccgcctttaccgcctttgggataatcgggtttattgacgactacntgaaagtcagccgtcataattcagacggcctgcccgcntgggggaagcttgccgggcagtttattgtggcgctgggagtcgtgctgtacctgtatttttccgcgggcggcgcgtcgctcagagacgtgacttcgctgtatatacctttcttcaagaatccgattattgaccttgggccgctctggataccctttggcatactgcttataatgggcgaatcaaacgcggtgaatttttccgacgggcttgacgggctgctggccggcctcctgatcctcgtgtttatcgccctggcgatacttacctatatttccggccgcaccgactacgcctcatacctgggcataccgtatattcagggcgccggggagcttacggttgtctgcctcgcgattgtcggcgcgcttatcggtttcctgtggtttaacgcccacccggcggaggtcttcatgggcgatgtgggcagcctttccctgggcggggttgtcgcggttatttccctcatcataaaaaaagaaatactggttcttattatcggcggcgtgttcgtgctggaaatcgcgtctgtcattatacaggtgatatcgtttaagctgcggaagaagagggtgttcctcatgtcaccgctgcatcatcattttgagctgagcggctgggcggaaacaaaggttgtgacccgcttttggatattgggagggttattcgctataatcgccctctcgaccttaaagatacagtag

SEQ ID NO: 69946 - protein, 363 aa, Unknown
  Obtained from environmental sample
  DOMAIN (98)...(293): Glycosyl transferase family 4
  misc_feature (1)..(363): Xaa is any amino acid
MFLELIYPLFRFFTPLYVFVYLTFRGAFAALTTLLICYIFGGKIIELIRKLKIGQSIREDGPQTHLPKSGTPTMGGIFIIGSVIISMVLWGDPDNRMVWLPMPAFTAFGIIGFIDDYXKVSRHNSDGLPAWGKLAGQFIVALGVVLYLYFSAGGASLRDVTSLYIPFFKNPIIDLGPLWIPFGILLIMGESNAVNFSDGLDGLLAGLLILVFIALAILTYISGRTDYASYLGIPYIQGAGELTVVCLAIVGALIGFLWFNAHPAEVFMGDVGSLSLGGVVAVISLIIKKEILVLIIGGVFVLEIASVIIQVISFKLRKKRVFLMSPLHHHFELSGWAETKVVTRFWILGGLFAIIALSTLKIQ

SEQ ID NO: 69947 - DNA, 582 bp, Unknown
  Obtained from environmental sample
  misc_feature (1)..(582): n is a, c, g, or t
atgagattggacacttcgggcggcgttacggcggcggacttattgaccaggctgccggaaagagagctggcaaacctcctttataataatgccggggaaagattttcccgccgtattgccgcccgtgtcataaatcaacgccagaaagggaatgtaactacgacttccgcccttgccgagttggtagaaagggcagtgcctgcttcttacaggcatgggcctattcatcccgcgactaagacttttcaagctttaagaatcgcggtaaacggggagctttcaaggcttccatctctccttgaggcggcgcttaggactctggagccggggggacggctcgcagttatcagttttcattcattggaagacagaattatcaaacaattcttcagggaaatgaataaagactgtacatgtcctcctcaagcgccgatatgtagatgtgaggggcgccgctcaatcaacgtgcttaccaaaaaagggatttctcccggaaaagaagagattgagcggaatcctccttcccgaagcgccagactgcgggtagtagagaaaattttagacgaggacgcgcatgattaa

SEQ ID NO: 69948 - protein, 193 aa, Unknown
  Obtained from environmental sample
  DOMAIN (1)...(186): MraW methylase family
  misc_feature (1)..(193): Xaa is any amino acid
MRLDTSGGVTAADLLTRLPERELANLLYNNAGERFSRRIAARVINQRQKGNVTTTSALAELVERAVPASYRHGPIHPATKTFQALRIAVNGELSRLPSLLEAALRTLEPGGRLAVISFHSLEDRIIKQFFREMNKDCTCPPQAPICRCEGRRSINVLTKKGISPGKEEIERNPPSRSARLRVVEKILDEDAHD

SEQ ID NO: 69949 - DNA, 312 bp, Unknown
  Obtained from environmental sample
  misc_feature (1)..(312): n is a, c, g, or t
atgacggaattttcgcacactcctgttttgcttgaagaaacgctcaatttgctcggtccacgcgggaaagacgaattgatgatagacgggaatactggggaaggagggcacagttataacttcctttccaaatttaaggaattgaaaatggtttgtattgacgcggataaagacattctcgccatagccgaagagaggcttaaagaatttaaagaccgcgtctattttattacggctggtcttatgacttttttgccgattatccgtccgaacttaaaaggccggacacaatattttttgatcttggcgtaa

SEQ ID NO: 69950 - protein, 103 aa, Unknown
  Obtained from environmental sample
  misc_feature (1)..(103): Xaa is any amino acid
MTEFSHTPVLLEETLNLLGPRGKDELMIDGNTGEGGHSYNFLSKFKELKMVCIDADKDILAIAEERLKEFKDRVYFITAGLMTFLPIIRPNLKGRTQYFLILA

SEQ ID NO: 69951 - DNA, 489 bp, Unknown
  Obtained from environmental sample
  misc_feature (1)..(489): n is a, c, g, or t
gtggtagacatgttatacggacaaactgacgttactcttgatgaaaaaggacgtataagccttcctgtctctttgcggaaagttctaggcgacgcgaaactaataattaaaccaagtgattatgatgatgaaaaatctctgtggctttttccggaaactgattataaagccatgttggaagaatacaaaaatgattacaaaaaaaggaaacgtattgtatcaaagaaacaccgcgaattcagccgccgttattttaattttaaggatgtggaaattgacaaggctggcaggatcgcgattcctcaggaataccgtgaatacgcgaatttatccaaggactgtttagttctgggcgtaggcgattatattgaaatttgggacaaagaaacttaccgcaaacattattctgaaaacaatgacgcttttgtttcagcgtccgaagagatttccaataaagcggaagagggcgaagaaggggatcaggaatga

SEQ ID NO: 69952 - protein, 162 aa, Unknown
  Obtained from environmental sample
  DOMAIN (4)...(76): MraZ protein
  misc_feature (1)..(162): Xaa is any amino acid
MVDMLYGQTDVTLDEKGRISLPVSLRKVLGDAKLIIKPSDYDDEKSLWLFPETDYKAMLEEYKNDYKKRKRIVSKKHREFSRRYFNFKDVEIDKAGRIAIPQEYREYANLSKDCLVLGVGDYIEIWDKETYRKHYSENNDAFVSASEEISNKAEEGEEGDQE

SEQ ID NO: 69953 - DNA, 678 bp, Unknown
  Obtained from environmental sample
  misc_feature (1)..(678): n is a, c, g, or t
atgaacgaaagcagcctccaccgcaagttaaagtaccaatatacgggaaaagggggcaaaaccgaggtttccgcgggggaatatgtagcggacggcagaagaaaggacggcgaatatattgaagttcaaactggcagttttggcccgttaaaggataaagtaaaggaattggccgcttcaagcagtgtcagaatcattcaccctgtcgcggtaaagaaaataattgaagtttacaagccggtaaatggggaggttcctttcggcgcactgctctaccgcagaaaaagcccgctaaaaggctcgccgtgggacatttttgacgctctcctttccgctccccttttgcccttaatcaaaggattatcaatagaagtcgtccttgtggacattcttgaaaaacgcgtaaaagacggaaaaggctcatggcgcaggaaggggatcagtctttatgacaaagagcttgccgcgtgtcatgaaagcgtcctttttaaaaaaccttcggattatctgcgctttatccccttcaagaaaagggaagaatttaccagttcacttttagctgaacgcgaggggattaacgccaatacggcaagaaaggcgttatatgtgctgacaaagatgggagcggtgaaaagaaagggaaagaacggtaacgcgtgggtatacgctataaaataa

SEQ ID NO: 69954 - protein, 225 aa, Unknown
  Obtained from environmental sample
  misc_feature (1)..(225): Xaa is any amino acid
MNESSLHRKLKYQYTGKGGKTEVSAGEYVADGRRKDGEYIEVQTGSFGPLKDKVKELAASSSVRIIHPVAVKKIIEVYKPVNGEVPFGALLYRRKSPLKGSPWDIFDALLSAPLLPLIKGLSIEVVLVDILEKRVKDGKGSWRRKGISLYDKELAACHESVLFKKPSDYLRFIPFKKREEFTSSLLAEREGINANTARKALYVLTKMGAVKRKGKNGNAWVYAIK

SEQ ID NO: 69955 - DNA, 768 bp, Unknown
  Obtained from environmental sample
  misc_feature (1)..(768): n is a, c, g, or t
gtgttattattacaaaaaggagataaatccatgaaaacaagatactctttagcgtgcgcttatgtattgataaccgtattattatcagggtgcagcaaagaaaccaacgagcaaaaacagagcacaatttccgtttatggaaccggcacagtattagtccagccggacataattaacatgagcattacgttaagaaatgtttcccagacgactaaaaaagcccaggaagaagtaagcaggatggtaaggcaggtgttaaaaatattaaaggacgcgaacattgaggaaaaaaatataaataccgcctcgctgactttcagcacggagtatgattattatacaggcagacgcactttaatcgggcaaaaagccgaacaaaggattacattttccatagaaggaattaatgacgacagtgaaaaagcgtcgggaataatagaccaactaatccaaattaacggaatagaattaaatcaggttaattacggcgtaaaaaacacatccgaatactatattagatcgcgcgagcttgcgtttgaaaaagccgaagaaaaagcgaaacagtacgctcagttgtcaaatctaaaactgataaaagtattaagcataacggatcaggggatgtcgcaagtgtcgcctatgaataacagattatcaaagcagatggccatggacgaactctacgccgccgccgacacttcaacaacaataccgattggcgaacttgaaatatcaacaaccatatttaccgtatttttactgaaatga

SEQ ID NO: 69956 - protein, 255 aa, Unknown
  Obtained from environmental sample
  DOMAIN (39)...(255): Protein of unknown function (DUF541)
  misc_feature (1)..(255): Xaa is any amino acid
MLLLQKGDKSMKTRYSLACAYVLITVLLSGCSKETNEQKQSTISVYGTGTVLVQPDIINMSITLRNVSQTTKKAQEEVSRMVRQVLKILKDANIEEKNINTASLTFSTEYDYYTGRRTLIGQKAEQRITFSIEGINDDSEKASGIIDQLIQINGIELNQVNYGVKNTSEYYIRSRELAFEKAEEKAKQYAQLSNLKLIKVLSITDQGMSQVSPMNNRLSKQMAMDELYAAADTSTTIPIGELEISTTIFTVFLLK

SEQ ID NO: 69957 - DNA, 951 bp, Unknown
  Obtained from environmental sample
  misc_feature (1)..(951): n is a, c, g, or t
ttgattgaaatgcccgcaaagtctgatacggtatatttgtcgcttgtagtgccttgctgcaacgaagaaaaaacactgtccaaatttttcgctgatacccttaagatatgcgagtcggtcaacaaaccttttgagataatttttattgacgacggttcaaaagataccacgcttaatatgctgaggcaaatggcgtccggcgacacgcgtattcattacatttccttttcgcgcaatttcgggaaagaagccgcgatgcttgcgggattacaggcgtcgcggggaacttatacagccattttggacgcggacgggcaagatccgcctgaacttattccccaaatgctggaagctgtcgagtcgggagaatatgactgcgcgggaacacggcggacaaaccgtaaaggagagccgcctgtccgctcgtttttcgcgcggcgtttttacaaaataatgagaaaatatacagatatcgacattgttgacggcgcccgggatttcaggctgatgaacagaaggtacatggacgcgcttttatccatgcctgaacgcaaccgcttttccaaaggcatattcccctggataggttttaacactaaatggttcgagtatgaaaatatcgccagatcggccggaaaaaccaaatggtcattctggaaactgttaatgtattcccttgacggaataaccgcgttttcatcaaaacctgtcgccattgtctcggtattggggataatattctttattattgcccttgccgccataatttttattattatccgtaaaatattatacggcgatcctgtcgccggctgggcgtctacgatctgtattatcctgttttgttcagggatacagttgtttacaataggcattttagggcaatatatcgcaaagacatacacggaaaccaaacagcgtccgcactatataatccgcgaagcgcggtaa

SEQ ID NO: 69958 - protein, 316 aa, Unknown
  Obtained from environmental sample
  DOMAIN (14)...(179): Glycosyl transferase family 2
  misc_feature (1)..(316): Xaa is any amino acid
MIEMPAKSDTVYLSLVVPCCNEEKTLSKFFADTLKICESVNKPFEIIFIDDGSKDTTLNMLRQMASGDTRIHYISFSRNFGKEAAMLAGLQASRGTYTAILDADGQDPPELIPQMLEAVESGEYDCAGTRRTNRKGEPPVRSFFARRFYKIMRKYTDIDIVDGARDFRLMNRRYMDALLSMPERNRFSKGIFPWIGFNTKWFEYENIARSAGKTKWSFWKLLMYSLDGITAFSSKPVAIVSVLGIIFFIIALAAIIFIIIRKILYGDPVAGWASTICIILFCSGIQLFTIGILGQYIAKTYTETKQRPHYIIREAR

SEQ ID NO: 69959 - DNA, 441 bp, Unknown
  Obtained from environmental sample
  misc_feature (1)..(441): n is a, c, g, or t
ttgatgataaaacaagcggttatagtcgcggcgggtcttggttcgcgtcttaaagaaaagacagtttcaatgcctaaaggatttattgaattgggcgggatcgccattgttgaatggtcggttcaaaaactgcttgcatgcggcgttgaaaaaattattataggtaccggttatcacgcggaagcatataacgagcttgcgaaaaaatatcccgccatacaaacagccttcagcgccgattttgaaacaacaagcagtatggctaccttgaacgtatgcgccccttatgtaacagatgattttttgcttttggaatcagacctaatctatgacagcatcggactaagcgttctttgcaacgatattcatgaaaatgttattctcgcttccggcgcaaccaattcaggcgatgaagtgtatctgaacctcaaccgagcctaa

SEQ ID NO: 69960 - protein, 146 aa, Unknown
  Obtained from environmental sample
  misc_feature (1)..(146): Xaa is any amino acid
MMIKQAVIVAAGLGSRLKEKTVSMPKGFIELGGIAIVEWSVQKLLACGVEKIIIGTGYHAEAYNELAKKYPAIQTAFSADFETTSSMATLNVCAPYVTDDFLLLESDLIYDSIGLSVLCNDIHENVILASGATNSGDEVYLNLNRA

SEQ ID NO: 69961 - DNA, 1134 bp, Unknown
  Obtained from environmental sample
  misc_feature (1)..(1134): n is a, c, g, or t
ttgattacagccgattatttttacaataaactcacagaaaagggagtcggctttttttcgggcgtacccgattctctccttaaagatttttgcgcgtatattacggatcactgtgatacaaatcactgtgaaaagcaaaatcatattatcgcggtaaatgagggagcagccgtcggtcttgcatgcggatatcatcttgccacaggacgcattccgcttgtgtatatgcaaaattcaggcatcggcaacgctgtaaatcctctgctctcccttgcggataacgatgtttaccgcatacccttagttgtcgtcataggctggcgcggagaacccggcgtacatgacgaaccgcagcatatcaaacaaggcaaagttacctgctcgcttcttgaaagcatgggcattccctacgcagtgcttgaaaataatgaggacggcgtaaaccgtcagattgaaacttgctttaaaacaatttccgaaacaggttcgccatacgcgcttgttatacgcaaggaaacattctcgccttatacccttaagaaaaaagaagaacataatgcggtaatgacgcgtgaagaagctatcgaagaaattgccgccaatcgcagcggaattattgtttccactaccggcatgatttcacgcgaattgtacgagttacgcgataaagcgggcgcaggtcacgcgcgcgattttcttaccgtaggctctatggggcacgcgtcttccatcgctctctccatcgctttgcaaagaccgcagctgcaagttacctgccttgacggagacggcgcggctcttatgcacatgggctcctttgcagcaatcggacagcaaaaaccgcgtaactactgccatatagttcttaataacaacgcgcatgattctgtcggcggtcagcctactatcgctccttttattgatattccggctgtcgcgcgcgcctgcggatatactaaagtttatcaggcgaaaacaaaaaaagaattacaaaaaattttatcaaaaaaaaacgaagggcttacgtttattgaagtgaaagtaaaaaaaggcgcgcgcaaggatttaggacgtccgaaatcgtcgccgcaggaaaacaaggcggtgtttatgaaatttattgaggaatattga

SEQ ID NO: 69962 - protein, 377 aa, Unknown
  Obtained from environmental sample
  DOMAIN (209)...(346): Thiamine pyrophosphate enzyme, C-terminal TPP binding domain
  misc_feature (1)..(377): Xaa is any amino acid
MITADYFYNKLTEKGVGFFSGVPDSLLKDFCAYITDHCDTNHCEKQNHIIAVNEGAAVGLACGYHLATGRIPLVYMQNSGIGNAVNPLLSLADNDVYRIPLVVVIGWRGEPGVHDEPQHIKQGKVTCSLLESMGIPYAVLENNEDGVNRQIETCFKTISETGSPYALVIRKETFSPYTLKKKEEHNAVMTREEAIEEIAANRSGIIVSTTGMISRELYELRDKAGAGHARDFLTVGSMGHASSIALSIALQRPQLQVTCLDGDGAALMHMGSFAAIGQQKPRNYCHIVLNNNAHDSVGGQPTIAPFIDIPAVARACGYTKVYQAKTKKELQKILSKKNEGLTFIEVKVKKGARKDLGRPKSSPQENKAVFMKFIEEY

SEQ ID NO: 69963 - DNA, 813 bp, Unknown
  Obtained from environmental sample
  misc_feature (1)..(813): n is a, c, g, or t
atggaagctcattcaggtttgtccggtttaataatagaaaatcttgaaattgagaaagaagacggcttgcacagttttgacggaatgtggtcgtcaagtttaacagactctacaagcaagggaaaacctgacattgaagcggttgatcttactacccgtttgcaggacttaacaaatattttagaatgtacgacaaagccgataatttttgacggcgacacaggcggccaacattttgctttcaccgtaaaaacacttgagcgaaacggagtatccgcagtcataatagaagacaaaaccggtcttaaaagaaattctctttttggcaccgacgttaatcaggaattatgtcccattcccgacttctgtgacaaaattaaagccggtaaacaggcgcaggttacaaaagaatttatgatcatcgcgcgtctggaaagtttaatagcgggcttccccgtctcacacgcgcttgaaagggggcgcgcttttgtcgacgtcggcgctgacggcgttatgatacatagcaaagaaaaaacaggcgatgacattaaagaattttgttcgcttttccgcgccgaatatcctcatgtaccgctggtgcttgttcctacaacgtataataaatttacagaaaaagaacttgcctcatggggcgcgaatatcattatctatgcaaaccatatgctccgttccgcgtatccggcaatgttgaacaccgcaaaaatgatcttacaaaacgagcgttctcttgaagcggattcggtttgtatgccgataaaagaaatactagaattaattcccggcggcaaataa

SEQ ID NO: 69964 - protein, 270 aa, Unknown
  Obtained from environmental sample
  misc_feature (1)..(270): Xaa is any amino acid
MEAHSGLSGLIIENLEIEKEDGLHSFDGMWSSSLTDSTSKGKPDIEAVDLTTRLQDLTNILECTTKPIIFDGDTGGQHFAFTVKTLERNGVSAVIIEDKTGLKRNSLFGTDVNQELCPIPDFCDKIKAGKQAQVTKEFMIIARLESLIAGFPVSHALERGRAFVDVGADGVMIHSKEKTGDDIKEFCSLFRAEYPHVPLVLVPTTYNKFTEKELASWGANIIIYANHMLRSAYPAMLNTAKMILQNERSLEADSVCMPIKEILELIPGGK

SEQ ID NO: 69965 - DNA, 378 bp, Unknown
  Obtained from environmental sample
  misc_feature (1)..(378): n is a, c, g, or t
atgtttcaattgacccggggtgaatatgataacttgaagtcacaaattgtgacttcaagttggggcggcagacggaagctgccgtttgtatttacggagcacggcgttataatgctgtcttctgttttgaacagcaagattgccacgaaaattaatattgccgttgtcaaggcttttattgatatgcggcgttatttatctaaacctgtgcatgaaaaactggtagatttagaaaaaatactgatgctgcatatagacgacacaggcaacaatttttctaagcatgcgaaaatgatcaatgaaattgttaataatttgaataaccttattgcaaagccgccgaagaccggaaggattggatttagtgttggggattaa

SEQ ID NO: 69966 - protein, 125 aa, Unknown
  Obtained from environmental sample
  misc_feature (1)..(125): Xaa is any amino acid
MFQLTRGEYDNLKSQIVTSSWGGRRKLPFVFTEHGVIMLSSVLNSKIATKINIAVVKAFIDMRRYLSKPVHEKLVDLEKILMLHIDDTGNNFSKHAKMINEIVNNLNNLIAKPPKTGRIGFSVGD

SEQ ID NO: 69967 - DNA, 933 bp, Unknown
  Obtained from environmental sample
  misc_feature (1)..(933): n is a, c, g, or t
atgaataaaacaatattttgcctgataatccttctctccctctcccaaacagcccgcgccgatgactacaaatggaacctaatagacgccatgatgaaaaataaccttgaagcaatagatacaatattaaaagcaaacgctccttcaatgtcattaacagataaaaatcttgtgatgaatttcgcgatgaactatgcttccggggaaaacgccttaaaagtttgccaaatattattaaaatataacatccgcccaagctcttatgatttatatacagcaataagcagaaacaggcaaaatagcgttattcaatttatgataacaagcggggcggctccgaatggggagatacttttgctggctatggaaaaacaaaggttcgatctggcaaaacaatttatagagacgggagtcgatgtaaattacagatatgctttgacaaaaaaatacgcggacggcatgacaccgcttttatacgcggtaaaatggggcaattatgatattgtaaaattattggtggaaaaaggggctaatataaatatacaggctgttaacggcgattcggcaatatctttagcgcgtaagaataacaataaagaaatttacaattatttgattgaacaaggcgcggttgaatttggcaataatacgccgtctcaaagcggcggtattgcgagtagtcaagcatataattttcaaatcggttcgtaccggctgtccggagggaatagttatttaaaattttcaggaagcgcaaacgccggaaatgtaaattatgtggatggaataaataataaaataaataatggttattacagaataacgggaaataatataacaatagtaatggatggaagcaattatgtgtataaaatagattctaacgagactttttccggaaatggggaaatatggataagaagcggaaattaa

SEQ ID NO: 69968 - protein, 310 aa, Unknown
  Obtained from environmental sample
  SIGNAL (1)...(20)
  DOMAIN (152)...(184): Ankyrin repeat
  misc_feature (1)..(310): Xaa is any amino acid
MNKTIFCLIILLSLSQTARADDYKWNLIDAMMKNNLEAIDTILKANAPSMSLTDKNLVMNFAMNYASGENALKVCQILLKYNIRPSSYDLYTAISRNRQNSVIQFMITSGAAPNGEILLLAMEKQRFDLAKQFIETGVDVNYRYALTKKYADGMTPLLYAVKWGNYDIVKLLVEKGANINIQAVNGDSAISLARKNNNKEIYNYLIEQGAVEFGNNTPSQSGGIASSQAYNFQIGSYRLSGGNSYLKFSGSANAGNVNYVDGINNKINNGYYRITGNNITIVMDGSNYVYKIDSNETFSGNGEIWIRSGN

SEQ ID NO: 69969 - DNA, 366 bp, Unknown
  Obtained from environmental sample
  misc_feature (1)..(366): n is a, c, g, or t
atgcgaaatttaacatgtattgtctgcccgatgggctgttcccttgaagtagacgatagcaaaggacaggattctcttgatgtaaagggaaacagatgtttacgcggcgcggcttacgcaatggaagaaatccgcgcgccaagacgcgttgtaaccgccacttgcgctattaatggtcaggtaaacggttctgtcagacgtgtgccggtaaagaccgctgcgccttgcccaaaggaaaagatatccgcccttctggaagatatttacaaggtgaaaattacccttccagtaaaagtcggcgacattgtaatcggcgactggaacggcagtaaaattgacatagttgcggcaaggacattaagctga

SEQ ID NO: 69970 - protein, 121 aa, Unknown
  Obtained from environmental sample
  DOMAIN (2)...(118): Protein of unknown function (DUF1667)
  misc_feature (1)..(121): Xaa is any amino acid
MRNLTCIVCPMGCSLEVDDSKGQDSLDVKGNRCLRGAAYAMEEIRAPRRVVTATCAINGQVNGSVRRVPVKTAAPCPKEKISALLEDIYKVKITLPVKVGDIVIGDWNGSKIDIVAARTLS

SEQ ID NO: 69971 - DNA, 741 bp, Unknown
  Obtained from environmental sample
  misc_feature (1)..(741): n is a, c, g, or t
atggcgcggcgcatgagctgggtgggctgtaaggtaaaagccgtagtggaaataatgccgtatcccgccggattgacgcgtaacattgttcagtgtcttaacgattataacattcccctttacctgtcgtcgcagaccacaggcgtcttcggcaatgaccgcgtagaaggaatagaagtcaccccgatgacaaacggcgtacttacgcccgaaaaaagttttcgtatagactgcgatacggttctgctttcagtcggtcttgttcccgaaaacgaattatctcgcgccgccggcgtagagttaaattcggttacaaacggaccgttagttgacagttctttaatgactaacatggacggagtttttgccagcggcaatgtgctccatgtccacgatcttgtcgattgggtctgcgaagaaagccgccgcgcgggacactacgccgcgtcatggctcaggggagaacatccctcattgcagatacatacaaaagcgggttctcatgtccgttatgtgaaccccgcgcggcttgcccccgacagggaaaatattatctatatgcgttccatgattgtaaaaaacgacgttgttctggaactgcgtcttggcgataaggtgattaaaagcaaaaaggagcgtcatgttcagccttcggaaatgatcagttttaaattgggtcctaaggattttgaaggcgcggatttaaattcggattccgttttggaattcagtataaattga

SEQ ID NO: 69972 - protein, 246 aa, Unknown
  Obtained from environmental sample
  misc_feature (1)..(246): Xaa is any amino acid
MARRMSWVGCKVKAVVEIMPYPAGLTRNIVQCLNDYNIPLYLSSQTTGVFGNDRVEGIEVTPMTNGVLTPEKSFRIDCDTVLLSVGLVPENELSRAAGVELNSVTNGPLVDSSLMTNMDGVFASGNVLHVHDLVDWVCEESRRAGHYAASWLRGEHPSLQIHTKAGSHVRYVNPARLAPDRENIIYMRSMIVKNDVVLELRLGDKVIKSKKERHVQPSEMISFKLGPKDFEGADLNSDSVLEFSIN

SEQ ID NO: 69973 - DNA, 456 bp, Unknown
  Obtained from environmental sample
  misc_feature (1)..(456): n is a, c, g, or t
atgaaagaactccaatatgacgcggcggtaatcggcggaggagccgcgggaatggcggcggcgcttgagttggaagcgcaaggtttttcctgcgcgttaatcgacagggaagatcaccttggcggtatcttaatgcagtgtattcacaacggttttggtctgcacgaattctcggaagaattgacaggtcccgaatttgcacagcgatttattgagcgcgtaataaaatcaaagatagcggtttaccttgacacaaccgttacgcgctttacgcaggataatccttcatcgcaggttaaagagctttactgcgtatctccgacaggcgcggtaaaaattaaaacgcgcgccgtattgctggcgatgggctgtcgtgaaaaaaccgaggtaatgtccgcattcccggctcccgtccggcgggaatttatacggcgggtcttgcgcagcgccttgtaa

SEQ ID NO: 69974 - protein, 151 aa, Unknown
  Obtained from environmental sample
  SIGNAL (1)...(21)
  misc_feature (1)..(151): Xaa is any amino acid
MKELQYDAAVIGGGAAGMAAALELEAQGFSCALIDREDHLGGILMQCIHNGFGLHEFSEELTGPEFAQRFIERVIKSKIAVYLDTTVTRFTQDNPSSQVKELYCVSPTGAVKIKTRAVLLAMGCREKTEVMSAFPAPVRREFIRRVLRSAL

SEQ ID NO: 69975 - DNA, 1215 bp, Unknown
  Obtained from environmental sample
  misc_feature (1)..(1215): n is a, c, g, or t
atgttcgaccaattaaggcgcgagttaaattttcccttccgcagatgcgggataattgtcgcagccctgcatgaagaggaaatgaaggtaatcgagcacctttatctgcaaggggtggaaaacgaagtaataggcatagagctttgttcccgctcgcggatactggaacttgagccgaaactttccgcggatacggtaggcggtctttacgcgccgggcggcggaattatagagccttaccgatttgtctttgcgctggtggagtccgcgcgcaaaaacgggacggagttgtttacgaattttaaggtagacgaggctagccgaagcggggatttttggagtatccgcgcggaagacggaagggtagtaaaagcgcgttatgcgattaacgcggcgggactattcgcggacgaagtctctaaagccttcaaggcggaagattttactattaccgcaagaaagggcgagtattttctattagacaggcttacaaaagcctgcccttcaagagtggtctttcccgtacccactacggtttcaaaaggaatgttggttattcctacggtggaagggactgctcttgtcggtcccaccgcggacgcggttgaagataaaaacgatttttctaccacagccaaacatttggaacagataattgtttcgggaaagaccatgataccgtctttaagccataacgatgttatcactaattttgcggggcttcgtccttgtcttggagaggatttttatatcgaggcttcaaaaaaagttcccgcttttgtgcaggttgccggaattcaaagtcccggacttacggcgtcgcccgcaatagccgagtatgtaaaaaatattttagtcgatatgggattacagctaacggaaaaaccgcattgggacccctatgtggaagatcacccgaaagccagagaacttgattttgaagaactcgacaactgcatcgcaaaagattccgcgtggggcagtattgtctgccgctgtgaaaatgtcagcgaagcggaaattattcaggctgtaaggcttgggcatacaacattggacggagtaaaatattttacgcgcgcgcaaatgggacgctgtcagggcggcttttgcacttacaaaataataaaaataattatgagggaagcaaatctttcatgggaagaagtaacaaaacacggcggtaaaagccgcatattggacggtgtgttatga

SEQ ID NO: 69976 - protein, 404 aa, Unknown
  Obtained from environmental sample
  DOMAIN (328)...(383): BFD-like [2Fe-2S] binding domain
  misc_feature (1)..(404): Xaa is any amino acid
MFDQLRRELNFPFRRCGIIVAALHEEEMKVIEHLYLQGVENEVIGIELCSRSRILELEPKLSADTVGGLYAPGGGIIEPYRFVFALVESARKNGTELFTNFKVDEASRSGDFWSIRAEDGRVVKARYAINAAGLFADEVSKAFKAEDFTITARKGEYFLLDRLTKACPSRVVFPVPTTVSKGMLVIPTVEGTALVGPTADAVEDKNDFSTTAKHLEQIIVSGKTMIPSLSHNDVITNFAGLRPCLGEDFYIEASKKVPAFVQVAGIQSPGLTASPAIAEYVKNILVDMGLQLTEKPHWDPYVEDHPKARELDFEELDNCIAKDSAWGSIVCRCENVSEAEIIQAVRLGHTTLDGVKYFTRAQMGRCQGGFCTYKIIKIIMREANLSWEEVTKHGGKSRILDGVL

SEQ ID NO: 69977 - DNA, 756 bp, Unknown
  Obtained from environmental sample
  misc_feature (1)..(756): n is a, c, g, or t
atgtcaaacgtatacagcgtaagcgaaagaatgcacaagatgcgggccaaactctaccccagctacctgccgggcaccgaggggagctacatcgcaagaaccactaacgaagcggcagtcactatcgaggacatctgcgccgccatgaagaaccgcggcggctttgacggcagttacgaagacgccctccagaccgtaaaacacttctacatggaaatggcgtaccagctctgcgacggcttctccgtcaacaccggctactttagcatacaccccaatatcggcggaaccttcaaagacgacaaggaagcccacgaccacaaaaagcaccccatcaccttccgcttccagtccctcaaagccctccgcgacctgcgtaacgacatagaggtaataatcgacggcattgccgacgtccagggctacatagccgaatttaccgacgttgacatgaacgcgacaaacaccatatatgtccccgacgaccagttcatcgtaaccgggcacaaaatcaagatagccggggacgaccccaccgtgggcgtgtacctggtccccgtagaaaaccccgcaaaagcgctaaaattaacccgcatagcggaaaacaccagttccaaaataatcggcataatacccgcctccacgggccacctccttaaccgtgtggaaatccgtacccagtttgccggttcgggttctatcatgctcaaaagcccccgtgttataaccagcagtttcacccttgaggagaactaa

SEQ ID NO: 69978 - protein, 251 aa, Unknown
  Obtained from environmental sample
  misc_feature (1)..(251): Xaa is any amino acid
MSNVYSVSERMHKMRAKLYPSYLPGTEGSYIARTTNEAAVTIEDICAAMKNRGGFDGSYEDALQTVKHFYMEMAYQLCDGFSVNTGYFSIHPNIGGTFKDDKEAHDHKKHPITFRFQSLKALRDLRNDIEVIIDGIADVQGYIAEFTDVDMNATNTIYVPDDQFIVTGHKIKIAGDDPTVGVYLVPVENPAKALKLTRIAENTSSKIIGIIPASTGHLLNRVEIRTQFAGSGSIMLKSPRVITSSFTLEEN

SEQ ID NO: 69979 - DNA, 873 bp, Unknown
  Obtained from environmental sample
  misc_feature (1)..(873): n is a, c, g, or t
atgggaaaaaaatttcttcttacttttttcttttttctcttttattttttcttttgtataagcgtttatgcccagcaggatgccgcgcccgacggctttgtgcggatacagggcgggtcctttatgatgggcagccccgcgtatgagacggggcgtgacaatgatgaagaccagcatcaggttactataagcggtttttacatggggcggtatgaggtaatgcagaaagagtatcaggaaataatggggacgaatccgagtaatttcaaaggggattatctgcccgtggaaaatgtaagctggtatgacgcgatagagtactgcaacaggcggagccagagggaagggctgactcccgcgtatacgatagacaagaaacagagggatccgaacaataaaaaccattatgatactgtaaaatggacggtaacgtggaacccaaacgcgaacggctaccgtctgccaacggaagcggagtgggagtatgcgtgccgtgccgggacaacaacgccttttaatacggggaacaacataacgactggtaatgccaattaccacgggaattatccgtacaataattacgcagagggtacataccgcgaaaggacaaccccagtgggaagcttcgcccctaatccctggggcttgtatgacatgcacgggaatgtgtgggagtgctgctgggactggtacggaagttacacgagcggctctcagactgacccgcgcggtccggtctccggcgcttaccgtgttttgcgcggcgggggttgggacgcttcggctgtgggcgtgcgttcggcccatcggggctacagtagtaacccgtcgaatcggagctacagttttggttttcggctggtgcgcccctga

SEQ ID NO: 69980 - protein, 290 aa, Unknown
  Obtained from environmental sample
  SIGNAL (1)...(24)
  DOMAIN (29)...(289): Domain of unknown function (DUF323)
  misc_feature (1)..(290): Xaa is any amino acid
MGKKFLLTFFFFLFYFFFCISVYAQQDAAPDGFVRIQGGSFMMGSPAYETGRDNDEDQHQVTISGFYMGRYEVMQKEYQEIMGTNPSNFKGDYLPVENVSWYDAIEYCNRRSQREGLTPAYTIDKKQRDPNNKNHYDTVKWTVTWNPNANGYRLPTEAEWEYACRAGTTTPFNTGNNITTGNANYHGNYPYNNYAEGTYRERTTPVGSFAPNPWGLYDMHGNVWECCWDWYGSYTSGSQTDPRGPVSGAYRVLRGGGWDASAVGVRSAHRGYSSNPSNRSYSFGFRLVRP

SEQ ID NO: 69981 - DNA, 321 bp, Unknown
  Obtained from environmental sample
  misc_feature (1)..(321): n is a, c, g, or t
ttgaaacacggcaccatttccctggttgaacaggacacgctggtggtcgccatttccaactgcgccccgttatacggcaaaataatgagcaacgccgagcaggtaataagccgtggagcgaaagtgctgcttattggcaactgcccggaggcgaaacctgacgataaaattttccatattgctttgccggaaagtcttgatttattttctccttcactgtcggttattgtgttacagcttttcagctattatgtcgccgcgaacaaggggctggatatagacaaacccagaaatttggccaaaagcgttaccgttgaatag

SEQ ID NO: 69982 - protein, 106 aa, Unknown
  Obtained from environmental sample
  misc_feature (1)..(106): Xaa is any amino acid
MKHGTISLVEQDTLVVAISNCAPLYGKIMSNAEQVISRGAKVLLIGNCPEAKPDDKIFHIALPESLDLFSPSLSVIVLQLFSYYVAANKGLDIDKPRNLAKSVTVE

SEQ ID NO: 69983 - DNA, 411 bp, Unknown
  Obtained from environmental sample
  misc_feature (1)..(411): n is a, c, g, or t
gtgaagatggggacgcagacttggatggcgcagaatctgaattatcagacggatagttcttggtgttataaggacagtgtttcctattgtaagaaatacggcagactgtacaattggaatacagcgataaccgtttgtccgattggatggaaattgcctgataccgctgattggaatagactggttgcaacggcgggcggaaaagagattgcgggtaaaaagttgaaatcaaaacgcgggtggaaaaaaaagggaattatatacttgactccgcaagggccgccggcgagactcggacggggactcggcaggattcgggcgaaaacaagacgtcggcgaggattctgcgggattaggtatataattcccaaaaaattgctatttgatctccgcgcatattatattgtataa

SEQ ID NO: 69984 - protein, 136 aa, Unknown
  Obtained from environmental sample
  misc_feature (1)..(136): Xaa is any amino acid
MKMGTQTWMAQNLNYQTDSSWCYKDSVSYCKKYGRLYNWNTAITVCPIGWKLPDTADWNRLVATAGGKEIAGKKLKSKRGWKKKGIIYLTPQGPPARLGRGLGRIRAKTRRRRGFCGIRYIIPKKLLFDLRAYYIV

SEQ ID NO: 69985 - DNA, 357 bp, Unknown
  Obtained from environmental sample
  misc_feature (1)..(357): n is a, c, g, or t
ttggcaaaccagattctgaaagacccctataattttgactttcttacgcttacttcagattacaaagaaaaagagcttgaagacgcgctaaccacaagcatcaccaagtttttattggaacttggacaaggtttcgcctatgtcggtaggcaagtccctataaaaataggcgagacagagcggtttatagaccagcttttttatcacttggaactgcgctgttacgtggtaatagagttgaaagccggtaaatttgaagccgaacacattggaaaactcggtctgtatatttcggcgatcaatcatcaaaagaaaaaaagtgaccgacgaacccacaatagggatgattatctgtaa

SEQ ID NO: 69986 - protein, 118 aa, Unknown
  Obtained from environmental sample
  DOMAIN (1)...(115): Protein of unknown function (DUF1016)
  misc_feature (1)..(118): Xaa is any amino acid
MANQILKDPYNFDFLTLTSDYKEKELEDALTTSITKFLLELGQGFAYVGRQVPIKIGETERFIDQLFYHLELRCYVVIELKAGKFEAEHIGKLGLYISAINHQKKKSDRRTHNRDDYL

SEQ ID NO: 69987 - DNA, 642 bp, Unknown
  Obtained from environmental sample
  misc_feature (1)..(642): n is a, c, g, or t
atgaaacttgacgatgaatacaaaaagtggctaaccgagttaaaaagccgaatacgccaaagccagataaaagcggctgtaaaggtaaataccgagcttttgctcctatactgggatttagggcatgatattactatccgccaaatggaaaaaacatggggcagcagcttttttgagcagttgagcagtgatttaaggagcgaattccccgaaatgcaggggttttctgccacaaatttgaaatattgcaagcgattttacctgttttatacacaaagcgacccaaatcgtcagcaacttgctgacgatttaattcttcaacaacctgttgaaaaattacaaattcttgaaaataaagggaattcaatccgtcaccaagttggtgacgattttgaaaaccaccccatttttcaaatcccgtggtttcatcatgtccaacttattaccaaatgtaaatccgtaaaagaagctctattttacgtccaaaaaaccattgaaaacgggtggagccgtgcagttttgatgaattttctggaagctgacctgttttccgctcagggaaaggcgctcactaacttttcccgtcttttacccgacccacaaagcgagcttggcaaaccagattctgaaagacccctataa

SEQ ID NO: 69988 - protein, 213 aa, Unknown
  Obtained from environmental sample
  DOMAIN (10)...(212): Protein of unknown function (DUF1016)
  misc_feature (1)..(213): Xaa is any amino acid
MKLDDEYKKWLTELKSRIRQSQIKAAVKVNTELLLLYWDLGHDITIRQMEKTWGSSFFEQLSSDLRSEFPEMQGFSATNLKYCKRFYLFYTQSDPNRQQLADDLILQQPVEKLQILENKGNSIRHQVGDDFENHPIFQIPWFHHVQLITKCKSVKEALFYVQKTIENGWSRAVLMNFLEADLFSAQGKALTNFSRLLPDPQSELGKPDSERPL

SEQ ID NO: 69989 - DNA, 1269 bp, Unknown
  Obtained from environmental sample
  misc_feature (1)..(1269): n is a, c, g, or t
ttgaaggaggattacatggacacactggatcagattaaaaaggcgataaaacacgccatgaacagcgagttttacaaaaaatatttcgcgggaattaacgtaaatgatataaaatccatggatgattttaagaagctgccctttacggacaaggaagatttaagggaagcgtatccgcttgggcttctggcggttcccgatgaaaaaatagtccgtattcactcgtcgtcgggcacaaccggcgctcctgtaattatcccgtatacgcagaaagacgtacacgactgggcggttatgttcaaacgctgttatgaaaccgcgggcatcaccaataaggatcgtattcacataacgccgggatacggactttggacggcgggcatcggctttcaggcgggcgccgaactgcttggcgccctggcgattcctatggggccgggcaacacggacaaacagattaaaatgatgatcgatatgcaatcgacggttatttgcgcgacgtcttcctacgctctcctgttggctgaagagattgaaaaacgaggggtcaaaagcaagattcacttaagaaaaggcgttatcggatccgagcgctggggcgaaaaaatgcgcaagcgcatcgccaacgaactcggagttgagttatacgacatttacggtttaacggaaatttacggtcccggcataggaataaactgccaaaaacaggacgccatgcatatgtgggcggactttttttattacgagattatcgatccaaaaacaggcgaggttttaccagaaggcaaaacgggcgagattgtcataacaacgctgtgcaaggaaggcgctcctctcatccgctacaggacgcatgacctcacaaaagcgattcatggcaagtgtgaatgcgggcttgagtatccgagaatcggcacgatcatcgggcgtagcgacgatatggtgaaggttcgcggcgccattatttacccaagccgcgtggacgagcttcttgccgccgtcgacggggtaagcagcgagtatcagatcatgatcgatcacatgaacggaaaagacatacttacccttttctttgaaacgcgcgaaacaggcgacgccgcccacaatctggaaaaaaccgttgagcatgaattcaagggaaagaattgggcttacgccaaaagcaaaagcccgttggtatgggcgagcttccaagaagcgagaaaaaatcaacgcgggtttttgacaacaggtattagggactggggatcagggactgatgccatgtaa

SEQ ID NO: 69990 - protein, 422 aa, Unknown
  Obtained from environmental sample
  DOMAIN (4)...(342): AMP-binding enzyme
  misc_feature (1)..(422): Xaa is any amino acid
MKEDYMDTLDQIKKAIKHAMNSEFYKKYFAGINVNDIKSMDDFKKLPFTDKEDLREAYPLGLLAVPDEKIVRIHSSSGTTGAPVIIPYTQKDVHDWAVMFKRCYETAGITNKDRIHITPGYGLWTAGIGFQAGAELLGALAIPMGPGNTDKQIKMMIDMQSTVICATSSYALLLAEEIEKRGVKSKIHLRKGVIGSERWGEKMRKRIANELGVELYDIYGLTEIYGPGIGINCQKQDAMHMWADFFYYEIIDPKTGEVLPEGKTGEIVITTLCKEGAPLIRYRTHDLTKAIHGKCECGLEYPRIGTIIGRSDDMVKVRGAIIYPSRVDELLAAVDGVSSEYQIMIDHMNGKDILTLFFETRETGDAAHNLEKTVEHEFKGKNWAYAKSKSPLVWASFQEARKNQRGFLTTGIRDWGSGTDAM

SEQ ID NO: 69991 - DNA, 429 bp, Unknown
  Obtained from environmental sample
  misc_feature (1)..(429): n is a, c, g, or t
ttgcttacaatatacctgcccgaattcagggcggtattgagtcagagtgttaaccaaagcagaagaggaacatcgggagcgggatttgcaaccgcgcaggggcttattgttctaagacgcaattatgtcccttcttttgttaccggtccaaaccccgaaccgctggaaaacaattcaaaagagagggttgtaaaactgcgccttacaagacgttcaattttggaagggttcagggagattattctaagcattaatcccgatacaaagttaatccggcggattgaaggcagaactatagcggaaagcgatcttcgctttgattttaccaacatcaaggttaatcagggaattcctgaactgcggtttctttatgattctcccgcgtctgcaaatatgtacaacaattttttattcagggattctgattaa

SEQ ID NO: 69992 - protein, 142 aa, Unknown
  Obtained from environmental sample
  misc_feature (1)..(142): Xaa is any amino acid
MLTIYLPEFRAVLSQSVNQSRRGTSGAGFATAQGLIVLRRNYVPSFVTGPNPEPLENNSKERVVKLRLTRRSILEGFREIILSINPDTKLIRRIEGRTIAESDLRFDFTNIKVNQGIPELRFLYDSPASANMYNNFLFRDSD

SEQ ID NO: 69993 - DNA, 1110 bp, Unknown
  Obtained from environmental sample
  misc_feature (1)..(1110): n is a, c, g, or t
atggaatctcttggcgaaaaattaaaaaccgcccgtacggaaaaaggacttagttttgatcaaataagccgggaaacaaatatttcccttcgttatcttgaagcgctggaagcagaaaactttggcgtctttccgggcgaaccgtatattgtcggctttttaaaaaattatggcgcttatcttgagcttgatgttcaaaaattaatttcgctttacaaggcgttgaggattcaggaacaacctattccggtagaacagcttttaaggcataagccaaaaccacctgggtttttactgccgctaattttaattttggctgttacaggcgcgggcggttctggcatctactacttaattaaaaacaggcagcaaagacaagcagaanatatacccgtaatccgtnaaccaaccgaatacgcaatggaaggcaatgttatggagcggcgtttttataaaaacgattcgctgttagtcccatccggaacagatatgtacagattggaacttaccaatatcggagaagtggtaacgattaaaacgccgggagaccctgtaatcctcgacttaagccaggacgccgtcgtagacttaaacaacgacggtattcctgatttgcgcataacggtagcggactttttaaaaaacaacaccgacatgggagcgttgctgcatttttacctgaatgacgccgccccgtacaacgcggatccaaaaaccgccgaaccgggcattcccttaataccggctaccggaagcccttccatcaccacaataattcccgcgtctccgagcgcgtatccttttaccttacaggttaactttcaggggtactgtatgttccgctgggaaattctcaacgaacgcgaccgcaaagaaaaaaaagagcgctattttcaacgtgcggaagatcttaacattcaggcgcaaaacggaatccgtatctgggtatcaaacgcgcaggcggcaaaatttcaaatcataggcggcgggcgcacctttcctacggaaatcggcgcggcgggcgaggtggttgtttccgatttccgctgggtcaaggacgaggacaaccgctaccggctggttcttataagacttgaaacaggcagttga

SEQ ID NO: 69994 - protein, 369 aa, Unknown
  Obtained from environmental sample
  misc_feature (1)..(369): Xaa is any amino acid
MESLGEKLKTARTEKGLSFDQISRETNISLRYLEALEAENFGVFPGEPYIVGFLKNYGAYLELDVQKLISLYKALRIQEQPIPVEQLLRHKPKPPGFLLPLILILAVTGAGGSGIYYLIKNRQQRQAEXIPVIRXPTEYAMEGNVMERRFYKNDSLLVPSGTDMYRLELTNIGEVVTIKTPGDPVILDLSQDAVVDLNNDGIPDLRITVADFLKNNTDMGALLHFYLNDAAPYNADPKTAEPGIPLIPATGSPSITTIIPASPSAYPFTLQVNFQGYCMFRWEILNERDRKEKKERYFQRAEDLNIQAQNGIRIWVSNAQAAKFQIIGGGRTFPTEIGAAGEVVVSDFRWVKDEDNRYRLVLIRLETGS

SEQ ID NO: 69995 - DNA, 1353 bp, Unknown
  Obtained from environmental sample
  misc_feature (1)..(1353): n is a, c, g, or t
ttgcgctattttcttgatcctttcggctgtgtaaaaaatcaggttgacgcggaaaacatgatgtcctgccttaacaaagcgggatgggaaagtacgtccgccgaagacgcggatattatcatcgttaattcctgcggatttatcgaaagcgcgaaacaggaatcaattaacgccgttatccagtggcgaaaactttatccgaaaaaaaagatactccttgcaggctgtctcgcccaacgttacgcgaaagaacttgaaggaacactgaccgaagcggacggctttttcggagttgaaaacattgcggacattacaggcgcggttttaaaaacagtaaacaacgcgcatataaaaccggcaagcggcaaacttgaaacaggaaagaggccgcttttgtccctgcccggttcggcttatgtaaaaatcagcgaaggatgcaacaaccgctgctccttctgcgctattccgctgatacggggaaagcttacaagccgtactatccccgacattgtagaggagtgccgcgcccttcttgagcgcggtatcgcggaattgtgcataatagggcaagacatcggctcttatggcatcgacacaaatgtcggagacatttccgccgaggcgaaactgcccgaactgctcaaggcaatctcctcgctggaagggcatttttgggtgcgccttttatacattcaccccgatcattttccgcttcaaatccttgacatcatggaaaaagacgctcgcttcctgccctactttgacattcccttccagcacgcgtcggcaaaaatactttcggcgatgaacaggcgcggcaattcggaacaatatctggcgttactcgaaaccatccgcgcccgcctgcctcgctcaattatccgttcaacattcctgctcggctttcccggcgaaacagaggaagatttttccgcgttactggattttcaggaaaaagccagcttagactggctcggttgttttacctactcaagagaagaagacactcccgcctattcgatgaaaggccgcgtaaacgcaaaaaccgcggcggcgcgcaagagaacaattgaagagcgccaaatccccatcacagaaaaaaacatggaacgcttcacaggccaaacgctggaagtattaattgaggagcgtattgacgccgccggcgaagcctgcgctgaggatacggaaaatttttggctgggacggctctactgccaagcccccgaaatcgacggcgcggcggtaatagcggaaagcggctcggaggggaatagtccgcaaatagggaaacttaccaaatgcaaaataattgcccgccgcggcattgatctggaagtgaagttactgtaa

SEQ ID NO: 69996 - protein, 450 aa, Unknown
  Obtained from environmental sample
  DOMAIN (140)...(317): Radical SAM superfamily
  misc_feature (1)..(450): Xaa is any amino acid
MRYFLDPFGCVKNQVDAENMMSCLNKAGWESTSAEDADIIIVNSCGFIESAKQESINAVIQWRKLYPKKKILLAGCLAQRYAKELEGTLTEADGFFGVENIADITGAVLKTVNNAHIKPASGKLETGKRPLLSLPGSAYVKISEGCNNRCSFCAIPLIRGKLTSRTIPDIVEECRALLERGIAELCIIGQDIGSYGIDTNVGDISAEAKLPELLKAISSLEGHFWVRLLYIHPDHFPLQILDIMEKDARFLPYFDIPFQHASAKILSAMNRRGNSEQYLALLETIRARLPRSIIRSTFLLGFPGETEEDFSALLDFQEKASLDWLGCFTYSREEDTPAYSMKGRVNAKTAAARKRTIEERQIPITEKNMERFTGQTLEVLIEERIDAAGEACAEDTENFWLGRLYCQAPEIDGAAVIAESGSEGNSPQIGKLTKCKIIARRGIDLEVKLL

SEQ ID NO: 69997 - DNA, 2010 bp, Unknown
  Obtained from environmental sample
  misc_feature (1)..(2010): n is a, c, g, or t
atgcgcgaagaatatccttcttaccttgagccgctcaacgacgaacagagacgcgccgtgcttcacaccgggaaaccgctgttgatactcgccggcgcggggtcggggaagacgagggtaattacaacaaagatcgcgtggcttatcagagaacagggaatggatccgcgttccattctggcggtgacatttaccaacaaggccgcaagggaaatggcggaacgcgcggtgttgattgagccgcgcgccggggacgctatgctgagaacattccactcctttggagcgtggtttctcaggcgcaacggtaatctcgccgggcttgactcgtcctttgtcatttacgacgatgacgacgttgtttccctgctttccggcattatggaaaacgccccgaaacaggaagttaaacaatgcgcccacaatatttcccgcgcgaaagattattttctctctcccgacgatcccttactagctaatatcgacagcaggaaaaatttccggagcatctacgcaagttatgaggagcggatgacgcagatcggcaatgtcgatttcggggacttaattaaaaaacctgttgatatactccgcagtcagccggaagtggcgcggcgtttccgcgaccgatttaaggtaataatggtggacgaatatcaggacgcgaatgtcgcgcagttccgcctgttaaaagaattgtgcggccctcagacttatgtgtgtgtagtcggcgacgatgaccagtccatctaccgttttcgcggcgcggaagttaaaaatattcttgagttccccgacaaattttcgggcgcggacattatccgccttgaacaaaattaccgctccacaaaccccatcttaaaaacagcgtcttgcgttgtaagctgcaaccgcggccgtttggggaaaaccctgcgcgccgagaaaggagacggtcccctgcctgttttaacctatatgccggatcaggatgaggaagcaatgttttgcgctgacacaatcgaaagttccgtaaaaaagaaggagacctcgtggtctgactgggcaattctctaccgcactaacgcccagtctctcggatttgaaaccttgtttctacgcaggggaattccctaccgcgttgtcggctctcttaaattttatgaaagggaagaaattaaagacgctctcgcgctgttgtcgtttcttgtaaacccgcgcgacgaggtaaatttccgcagggtggtaaacaaaccggcaagaggagtaggacttgtaacagtggacaaaattgtcgaggcggcgaactcatgcggcggaaacttaatcgaagcggggcgaagtttggaacttgcgcaaaaagcgcgctcgggccttaacgctttttacaaagttattgaggacgcaaagaaattattggaagacgataaagtaatgccggaaggcaaaaaagacggcgatgaaaaaaatcccaaaataaataaccttgaaaagcaaaacatcgacaaacataaaaaagaaaaaaccctctctaaaaaattcaagggacttgtgccgggaacagggctttccgactgcgtcacgcggattgtcagagcctccgggcttgcggaataccatgaggcgcaggatgatgttacgggaaacaacaagctcaacaatttgcaggaacttgtaaacgcggcgagcgtctatccgcaaactttcgaaggattgctggaatttcttgaggatatcgaactggatcgctcgcttagggacaatgctccgcaggacgcgctgaattccgtaacgctcattacttttcacaacacaaagggacttgaatttaagcgtgtgataatgaccgggctagaaaacggcatcttccccagagaggataaaaaggacgaagagcttgaagaagaacgcagacttttttatgtgggtgtgacgcgggcaatggacgaactctaccttacttcctgcatgatgaggcgtatgtacggaaaaatttcgcctatgcagccatcgcttttctgcacgagatga

SEQ ID NO: 69998 - protein, 669 aa, Unknown
  Obtained from environmental sample
  DOMAIN (12)...(481): UvrD/REP helicase
  misc_feature (1)..(669): Xaa is any amino acid
MREEYPSYLEPLNDEQRRAVLHTGKPLLILAGAGSGKTRVITTKIAWLIREQGMDPRSILAVTFTNKAAREMAERAVLIEPRAGDAMLRTFHSFGAWFLRRNGNLAGLDSSFVIYDDDDVVSLLSGIMENAPKQEVKQCAHNISRAKDYFLSPDDPLLANIDSRKNFRSIYASYEERMTQIGNVDFGDLIKKPVDILRSQPEVARRFRDRFKVIMVDEYQDANVAQFRLLKELCGPQTYVCVVGDDDQSIYRFRGAEVKNILEFPDKFSGADIIRLEQNYRSTNPILKTASCVVSCNRGRLGKTLRAEKGDGPLPVLTYMPDQDEEAMFCADTIESSVKKKETSWSDWAILYRTNAQSLGFETLFLRRGIPYRVVGSLKFYEREEIKDALALLSFLVNPRDEVNFRRVVNKPARGVGLVTVDKIVEAANSCGGNLIEAGRSLELAQKARSGLNAFYKVIEDAKKLLEDDKVMPEGKKDGDEKNPKINNLEKQNIDKHKKEKTLSKKFKGLVPGTGLSDCVTRIVRASGLAEYHEAQDDVTGNNKLNNLQELVNAASVYPQTFEGLLEFLEDIELDRSLRDNAPQDALNSVTLITFHNTKGLEFKRVIMTGLENGIFPREDKKDEELEEERRLFYVGVTRAMDELYLTSCMMRRMYGKISPMQPSLFCTR

SEQ ID NO: 69999 - DNA, 390 bp, Unknown
  Obtained from environmental sample
  misc_feature (1)..(390): n is a, c, g, or t
atgataaacttaaaaataaacggcgttccgatccaggttgaggaaggaaccacgattcttgaagccgccaaaaaggcgaatattattattccctcgctttgttacaatcccgatcttccggcgtgggcgtcctgcggcatctgcgtagtccgcgtggccggcagccccaagctaatccgcgcctgcactaccccggttgacgggatgctggaaggcaaggatattatcacccatgacggcgagatcatcgcaacccggcgcgtggtgctggaaatgatcctttccaaccatccccaacgactgtctgcagtgccccccgcaacaataactgcgagctgcagacccttgcggcggaattcggcatacgcgaatccccttacaaaaagataa

SEQ ID NO: 70000 - protein, 129 aa, Unknown
  Obtained from environmental sample
  DOMAIN (4)...(68): 2Fe-2S iron-sulfur cluster binding domain
  misc_feature (1)..(129): Xaa is any amino acid
MINLKINGVPIQVEEGTTILEAAKKANIIIPSLCYNPDLPAWASCGICVVRVAGSPKLIRACTTPVDGMLEGKDIITHDGEIIATRRVVLEMILSNHPQRLSAVPPATITASCRPLRRNSAYANPLTKR

SEQ ID NO: 70001 - DNA, 1314 bp, Unknown
  Obtained from environmental sample
  misc_feature (1)..(1314): n is a, c, g, or t
gtgcagaatgtctgggcgcttgaattcctgggaagaggcattaagggaaagatcgccagcgccgcggatgttccgttaggcgaaggcccgtgcatcaagtgcggccagtgttccgcccactgcccggtcggcgctatttacgagcgcgacgacacggcaaaagtctggagcgccctgcacaatcccgatctccatacggtggtgcagatcgccccggcgatccgtgtcgccctggcggaggaattcgggcttgatccgggcgtgattgtcacccaaaaaatctacgccgcgctcaggcggcttggtttcaagaccgtgtttgacacaaacttctccgccgaccttacgatcatggaagagggcagcgagcttaaaaagcgcctgacaacaaaagacagcaccatcccgatgattacatcctgctgcccggcctgggtcgattatatggaaaaatactaccccgacatgatcaataacttctccacggcgaaatccccgcagcagatgatgggcgcgatgataaaggcgtactgggcgaagaaggcgaatgttgcgccggaaaaagtgtactcggtttcggttatgccctgtacggcgaaaaaatgggaaacccaccgtaatgatgacatgaagagcgcggggaaattcctcggcattgacacgggttacgatgtggacatttctatcaccacccgcgagcttgcccgtatgataaaacaggcgggcattgacatactgaagctttccgatgaggaagcggacagcccactggggccgtatacgggcgcgggcacgattttcggcgtgacaggcggcgttatggaagctgcggttcgcagcgcgtatttccttgtcaacaacaaggaacttccgaatgtggaattcaaaccggtacgcggacttgaaggcgtaaaggccgctgaagttgattttggcgtacccattccgaacggagccggaaccaaaatccgcatagccgtagcccaccagatgggaaacatcgccgcggtgctggatcaaatcaaggaagccagacaagcggggaaggaaccgccgtatcactttgtagaagtcatggcctgccgcggcggatgcgtagccggcggcggccagccttacggcgctaccgatgaaatccgcagcaagcgcgcaaagggcatttatcttgacgatgaaaaatcccagtaccgctgttcgcatcaaaatcccctcatcaaccaggtgtataaggaattccttgaggagccgaacggccataaggcgcatgagttgctgcacaccaaatatacggaacggaagctttacattcgatag

SEQ ID NO: 70002 - protein, 437 aa, Unknown
  Obtained from environmental sample
  DOMAIN (24)...(47): 4Fe-4S binding domain
  misc_feature (1)..(437): Xaa is any amino acid
MQNVWALEFLGRGIKGKIASAADVPLGEGPCIKCGQCSAHCPVGAIYERDDTAKVWSALHNPDLHTVVQIAPAIRVALAEEFGLDPGVIVTQKIYAALRRLGFKTVFDTNFSADLTIMEEGSELKKRLTTKDSTIPMITSCCPAWVDYMEKYYPDMINNFSTAKSPQQMMGAMIKAYWAKKANVAPEKVYSVSVMPCTAKKWETHRNDDMKSAGKFLGIDTGYDVDISITTRELARMIKQAGIDILKLSDEEADSPLGPYTGAGTIFGVTGGVMEAAVRSAYFLVNNKELPNVEFKPVRGLEGVKAAEVDFGVPIPNGAGTKIRIAVAHQMGNIAAVLDQIKEARQAGKEPPYHFVEVMACRGGCVAGGGQPYGATDEIRSKRAKGIYLDDEKSQYRCSHQNPLINQVYKEFLEEPNGHKAHELLHTKYTERKLYIR

SEQ ID NO: 70003 - DNA, 663 bp, Unknown
  Obtained from environmental sample
  misc_feature (1)..(663): n is a, c, g, or t
ttgcttgacaatgaaattttaagccgcgttgatcacacgttgttgaagatgaccgcctcatggtcagagataaagaccctctgcgatgaggcggtccgtttcanaacggcatccgtatgtatccccccggcgtatgtaaaacctgttttcagggaattgggaaaacctgataatctgcacggtgattggtttccactgggctatacctatacgtctgttaaggttaacgaaacagacgccgcgctggagtacggcgcaagtgaaattgacatggtaataaacgcgggcgacgtgaaaaacaacaattacaatctggttcttgatgaaataaaatccatcaagaaagcatgcggtaaaaatattcttaaagttattatagaaacctgctacctgggcgaagaagaaaaaataaagctctgttccattgtcacagaggcgggcgctgactttatcaaaacctcgacaggcttcggaacagccggcgcgaccattgccgatgtaaagctgttcaaacagcacatcgggccgaaagtcaaggttaaggccgcgggcggcataaaaacccgcgaagatttggaagcgtttattcaggcgggggccgaccgcatcggcacaagttccgcggtaaaattgctttccggcggaagcgcagttggatattag

SEQ ID NO: 70004 - protein, 220 aa, Unknown
  Obtained from environmental sample
  DOMAIN (5)...(214): DeoC/LacD family aldolase
  misc_feature (1)..(220): Xaa is any amino acid
MLDNEILSRVDHTLLKMTASWSEIKTLCDEAVRFXTASVCIPPAYVKPVFRELGKPDNLHGDWFPLGYTYTSVKVNETDAALEYGASEIDMVINAGDVKNNNYNLVLDEIKSIKKACGKNILKVIIETCYLGEEEKIKLCSIVTEAGADFIKTSTGFGTAGATIADVKLFKQHIGPKVKVKAAGGIKTREDLEAFIQAGADRIGTSSAVKLLSGGSAVGY

SEQ ID NO: 70005 - DNA, 1422 bp, Unknown
  Obtained from environmental sample
  misc_feature (1)..(1422): n is a, c, g, or t
ttgttacctgttatttgttatctgttatttgaaattgttatgcgtaatttacaattaaaatttggtcccatgtctttttaccgggaggcgctcgctatcgccgttccggtcatgctccagcagtttattatgagcatggtctcccttatcgacaactttatggtcgcgggtctgggcgacataagcatggcttcggttaacgtgacaaaccagcttaactttattttttttgttatcatcaataccatctgccaggcggggggcatatacgtcgcccagttcaagggcgcgaatgatccggaagggatgcaacaggcttttcgttttaaaataatttttgcaatcgccgccgccgccctgtatttcaccctctgccggaccataccacagcgaatgttgggcgtgatggttttgggcaatgcccagagaaatgaaattatcagcaagggaagcgaatacataaaactgatctcatggacgcttgtccccatggcagtttcattttccatcggaaccagtttccgcgagattgcccgcccgaaggcgcccctgtttatttccgcagcggcaaccctggtaaacaccgtgggaaactggatactgatatacggcaatctcggcgccccgcgcctggaagtcaggggcgcggcttacgcgacaattatagcgcgtgtttttgagcttgttgtttttcttgtttacacagttaaggtcaaacccccgttctatacgggaatcgtcagattttttaacgtacaatggaaattttttgtagaggttttatataaatcaggaatgatatttgtttccgaattgtcatggatcagctcggaaacaataatgaccgccatgtataacaggcgcggaggcgcggaagttgtcgcgggtatggcggccggttttacaatcgcgaatattttctttatgcttttcggcgggatatggaccgcttcgggggtccttgtagggggtgcgctcggcgccggcaaactggaggaagcccgcagccgcgccgcctggttaaaatcaggcaccattgccgcgggcattattatcgctgttttcggagccgccttttccgccctgcttgtcccccttgttttttccaatctcagtcccgcggcgcggtttaactgtattggccttgtttatgtgattctggcctatcttcccttatggggttttctcaatttgcaattcgccatatcacgcgccggaggcgatgccgcgacgggaatgtacactgacctgtcggttaacaccattttggtcgtgcccggagcggtgctcctttcgtatttcacctcattgccgcccgtgcccatgttcgccctgataaaactttcagatttcgccaaaatgttcatagcccgccattttttgaagaaagagcgctgggtgaggaatctgaccaagagataa

SEQ ID NO: 70006 - protein, 473 aa, Unknown
  Obtained from environmental sample
  DOMAIN (265)...(430): MatE
  misc_feature (1)..(473): Xaa is any amino acid
MLPVICYLLFEIVMRNLQLKFGPMSFYREALAIAVPVMLQQFIMSMVSLIDNFMVAGLGDISMASVNVTNQLNFIFFVIINTICQAGGIYVAQFKGANDPEGMQQAFRFKIIFAIAAAALYFTLCRTIPQRMLGVMVLGNAQRNEIISKGSEYIKLISWTLVPMAVSFSIGTSFREIARPKAPLFISAAATLVNTVGNWILIYGNLGAPRLEVRGAAYATIIARVFELVVFLVYTVKVKPPFYTGIVRFFNVQWKFFVEVLYKSGMIFVSELSWISSETIMTAMYNRRGGAEVVAGMAAGFTIANIFFMLFGGIWTASGVLVGGALGAGKLEEARSRAAWLKSGTIAAGIIIAVFGAAFSALLVPLVFSNLSPAARFNCIGLVYVILAYLPLWGFLNLQFAISRAGGDAATGMYTDLSVNTILVVPGAVLLSYFTSLPPVPMFALIKLSDFAKMFIARHFLKKERWVRNLTKR

SEQ ID NO: 70007 - DNA, 516 bp, Unknown
  Obtained from environmental sample
  misc_feature (1)..(516): n is a, c, g, or t
ttgcctgtaatatcactgccggcgcctttagccagaataagacgactcctgacgcggttatcaaagcttttaaaggacagggattcagccgcggcggaaggtattgatccggtagattttactttgcctttgcctgacgggacaaaaataaccctttcacagctaaaaggaaaagttgtgtttctcaatttctgggcgacctggtgcggtccctgccgttccgagatgccctccatggaagcggtctatcagcaattgaaagacaaaggttttgaaatcctcgcggtaaaccttggcgagtcaaaggacaaggtgtccggctttatgaatgaatacaaattaacctttccgtcagttcttgatgaaaggcagaccaccggttctcagtacaatatacgggctattcccacaacctacataattgacaggcggggtctgattgttgcccggcttgtcggctccactaactggaacacgcccaaaataataactgcccttgaagcggttctgcaataa

SEQ ID NO: 70008 - protein, 171 aa, Unknown
  Obtained from environmental sample
  DOMAIN (39)...(110): Glutathione peroxidase
  misc_feature (1)..(171): Xaa is any amino acid
MPVISLPAPLARIRRLLTRLSKLLKDRDSAAAEGIDPVDFTLPLPDGTKITLSQLKGKVVFLNFWATWCGPCRSEMPSMEAVYQQLKDKGFEILAVNLGESKDKVSGFMNEYKLTFPSVLDERQTTGSQYNIRAIPTTYIIDRRGLIVARLVGSTNWNTPKIITALEAVLQ

SEQ ID NO: 70009 - DNA, 693 bp, Unknown
  Obtained from environmental sample
  misc_feature (1)..(693): n is a, c, g, or t
ttgtccccctgcgtattaccgttgattccgtcatatttgtgcgttatcggagcttcacctttgaccggtagcgacgaatacaggcccaggccgattgcaagaacgataagctttatttccggtttcagcgttgtctttattgttttaagcgttattttttcatcaactttcatgttaatgaacgggatcttccgatatatcaaccttatttctgggattatcgtcattattctcggcttaaatattatcttcaattttctttccttattgaattatgagaaacgattccatcttaaaaacaagcccaaaggcgttatcggggcttttttggcgggcggagcttttggcgcgggatggaccccctgtgtcgggccggtgttggcggccatcctgcttctggcaaccaactcaggcagcgtctggcgctcagttatgtatcttattttctattcagccggtttggggctcccttttttattggcgtcttttttctttgacgcgtttgtcaggatttccgcaaaactgcgaacccatattccattgatacggcgtatcagcggaatattgctcattataatcggcgtattaattatcaggggggattataaagcgtttaacaatctgacggcaaaatggcaggcaaaactctccggcggaacttctgccgcggaatctattaattatgatgaataa

SEQ ID NO: 70010 - protein, 230 aa, Unknown
  Obtained from environmental sample
  DOMAIN (1)...(199): Cytochrome C biogenesis protein transmembrane region
  misc_feature (1)..(230): Xaa is any amino acid
MSPCVLPLIPSYLCVIGASPLTGSDEYRPRPIARTISFISGFSVVFIVLSVIFSSTFMLMNGIFRYINLISGIIVIILGLNIIFNFLSLLNYEKRFHLKNKPKGVIGAFLAGGAFGAGWTPCVGPVLAAILLLATNSGSVWRSVMYLIFYSAGLGLPFLLASFFFDAFVRISAKLRTHIPLIRRISGILLIIIGVLIIRGDYKAFNNLTAKWQAKLSGGTSAAESINYDE

SEQ ID NO: 70011 - DNA, 333 bp, Unknown
  Obtained from environmental sample
  misc_feature (1)..(333): n is a, c, g, or t
atgtctgatgtagtatctatcatcctaggcggagggaagggaacccgtttattccccttgacacagtccaggctcaaagcctgccgttccttttgggcgggaaattccgcctggtggatatacccatttcaaactgcatacacgccgatcctgcggcaaatttacattgtcacccagttcaattccgcctctttacacaatcacatctccccactccccattccctactcccctctttatatagggcgcgaatttgcggttggcttgcataaaatgagaaaaattttcggaaaaattgaaaaaagagcgccggcgaacggaatttccatgtaa

SEQ ID NO: 70012 - protein, 110 aa, Unknown
  Obtained from environmental sample
  misc_feature (1)..(110): Xaa is any amino acid
MSDVVSIILGGGKGTRLFPLTQSRLKACRSFWAGNSAWWIYPFQTAYTPILRQIYIVTQFNSASLHNHISPLPIPYSPLYIGREFAVGLHKMRKIFGKIEKRAPANGISM

SEQ ID NO: 70013 - DNA, 579 bp, Unknown
  Obtained from environmental sample
  misc_feature (1)..(579): n is a, c, g, or t
atgaaaggaagaaccacggtaaacgtttcacgcgcttcaatgaagaaagcgcttcaagttttaggcattgcggcggttttggcggcaatcgggctgtttgcctcatgcgaagaaccgccccactccggcagtacccccgaagtcaaatactgcaaagtcgtatggtttctgaaccagggcgaatgggccgagggaagcgcccctgccgaatgggtgcaggaaaataaaatcctcgcaaggcccggcgatccggccagaggagaaaagtatacctttgtcaactggtacaccaattcgggggggacggcgctatatgatttttccaaacccgttacccgcgacctttacctgtacgccaaatggacccaaaactggaccgacccgggcattatgtggcatttaaacggcggcaaatggccgacaggcttcgtcgcccccgtgaaaatagaacagggagaaattcttcaggcgcctgaggtcgaaccgaccaaaacaatgtatacctttcacggctggtacagcgatgaggacacgacagccccatattattttaccaaacccgttaccccggcgacttaa

SEQ ID NO: 70014 - protein, 192 aa, Unknown
  Obtained from environmental sample
  misc_feature (1)..(192): Xaa is any amino acid
MKGRTTVNVSRASMKKALQVLGIAAVLAAIGLFASCEEPPHSGSTPEVKYCKVVWFLNQGEWAEGSAPAEWVQENKILARPGDPARGEKYTFVNWYTNSGGTALYDFSKPVTRDLYLYAKWTQNWTDPGIMWHLNGGKWPTGFVAPVKIEQGEILQAPEVEPTKTMYTFHGWYSDEDTTAPYYFTKPVTPAT

SEQ ID NO: 70015 - DNA, 525 bp, Unknown
  Obtained from environmental sample
  misc_feature (1)..(525): n is a, c, g, or t
ttgcgtgaggaaaaaattcttgccgacgcaaaagacctttccgtatatatcaaaaagcgcgaaaggatcaatcgctcaaaaactattttagatacgcatataaacatcgagaaatttttattttcgtatctcgatgaaaacgaaagaaaatacaatatcaaagaaatgaacgaggcgcttgcggcggaatatgccggcacgtcaatacgacagcttggcacgatattaaactattatgccattaaacatctggtcaaaagaacgcgggaatacaaaaattatgtaacgctgaaaccgtatttctccatggcagagatgcgatccaggagtaacaaacgttttgaaatagcgaaagtcgtcattgaatatttggtttcaaagattcaaacgagcaggatgcgcaggggaccgaggatgtcaaagttgacttttcgatacttgaaactgaaaatgaatttcacccgcacctgcttggcgagaaagcgccgatcgacgaaattgaggatgctttatattatttactga

SEQ ID NO: 70016 - protein, 174 aa, Unknown
  Obtained from environmental sample
  misc_feature (1)..(174): Xaa is any amino acid
MREEKILADAKDLSVYIKKRERINRSKTILDTHINIEKFLFSYLDENERKYNIKEMNEALAAEYAGTSIRQLGTILNYYAIKHLVKRTREYKNYVTLKPYFSMAEMRSRSNKRFEIAKVVIEYLVSKIQTSRMRRGPRMSKLTFRYLKLKMNFTRTCLARKRRSTKLRMLYIIY

SEQ ID NO: 70017 - DNA, 1977 bp, Unknown
  Obtained from environmental sample
  misc_feature (1)..(1977): n is a, c, g, or t
atgaaaatagaaggcggctttttgataatttataacgcaatgcggattgagcgtctgaaaatggataatgaggcgaaatacaaaaaagaacattacgcgcagcttgaagaatattatcaaaacaaacggcagcaaatccatattgtaggcgaatatgcaaaccgcatgattaatgattatgatgaagcgatgaattttgtgaatgactactttgaaatagattacggaaattttttgaataaatatttcaaaggcagaaaatatgaaatcgacagaaatattacgtctaaaaaatttaaccaattattcggcgagttatcgcaggctcaattggatattatcaaggatcaagactcgaaatatatcgttgtggcggcagggcccggaagcggcaagacaaagctgcttacccacaagctggcatcgctttttatgatggaggatgttaagcacgaacagatgctgatgcttacattttcgcgggcggcagcgactgagtttaagaaacgcttgatgacgctaatcggtgacgccgccaattttattcaaattatgacttttcattcttattgttttgatcttcttggaaaggttggaagtatagagaaatcggatgaaataattaattatacggtaaaaaaaattaactctggtgaagtggaacttactaaacttacaaaaaccgtattggttatagacgaagcgcaggatatgagcgaggcggaatattcgctggttaaaacattgatgaaggaaaatgacaatttgcgcgtaattgccgttggtgatgatgatcaaaatatatatgagtggagggggtcaagttctgaatatttaaaatctatcgttaaagaaaatggatatgaggcaaaaaaatatgagttaattgacaattaccgcagtaatgccaacatcgtggaattcgctaatcaattcgcggagagcattaaaaacagatttaaaacaatccctataaaacctataaaagatgaaaatggcaatatcagtattggcaaattattttctgaaaatatctccattcctgttgtaaatatgatacaaaagattaagccgtcaggctcaacgtgtattatcgtaaagaccaacgatgaggcgttgaacattgtcagcctgttaaacaaaaacggtattactgccagaaaaatccaggccaatgatgagtttgatttatataatctcgcggaacttagggattttattgatgatattgataaaaacaataatagttatgcaataactgacgatatttggcagcaggcgaaagataatctaaaaaagaaatacagcagcagcaataatttagtcagtgtattaaaactaatcgcggattttgaagaaataagtaacaaaacaaagtataaaagtgattttaagcaattcgtacttgaatccaaacttgaggattttatatcagcttcggaaggttctattcttgtctctacaattcaccaaacgaaagacagagaatttgataatgtatttttagcgctcagccattctcctaaattggatgacgcaagaaaaagagagatttatgtcgcaataacgagggcgaagtacaacctatacattttatataatggaaattattttgataagattaatgttgaaaatattgagagaacgacagacaataataattatcctgcgccggatgaaatcagtcttcaactttctcaccgtgatgttgccttgggatattttgcattcagaaaaagagaaatagattcccttatgagcggcagggaactatcaatttgcggtgaaagttgttttttgggtgatacacaaattttaaaattttcatccaaattttgtaatcagataaatgggttaaaagagaaaggttattctccggtaagagcaatcgtcaggcatattgttttttggcaagacaaagacaaagaagaagaaataaagattattttgcctgatgtggagttttcaagaaaataa

SEQ ID NO: 70018 - protein, 658 aa, Unknown
  Obtained from environmental sample
  DOMAIN (106)...(494): UvrD/REP helicase
  misc_feature (1)..(658): Xaa is any amino acid
MKIEGGFLIIYNAMRIERLKMDNEAKYKKEHYAQLEEYYQNKRQQIHIVGEYANRMINDYDEAMNFVNDYFEIDYGNFLNKYFKGRKYEIDRNITSKKFNQLFGELSQAQLDIIKDQDSKYIVVAAGPGSGKTKLLTHKLASLFMMEDVKHEQMLMLTFSRAAATEFKKRLMTLIGDAANFIQIMTFHSYCFDLLGKVGSIEKSDEIINYTVKKINSGEVELTKLTKTVLVIDEAQDMSEAEYSLVKTLMKENDNLRVIAVGDDDQNIYEWRGSSSEYLKSIVKENGYEAKKYELIDNYRSNANIVEFANQFAESIKNRFKTIPIKPIKDENGNISIGKLFSENISIPVVNMIQKIKPSGSTCIIVKTNDEALNIVSLLNKNGITARKIQANDEFDLYNLAELRDFIDDIDKNNNSYAITDDIWQQAKDNLKKKYSSSNNLVSVLKLIADFEEISNKTKYKSDFKQFVLESKLEDFISASEGSILVSTIHQTKDREFDNVFLALSHSPKLDDARKREIYVAITRAKYNLYILYNGNYFDKINVENIERTTDNNNYPAPDEISLQLSHRDVALGYFAFRKREIDSLMSGRELSICGESCFLGDTQILKFSSKFCNQINGLKEKGYSPVRAIVRHIVFWQDKDKEEEIKIILPDVEFSRK

SEQ ID NO: 70019 - DNA, 606 bp, Unknown
  Obtained from environmental sample
  misc_feature (1)..(606): n is a, c, g, or t
ttgaaagacactccacgcaaagttatccgcgaactttctattgtggcgattaaagagaataattccaaagttgataccgcatacagtgacgacgcgtttcacgctgaccttattgttaaagaaggtgatgttatatcgcttggcggcttatcggttaaaacgctggaaacgcccgggcacaccagggattcgctcagtttttttattcctgagcttgaactgctggtagtaagtgaaacaaccggatttatgacgcctgacggtactgtgtatcccacttaccttacaggttttaatgacgcggtcaattctatagaaaaatgcggaaagattccttataaatacctgtcttttccgcattatggaattgccgctgataaagacgcaaacggtttttttgacaaagccctgaaagcagttacagattgccgtgactttcttttggacatgaatgagaagaaacttgataaggaggcaatgtttgaaaaatatgttcaaaaatacggaagcgaagagctttacgtctaccagccctgggctgcttttgccgtaaacgcccgcgctacgattgcctgtactttgcgggaatttgcgccgaatggatag

SEQ ID NO: 70020 - protein, 201 aa, Unknown
  Obtained from environmental sample
  misc_feature (1)..(201): Xaa is any amino acid
MKDTPRKVIRELSIVAIKENNSKVDTAYSDDAFHADLIVKEGDVISLGGLSVKTLETPGHTRDSLSFFIPELELLVVSETTGFMTPDGTVYPTYLTGFNDAVNSIEKCGKIPYKYLSFPHYGIAADKDANGFFDKALKAVTDCRDFLLDMNEKKLDKEAMFEKYVQKYGSEELYVYQPWAAFAVNARATIACTLREFAPNG

SEQ ID NO: 70021 - DNA, 324 bp, Unknown
  Obtained from environmental sample
  misc_feature (1)..(324): n is a, c, g, or t
ttgcctgtactttgcgggaatttgcgccgaatggatagcttctttcgcatagatggcgatacgattcggctggagataaaggctgttcccggcgcttcaaagacggaatttgccggagttaaagatggccgtctgcggatacgcattgccgccgcccccgaagacggtaaggcgaacgccgagttgattaactttttgtccaaaacgcttggctgcgccaagcgggacttgcggcttgtttctggggaaaaatcgcgggttaagatggtcgcgcttccggttgggtgtttggcgcgggtggaggggattggtagtggtaagtaa

SEQ ID NO: 70022 - protein, 107 aa, Unknown
  Obtained from environmental sample
  DOMAIN (18)...(94): Uncharacterised ACR, YggU family COG1872
  misc_feature (1)..(107): Xaa is any amino acid
MPVLCGNLRRMDSFFRIDGDTIRLEIKAVPGASKTEFAGVKDGRLRIRIAAAPEDGKANAELINFLSKTLGCAKRDLRLVSGEKSRVKMVALPVGCLARVEGIGSGK

SEQ ID NO: 70023 - DNA, 609 bp, Unknown
  Obtained from environmental sample
  misc_feature (1)..(609): n is a, c, g, or t
atggaaggaacaatgcaaataatacaaatagtatttggaattttaaccgctctgatgggattctactccctgctgatatttatcaggattattctttcctggttctcgggcgggcagttcggcgggccggcggatattttggcgcgtattaccgatccctatcttgactggtggcggcaaaggctcaacctgagggcgggttatctggacctctcccctattatcgctatggcggccctctctgtcgcgcagacgatttgctcccgcatttccaaaacggggaggatcactattggggttttgctttccgtatgtctttccgcgctgtggacggcagtttcctttatactgggcttctgcatcgtcgtgcttatcctccgcctgattggctatcttatcaacgccaatatgttcggcacattctggcgggtcatagattccatatcaaacccgatccagtaccgcctcagcaggatcatttttagaaggcggctggttcgttttacaacaagtatcatcacctcgattctcgttctgaccgccctttggattggcggaggcattgtcatccaatggattgccaatattttattctggttgccattgtaa

SEQ ID NO: 70024 - protein, 202 aa, Unknown
  Obtained from environmental sample
  DOMAIN (8)...(90): YGGT family
  misc_feature (1)..(202): Xaa is any amino acid
MEGTMQIIQIVFGILTALMGFYSLLIFIRIILSWFSGGQFGGPADILARITDPYLDWWRQRLNLRAGYLDLSPIIAMAALSVAQTICSRISKTGRITIGVLLSVCLSALWTAVSFILGFCIVVLILRLIGYLINANMFGTFWRVIDSISNPIQYRLSRIIFRRRLVRFTTSIITSILVLTALWIGGGIVIQWIANILFWLPL

SEQ ID NO: 70025 - DNA, 789 bp, Unknown
  Obtained from environmental sample
  misc_feature (1)..(789): n is a, c, g, or t
ttgaatanccagagaaacaaagacagtacgggattcattgccgacagtttgatcgatgtccgtgaagcgcaagcggcgatagaggaagaaaaagctttgcaaaaaaagcgggaaaaattccgcgatgtctggctttatatggcggatctgaaaagcggcggacttgccaaagcggaaaagggcagttacacggtgattggccagcttacttccttgagggaagcgcatgacagaaacggcgatgacatggcattcgggaccctgcaggactttgaggggaatattgaactggtgttctgggcaaaaacatggaaggaaagccgtgaactgctgaacacaggggagtttgtagcccttaaaggaagccttgatcccgaaagggaccgcaacccgcagaatcccagcctgaaagtgagcaaggttgacgaccttgcggctttaaaacgttcggcgtcgcgaaagtccgaagccggggaacagcccaaaatcccgcctctggagacgcaggcggtaaaaagtgaaaattcccctgacacggcacaacccgccccgccgttaaacgaaattcatatactgctggaaagcggagccgccgacagggacgaaaccatacagcccctgcggaattaccttaacggtaatcagggcccctgtccggtatttatccacattggtgataaaattatcaaaaccaataaaggcttaagcattgaagctgaaaaggaggcgctgggcgtgctggaaggctgtatcggcgtggcccggtcatggaaggaacaatgcaaataa

SEQ ID NO: 70026 - protein, 262 aa, Unknown
  Obtained from environmental sample
  DOMAIN (63)...(144): OB-fold nucleic acid binding domain
  misc_feature (1)..(262): Xaa is any amino acid
MNXQRNKDSTGFIADSLIDVREAQAAIEEEKALQKKREKFRDVWLYMADLKSGGLAKAEKGSYTVIGQLTSLREAHDRNGDDMAFGTLQDFEGNIELVFWAKTWKESRELLNTGEFVALKGSLDPERDRNPQNPSLKVSKVDDLAALKRSASRKSEAGEQPKIPPLETQAVKSENSPDTAQPAPPLNEIHILLESGAADRDETIQPLRNYLNGNQGPCPVFIHIGDKIIKTNKGLSIEAEKEALGVLEGCIGVARSWKEQCK

SEQ ID NO: 70027 - DNA, 597 bp, Unknown
  Obtained from environmental sample
  misc_feature (1)..(597): n is a, c, g, or t
ttgccacaaatttattctatcatattatataataagtgtatgcctctggggaaaaaattttttaatcagccgactgtaagtctggcaaaagcgcttttaggcaaatatcttgtttttaagaacatgaaaggcataattgtagaaacagaagcctatctttacaaaggcgatcccggctgccacgcgtgcaggggaattaccgcccgcaacgcgcctatgtttgaggatgccggccgcgcgtatgtttaccttatttacggtatgtaccattgtcttaatatcgtaagcggtaaaaaaggcgaaggagaagctgtccttatccgcgcccttgaacctgtttcgggcatagaaattatgcaaagaaggcgcaaaactaaaaaaccggaaaacctttgcaacggtcctggaaaattaacgcaggcattaggcataacacgcaaacaaaacaataaaagccttttaaccggagatttccgcatatacaacagcaaaataaaacccgaaattacgacaacaacgcgaatcggcctttctgaaggcaaagaactcccgttgcgcttttttataacaggaaaccgctttgtttctagaacttaa

SEQ ID NO: 70028 - protein, 198 aa, Unknown
  Obtained from environmental sample
  DOMAIN (17)...(194): Methylpurine-DNA glycosylase (MPG)
  misc_feature (1)..(198): Xaa is any amino acid
MPQIYSIILYNKCMPLGKKFFNQPTVSLAKALLGKYLVFKNMKGIIVETEAYLYKGDPGCHACRGITARNAPMFEDAGRAYVYLIYGMYHCLNIVSGKKGEGEAVLIRALEPVSGIEIMQRRRKTKKPENLCNGPGKLTQALGITRKQNNKSLLTGDFRIYNSKIKPEITTTTRIGLSEGKELPLRFFITGNRFVSRT

SEQ ID NO: 70029 - DNA, 369 bp, Unknown
  Obtained from environmental sample
  misc_feature (1)..(369): n is a, c, g, or t
gtgtatataggcagcggcaatgtcggggaacttgcgtttgaacggtacagcctttcggaactttcaaattatcttgcgaataactgcattgtgtttaacgccgtaatagtagggaatggccaggcttccgccgcgattgaatatctttgcagggaaacaggcggaaagattgctcacctttatcagccccaggggataggaccgctaatcaagagcgttgcggaaattccttcaggattatacagctattcgtttacttcccatcttcccaccgatttcggaagggcgtggcttcccgtcgagatagaagttaaactgatggaaagatccggcttggacagcacaggctattacccgccgcttgaataa

SEQ ID NO: 70030 - protein, 122 aa, Unknown
  Obtained from environmental sample
  misc_feature (1)..(122): Xaa is any amino acid
MYIGSGNVGELAFERYSLSELSNYLANNCIVFNAVIVGNGQASAAIEYLCRETGGKIAHLYQPQGIGPLIKSVAEIPSGLYSYSFTSHLPTDFGRAWLPVEIEVKLMERSGLDSTGYYPPLE

SEQ ID NO: 70031 - DNA, 2184 bp, Unknown
  Obtained from environmental sample
  misc_feature (1)..(2184): n is a, c, g, or t
atgccgatgaagtccgcgctcgaccgttacgagtgccgccacggaatgggctattcgcgcatttcctcggcgcgcaacggtcttgcgttttcccaggtttcttttgtgccgttacgcgacacctgcgagatacacaaaattacgcttaccaacgaatcaaattcggataaacatattgacatgttttcttttattgaattctgcctgtggaacgccaatgacgacatgaccaacttccagcgcaacttcagcataggggaagttgaggttgacggttcgcgcatctatcacaaaacagaataccgcgaaaggcgcagccattacgcggtgtgggcggtcaatgtcccaatcgagggctttgacacggacaggcagtcgtttatcggcctttacaacagctttgcccatccgcaggctgttcttgacggagaggcaaaaaattccgtcgcttcgggctgggcgcccatagggtctcaccatataaaagcgcaccttgcgccgggagaggctaaaacttttgtttttgtccttggttactgcgaaaatcccgaggatcagaagtgggaacggcagggagtgatcaacaaaaaccccgcgaatgtgcttttatctaaatacgggtcgcccgaagcggcggacaaggctcttgccgagcttaacgagtactggaaaaatcttcttagccgctttactgtggacgccgaagacaaaaaaatggcgcgtatggcgggcgtctggaatcagtatcagtgcatggttacgtttaacatgtcgcgcagtgcgtcctattttgaatcgggaatcgggcgcggcatgggcttccgcgactccaatcaggacttgctgggctttgttcaccttgttcccgaacgcgcccgcgcccgtattttggatattgcggctacccagttccccgacggcagtgcgtatcatcagtaccagcctcttacaaaacgcggcaataacgaggtcggctccggttttaacgatgatcctctgtggctcatctgcggagtagcggcgtacatcaaggagacaggcgactacggtatccttgaagaaaaagtgccgtttgacaacaacgaagcgttagccgacactctctttattcacttaaaacgttctttcgattacaccgtaacgcacgtcgggccgcacgggcttccgttgattggccgcgccgactggaacgactgtttaaaccttaactgcttttcaaaaacacccggtgaatctttccagacaaccgcaaattttgaaagcggcattgcggaatctgttttaatagcggcgatattcgcctttaccggccccgattatgccgaaatttgccgccgcacggggcgcagcgacgaggcgcagtatgccgaaaaagccattgcgacaatgatcgaggcggttaataaccacggctgggacggcggctggttccttcgcgcctatgacgcgcacggtaaaaaaatcggcagccacgaatgtgaagacggaaaaatatttattgaatccaacggctttgccgtcatggcaggcattggtattaacgacggacgcgcgcagaaagcgcttgattccgtaaaagaacatcttgatacaaagtacggcattgtgcttttacagcccgcgtacaaagattaccatattgagttgggtgaggtttcttcgtatccgcccggatataaggaaaacgccggtattttctgccacaacaatccctgggttacgataggggaaactgttcttgggcacgggaatcgcgcgttcgagacctacacaaaaatctgccccgcctaccgcgaagacgacagcgatcttcgccgcatggagccttatgtgtacgctcaaatggtagccggaaaagacgcggttcgccacggcgaggcgaaaaattcatggcttacgggaactgcggcgtggacgtttgtcagtatttcgcagtacattctcggagtgcgccccgtctttgacggtcttctcatagacccttgcattccatcaagcatgaaaaattataccgttacccgccatttcagaggcgcggattatcatattacggtagacaacagcgccggcgtggaaaagggaataaagtctataatggtagacggcaatccgcacaacggagcagtgttacccgtctttggtgataataaagcgcataatattattgtaacaatgggaaaataa

SEQ ID NO: 70032 - protein, 727 aa, Unknown
  Obtained from environmental sample
  DOMAIN (1)...(88): Glycosyltransferase family 36
  misc_feature (1)..(727): Xaa is any amino acid
MPMKSALDRYECRHGMGYSRISSARNGLAFSQVSFVPLRDTCEIHKITLTNESNSDKHIDMFSFIEFCLWNANDDMTNFQRNFSIGEVEVDGSRIYHKTEYRERRSHYAVWAVNVPIEGFDTDRQSFIGLYNSFAHPQAVLDGEAKNSVASGWAPIGSHHIKAHLAPGEAKTFVFVLGYCENPEDQKWERQGVINKNPANVLLSKYGSPEAADKALAELNEYWKNLLSRFTVDAEDKKMARMAGVWNQYQCMVTFNMSRSASYFESGIGRGMGFRDSNQDLLGFVHLVPERARARILDIAATQFPDGSAYHQYQPLTKRGNNEVGSGFNDDPLWLICGVAAYIKETGDYGILEEKVPFDNNEALADTLFIHLKRSFDYTVTHVGPHGLPLIGRADWNDCLNLNCFSKTPGESFQTTANFESGIAESVLIAAIFAFTGPDYAEICRRTGRSDEAQYAEKAIATMIEAVNNHGWDGGWFLRAYDAHGKKIGSHECEDGKIFIESNGFAVMAGIGINDGRAQKALDSVKEHLDTKYGIVLLQPAYKDYHIELGEVSSYPPGYKENAGIFCHNNPWVTIGETVLGHGNRAFETYTKICPAYREDDSDLRRMEPYVYAQMVAGKDAVRHGEAKNSWLTGTAAWTFVSISQYILGVRPVFDGLLIDPCIPSSMKNYTVTRHFRGADYHITVDNSAGVEKGIKSIMVDGNPHNGAVLPVFGDNKAHNIIVTMGK

SEQ ID NO: 70033 - DNA, 1686 bp, Unknown
  Obtained from environmental sample
  misc_feature (1)..(1686): n is a, c, g, or t
atgcattacaagaattttttgacggttacttatgcgcccgcaggttatttaaatgacaattcgattgagcagataaaggcggacattgaaaaagtaagcaaatatataaaacttgacaagatatatcttgaaacttaccgctcggaagttttaatagaacgaaaaaaaatggaagccataaaagccctgtttattgaaaagggctatactgtgtccggcgggattacaaccacggtaaaacgtacgctgatgggaagcatgtgttttacagaccctgaaaaccgtaaaaggcttggagaaattgccgcctacaccgcgcagctttttgacgaacttatactggacgatttttattttacaaattgccgctgtgaatcctgcattaaggcgaaaggagaccgtgattgggcgtctttccgtcttgcgctgatgaacgatatttccgaaaacgtaataattaaaaacgcgaaagcggcgaatccaaaggtaaattgcattattaaatatcccaactggtacgacagttttcaggctaacggctataaccttgaagacgaatcgaaaatgtttgacatgatctacaccggaaccgagacgcgcgatcctcattacacgcatcaaaatctgccgcgttatttaagttttttcctgccccgtctgatggaacacataaagccgggaaaaaacggcggcggctggtacgacctttttgaatgttcactggaagattatttacaacaggcgtatttaacgcttttttcaaaatgccgcgaacagatgttgttctgttttccgttactcgtcaacgccccgtcttacaccgccgccgtcggcgcgttcttcgatgaggcggatctgtttatcgggcagataggcgagcctgtcggcgttgcctgttacaagccgtatcactcttacggagagcggcttcttcatgaatttgtcggaatgtgcggcgttccgctggagccgtatccttattacccggcggacgcgaaaacggtctttcttacagcggatgccgcgtgggacaaagaaattatcggcaagataaaacagagccttttgaacggaagcaaagtttttatcacaagcggactgtatgaaaaattggcaggcaagggaatagaggatatactcccgcttgaaattacaaacagaaaaataaccacggagctttttacaaacagcgcttttggaaggggcaactgcggttatgtaaaagccgcttctccgataaccctgtcccatgtcgcatacaatgaaaacgatatatggcctctttcagccgctattactccccattcaagccacgctatattgttatgcggcgcatacggcaagggcagtctctatgtactgacaattcccgacgcattcgccgatttgtataatttgcccgccgaaacgctggccctcttgcgcggtgaatttgatttgcccataacgctggaatgcgttggccgagtgtctctgtttccgtatgacaacaacacctttattttgcaatcattccttgacagaccggaacgggtgcgcgtccgcattaaaaagccgaacatatcgcttgtgccgttgatgaaaccaagaatgcgcccgttcgatatagtccgttcaggagaagccgaaagcgtttttgatattcacataatgccgggacattacatggtgtttaagattgaatga

SEQ ID NO: 70034 - protein, 561 aa, Unknown
  Obtained from environmental sample
  misc_feature (1)..(561): Xaa is any amino acid
MHYKNFLTVTYAPAGYLNDNSIEQIKADIEKVSKYIKLDKIYLETYRSEVLIERKKMEAIKALFIEKGYTVSGGITTTVKRTLMGSMCFTDPENRKRLGEIAAYTAQLFDELILDDFYFTNCRCESCIKAKGDRDWASFRLALMNDISENVIIKNAKAANPKVNCIIKYPNWYDSFQANGYNLEDESKMFDMIYTGTETRDPHYTHQNLPRYLSFFLPRLMEHIKPGKNGGGWYDLFECSLEDYLQQAYLTLFSKCREQMLFCFPLLVNAPSYTAAVGAFFDEADLFIGQIGEPVGVACYKPYHSYGERLLHEFVGMCGVPLEPYPYYPADAKTVFLTADAAWDKEIIGKIKQSLLNGSKVFITSGLYEKLAGKGIEDILPLEITNRKITTELFTNSAFGRGNCGYVKAASPITLSHVAYNENDIWPLSAAITPHSSHAILLCGAYGKGSLYVLTIPDAFADLYNLPAETLALLRGEFDLPITLECVGRVSLFPYDNNTFILQSFLDRPERVRVRIKKPNISLVPLMKPRMRPFDIVRSGEAESVFDIHIMPGHYMVFKIE

SEQ ID NO: 70035 - DNA, 1140 bp, Unknown
  Obtained from environmental sample
  misc_feature (1)..(1140): n is a, c, g, or t
atgatttacaaaccttttggcaaaacaggcgtaaaagtttcggctcttggcttcggcgcgatgcgcctgcccatgaaagaagttgacggcaagaaaattgtagacgaagaccttgccgtccctctcatgcagaaagcgtttgacatgggaataaactatgtcgataccgcgccgctttactgcgaaacgttaagcgaaatcgctgtaggcaaggcgctgaaaggttaccgcgacaaagtgtatttgtccacgaagaatcccatagaagacgcggacggcgatcactggatggaaagactggaaaaatctcttaaaaaactggacacggactacatcgacttttatcatttttggggcatctcattaaaaagtttcgagtcatggcagggattaaagttcggccctatcgaagcggcgtataaagccaaagaacaggggcttatcaagcacatttctttttcgtaccacgacgcggcggaaaattataaaaagatagtagattccgggcattttgaaacaacacttgttcagtacaatatgctggatcgttccaacgaggagaatatcgcctacgcaaagtcaaaaggtttgggcgttgtggtaatgggtcccgtaggcggcggcaggttgggtgcgccaagcgagaaaatacagagcttactgaaaaacaaatcgacaagcacagcggaaatggctatgcgatttgtctttgcaaacgaaaacatagacatggctctttccggcatgagcaacatggacatgttaaaagaaaattttgagatcgcttcccgcaccggccatttaacggaagaagaactgcgtcatgtgaaatccatgatggaagaaaacaaaaacctcgccaaactttactgcacaggctgtaattactgcaaaccctgtccacagggaatagacattccgtatctttttgaaataatgaaccgctaccgcgtctacgatttaaaagaacacgcaaaaagcgcatacaaggaaatgatggagggccagagttggataaaaagcgcggacgcttcaaagtgcgcagcatgcggcgcgtgcgaagaaaagtgcccgcaaaaactgccgattatcaagcagttggaagagacgcatcgtacccttgtacagacgacggcgtga

SEQ ID NO: 70036 - protein, 379 aa, Unknown
  Obtained from environmental sample
  DOMAIN (340)...(363): 4Fe-4S binding domain
  misc_feature (1)..(379): Xaa is any amino acid
MIYKPFGKTGVKVSALGFGAMRLPMKEVDGKKIVDEDLAVPLMQKAFDMGINYVDTAPLYCETLSEIAVGKALKGYRDKVYLSTKNPIEDADGDHWMERLEKSLKKLDTDYIDFYHFWGISLKSFESWQGLKFGPIEAAYKAKEQGLIKHISFSYHDAAENYKKIVDSGHFETTLVQYNMLDRSNEENIAYAKSKGLGVVVMGPVGGGRLGAPSEKIQSLLKNKSTSTAEMAMRFVFANENIDMALSGMSNMDMLKENFEIASRTGHLTEEELRHVKSMMEENKNLAKLYCTGCNYCKPCPQGIDIPYLFEIMNRYRVYDLKEHAKSAYKEMMEGQSWIKSADASKCAACGACEEKCPQKLPIIKQLEETHRTLVQTTA

SEQ ID NO: 70037 - DNA, 777 bp, Unknown
  Obtained from environmental sample
  misc_feature (1)..(777): n is a, c, g, or t
ttgaggaacactgctggaaagacgaccgtctttgtcagaggcatcaccgaaaacgatgttacagtcggaaagaagggcgacccggaagcgaacatctggcttaatccgcaaagttgggcggtaatcagcggttacgcggacgaaacgcgcagtaaagcaatacttgatctagtccataaagagttaaacacaaaatacggcgcacgccttatgtctccgtcttaccgaaagcacgcttttgacggagcgcttgccctgctttttaaccctggcacaaaagagaacggcggtatattcctgcaaacgcaaggctggataatccttgccgaagcgttattgggacgcggagaacgcgccgtagagtattatctggaaagctgtcccgccgcgcaaaatgaaattgccgatacgcgccttatggagccttacgcttactcgcaatttacggaaagcacagacagcccgtttgaagggcgcagtcatgttcactggctgacaggcacggcaagcacggtaatggtcggcagtgtggaaggcattttgggattaaggccggatatcgaaggactgcgtttgtctcccgcaattccttcatcgtggaaatcatttacaatggaaaaatccttccgcggcaaaaaacttaacataaaagtaaataaccccgacggacatgaaagcggctgtaaaaaactgactgtcaacggaacggcggcagaaggcaattatattcccgcttcgatattgaaagcggaaaatgagataattttagatatgtga

SEQ ID NO: 70038 - protein, 258 aa, Unknown
  Obtained from environmental sample
  misc_feature (1)..(258): Xaa is any amino acid
MRNTAGKTTVFVRGITENDVTVGKKGDPEANIWLNPQSWAVISGYADETRSKAILDLVHKELNTKYGARLMSPSYRKHAFDGALALLFNPGTKENGGIFLQTQGWIILAEALLGRGERAVEYYLESCPAAQNEIADTRLMEPYAYSQFTESTDSPFEGRSHVHWLTGTASTVMVGSVEGILGLRPDIEGLRLSPAIPSSWKSFTMEKSFRGKKLNIKVNNPDGHESGCKKLTVNGTAAEGNYIPASILKAENEIILDM

SEQ ID NO: 70039 - DNA, 912 bp, Unknown
  Obtained from environmental sample
  misc_feature (1)..(912): n is a, c, g, or t
ttggtctttctggactgcagggcggtttcggaggacgagattgaatttgatttttcccgtccggtaacggtaaagtctttaaatttcgagccggccattgccgtcgccgggatagaagacggcagtacggtaaaagtgaggctgagcgcggttcaaaaaccgggggcggaaattacagccgatattttggcggaagacccggacaagaacaccatcaatgtgttaatcccgttccgcgcgaggaataacaggatgccgtctctggtaatcaatgagatttgtacagaatctgcaagcgccgccgcggggaaaaaagaagaatttatcgaatttaaattgaaatcagccggtaatttgggcgcaatgcgggtagttattaacagcaattcaaatgccgcaaaaaaaactgtttatgagttttctcctgtcgaagttaaaaaaggcgaatacatgacgcttcatctgcgaacttataatcaatcaagtaaagacgaatacacggataatcttgatgaatccgccggcgtaaacgcgtcatcaacagggcgggatttttggataccgggagaagcaaaaattctgcataaaacagctatgatttatgttatggatcaggacgacagggtaattgacgcggtaatactatccgaaaacccggacagctggtggactaaagattattttgccgaaacagcggaatttctttttaacagcggcgcatggaaatccccggacgggaaagtctgccgtccgcaagacgcggttataagcgcgaaagcgacagctacccgtacaatttgccgcgatgaaactgtcgaagattcaaatacggcaaaagactggtatataacggataccagcaaagcgtctccgggaaagcctaatgatcctaaacgttatgtaccgaaatag

SEQ ID NO: 70040 - protein, 303 aa, Unknown
  Obtained from environmental sample
  misc_feature (1)..(303): Xaa is any amino acid
MVFLDCRAVSEDEIEFDFSRPVTVKSLNFEPAIAVAGIEDGSTVKVRLSAVQKPGAEITADILAEDPDKNTINVLIPFRARNNRMPSLVINEICTESASAAAGKKEEFIEFKLKSAGNLGAMRVVINSNSNAAKKTVYEFSPVEVKKGEYMTLHLRTYNQSSKDEYTDNLDESAGVNASSTGRDFWIPGEAKILHKTAMIYVMDQDDRVIDAVILSENPDSWWTKDYFAETAEFLFNSGAWKSPDGKVCRPQDAVISAKATATRTICRDETVEDSNTAKDWYITDTSKASPGKPNDPKRYVPK

SEQ ID NO: 70041 - DNA, 390 bp, Unknown
  Obtained from environmental sample
  misc_feature (1)..(390): n is a, c, g, or t
atgaaaaacagccgttttttcctcttgtatttttgccttaacgagggcaaaatatatggggagggatttatgagcagtgttgcagtaaccaccggcagttttcaggccgaagttcttgaatcgccggttccagtacttttagatttttgggcgccatggtgcggcccgtgtaagatgcttgcgccggtgttggaccagttggcggaagaatacaaaggacgccttaaagtaggcaaaatcaatgtagatgaggaaggctcccttgctgaaatgcacggcgtttcttcaatcccctcgctgtttgtttacaaaaacggggcaatggcgggccagagaaccggcgccgcccataaacacgaaatcgaagccctttttaaggattttgtctaa

SEQ ID NO: 70042 - protein, 129 aa, Unknown
  Obtained from environmental sample
  DOMAIN (26)...(128): Thioredoxin
  misc_feature (1)..(129): Xaa is any amino acid
MKNSRFFLLYFCLNEGKIYGEGFMSSVAVTTGSFQAEVLESPVPVLLDFWAPWCGPCKMLAPVLDQLAEEYKGRLKVGKINVDEEGSLAEMHGVSSIPSLFVYKNGAMAGQRTGAAHKHEIEALFKDFV

SEQ ID NO: 70043 - DNA, 1452 bp, Unknown
  Obtained from environmental sample
  misc_feature (1)..(1452): n is a, c, g, or t
ttgacattatcgaatatggaagctcgcgatatttttaaaaatatctcccctatagaccaccggtactcagtttctgaatcccaagtataccagtcccttgttccgtggatttccgaagaagccttaatttcctcctgtataaaagcggaaatcgcccttatttatgcccatttgaaagtccgtggggaactgacccccgccgcaaaagcggaactggaaaagtgtacggcaagcccggatgaggtttacgccgaggaagaaaagacccgccacaacataagggcgctggttaatgtgctaaagaccaaggttccggcaaaaatcgcccctttaattcatctgggagcgacaagcgttgatattcttgacacaagcctttcatggcggattgcgggcgttacccgcgaagttgttcttcccctgcttaaaaagctggaactgctcctctgctcatttgccgaaaaggaagcggacactccgcaggtcgggcgcacacatggacagcacgccgtccccatcacgctcggcttcgcctttgccgaatatgtttcgcggcttggaaagtcaattttagaaatagaaaaaagatcaaaggaacttaaaggaaaactttcaggcgcggtgggcgcctacaacgcgacaagcatgattgtaaaagacccgcttgagcttgagcggatttaccttgcggaacttgggcttgaaccttccgaacattccacacagcttgtcgagccagaatacctcttgcgcctgcttttggaatttaacacagctttcgggataatcgcaaaccttgcggacgatctccgcaatttacagcggagtgaaataggagaagtgcgcgaagggtttgcctcggaacaggtcggctcctccaccatgccgcagaagcgtaatccgtggaattcggaacatgttaaaagtttgtggaaagcgtttatgcccagggtgaacacgtttttcatggaccagataagcgaacatcagcgcgatctttccaattcggcaagccagcgcttcatttctgactacattgccggcttctgtctcgcggtctcgcgtatggctaaggttattgaaggacttggcgccgacagggaaagacttctcgccaacctgcgaggcggcgggatacccggcggagtgatggcggagcccgcctacatactgttagctgaaacgggagtcagcgatgcccatgaagttatacgcaagataactcttgccgccgaaaaagaaaatataagttttgccgccgccctcgctaaagagcctgaaacattgaaaaaaatcggcgctaaattggcggagttgggattaatcgcggcgaaagcggaagattcaacagaggcgttatcattctttgaaaacccggagcgttattgcgggcttgcggcaaaaaaagcaaagacgctcgcggaaaaatataaagcgttaatgggagggtaa

SEQ ID NO: 70044 - protein, 483 aa, Unknown
  Obtained from environmental sample
  DOMAIN (20)...(315): Lyase
  misc_feature (1)..(483): Xaa is any amino acid
MTLSNMEARDIFKNISPIDHRYSVSESQVYQSLVPWISEEALISSCIKAEIALIYAHLKVRGELTPAAKAELEKCTASPDEVYAEEEKTRHNIRALVNVLKTKVPAKIAPLIHLGATSVDILDTSLSWRIAGVTREVVLPLLKKLELLLCSFAEKEADTPQVGRTHGQHAVPITLGFAFAEYVSRLGKSILEIEKRSKELKGKLSGAVGAYNATSMIVKDPLELERIYLAELGLEPSEHSTQLVEPEYLLRLLLEFNTAFGIIANLADDLRNLQRSEIGEVREGFASEQVGSSTMPQKRNPWNSEHVKSLWKAFMPRVNTFFMDQISEHQRDLSNSASQRFISDYIAGFCLAVSRMAKVIEGLGADRERLLANLRGGGIPGGVMAEPAYILLAETGVSDAHEVIRKITLAAEKENISFAAALAKEPETLKKIGAKLAELGLIAAKAEDSTEALSFFENPERYCGLAAKKAKTLAEKYKALMGG

SEQ ID NO: 70045 - DNA, 984 bp, Unknown
  Obtained from environmental sample
  misc_feature (1)..(984): n is a, c, g, or t
atgtttaacgaaagctattcttacgacgatgttcttttgctgccgggatattccgaagtcctgccgaaagaatgtaacatccagacaattctttgcgacgacatccgtttgaacgtgccggtaatttccgccgcgatggataccgttaccgaggagaaactcgctatcgctatcgcgctggaaggcggagccggtgttattcaccgcaaccttccccccgaagaacaggcgcatcaggttgcaaatgttaagcgctttttaaactggataattgagtcgcctattacggttcccaatgacgcatatgtgcgcgacgtaaggtcgcttacaaaaacttacggagtatccggcgtgccggttgtggacagcaacggaaaattaaaaggaataatcacaaaccgcgaccttcgtttttgccgcgacgattcccttccagtcgttaaagtgatgacggaagaagtaatcgttgtggaaggagagccgaccgtggaaaaggcgcgcgataaattcgccgaattccgcattgaaaaacttcccgtggttgatcacgagggaaggcttaagggtcttatcaccgtaacggacatggaaaaacatgaaaatttccccaacgccgcgacagataaaaccggcaagcttattgtaggcgcggcaatttcacctcaggattacggcgtgcgccttcctcttcttataaaagcaaaagttgattttgtggttcttgacaccgctcacggcgattcaaagaatgtcatggaagcgattaaaaaaattaaaaaggaatacaacattcccgtaataggcggaaatgtcgccacaaaagacggaacaaaaaaaataatagacgcgggagctgacgcggttaaggtgggcatagggccgggatcaatctgcaccacagggttgtcgcgggaatcggagtgccgcagtttaccgccgtctgggagtgcgccgaagaggcgtcaaagtcaaaaataccggtaa

SEQ ID NO: 70046 - protein, 327 aa, Unknown
  Obtained from environmental sample
  DOMAIN (88)...(201): CBS domain pair
  misc_feature (1)..(327): Xaa is any amino acid
MFNESYSYDDVLLLPGYSEVLPKECNIQTILCDDIRLNVPVISAAMDTVTEEKLAIAIALEGGAGVIHRNLPPEEQAHQVANVKRFLNWIIESPITVPNDAYVRDVRSLTKTYGVSGVPVVDSNGKLKGIITNRDLRFCRDDSLPVVKVMTEEVIVVEGEPTVEKARDKFAEFRIEKLPVVDHEGRLKGLITVTDMEKHENFPNAATDKTGKLIVGAAISPQDYGVRLPLLIKAKVDFVVLDTAHGDSKNVMEAIKKIKKEYNIPVIGGNVATKDGTKKIIDAGADAVKVGIGPGSICTTGLSRESECRSLPPSGSAPKRRQSQKYR

SEQ ID NO: 70047 - DNA, 516 bp, Unknown
  Obtained from environmental sample
  misc_feature (1)..(516): n is a, c, g, or t
gtgccgcagtttaccgccgtctgggagtgcgccgaagaggcgtcaaagtcaaaaataccggtaatcgcggacggaggcatcaaattttccggagacattaccaaggcaataggcgcgggagcgggcgttgtaatgataggcaaccttttcgccggtntaaaagaagcgccgggaagcgaaattattcatgacggaagaatttataaagagtatcgcgggatgggaagcatgggagccattgccgacggagcgggcgaccgttaccagataggcaaagacgaggaacctgtgccggaaggcattgaggggcgcgtgccttacaagggagagcttcgcacctacctaaaccagcttatcgccggattacgcaagggcatgggttattgcggctgtaagagcatagcggaacttaataaataccgcaaatttgtaaaaattaccgccgccggcctgcgcgaaagccatcctcatgatattaccatcacgcaggaagcgcctaattattcgccgtcctga

SEQ ID NO: 70048 - protein, 171 aa, Unknown
  Obtained from environmental sample
  DOMAIN (1)...(157): IMP dehydrogenase / GMP reductase domain
  misc_feature (1)..(171): Xaa is any amino acid
MPQFTAVWECAEEASKSKIPVIADGGIKFSGDITKAIGAGAGVVMIGNLFAGXKEAPGSEIIHDGRIYKEYRGMGSMGAIADGAGDRYQIGKDEEPVPEGIEGRVPYKGELRTYLNQLIAGLRKGMGYCGCKSIAELNKYRKFVKITAAGLRESHPHDITITQEAPNYSPS

SEQ ID NO: 70049 - DNA, 450 bp, Unknown
  Obtained from environmental sample
  misc_feature (1)..(450): n is a, c, g, or t
atgatattaccatcacgcaggaagcgcctaattattcgccgtcctgacggtgtctttaaaatgactgaaaaatctttagcgcaaaagcttgatttatggtacgaaaaaatctgcgtcaaagattttattaaagacgaccccgtccaatttccgcgcctcttctccaggaaagaagatattgaaattgccgcttttcttacggcgaccatcgcgtggggaaggcgcgacttaatcctgcgctcggcccaacgcatgttcgcgataatgggaaaaagccccttttcatacataacctcgcgcgaatacaaaaacttaaagaataaaaacatccaccgcactttttttgaaggcgaccttaaatacttttgcaagggatttgaacactgttacgcaaaatactcaagcctgaaaaactttttgccggaacagaaaatacatgggaaggaatag

SEQ ID NO: 70050 - protein, 149 aa, Unknown
  Obtained from environmental sample
  misc_feature (1)..(149): Xaa is any amino acid
MILPSRRKRLIIRRPDGVFKMTEKSLAQKLDLWYEKICVKDFIKDDPVQFPRLFSRKEDIEIAAFLTATIAWGRRDLILRSAQRMFAIMGKSPFSYITSREYKNLKNKNIHRTFFEGDLKYFCKGFEHCYAKYSSLKNFLPEQKIHGKE

SEQ ID NO: 70051 - DNA, 375 bp, Unknown
  Obtained from environmental sample
  misc_feature (1)..(375): n is a, c, g, or t
atggcaaagggaaacaagggacagtattccaaacacatttccaatcccggtaaggcggatgaggaaacgggcgtgaacgaaagcaagggctccgcgtgcaagcgtcttaatcttgccctgcgctggctggtgcgcaaaggaccggtggatttaggtttatggaaaagcataaaacctgcttccctatttatcccgctggatgtgcatgttgcgcggacagcgaggaaacttgggcttttggaacgcaagtccaacgacaagaaaacggttattgagttgacggaaaaattaagaatgtattgcgcggaagatcccgttaagtacgatttcgcgcttttcggcatgggcgtgggagcaatgaacaatgaacaatga

SEQ ID NO: 70052 - protein, 124 aa, Unknown
  Obtained from environmental sample
  misc_feature (1)..(124): Xaa is any amino acid
MAKGNKGQYSKHISNPGKADEETGVNESKGSACKRLNLALRWLVRKGPVDLGLWKSIKPASLFIPLDVHVARTARKLGLLERKSNDKKTVIELTEKLRMYCAEDPVKYDFALFGMGVGAMNNEQ

SEQ ID NO: 70053 - DNA, 942 bp, Unknown
  Obtained from environmental sample
  misc_feature (1)..(942): n is a, c, g, or t
ttgacaaaagattccgccgtccgcgcttttaacaataacatcgccgcggatgaaattattgagttattgaaacggctctccggcggccggcttgatgaaagccagatttggaatctaaaggactgggaaaaacgccacggagaagtttcgttgaaaagcggcgtaattttaagcctctctcccgatcgccgctatttggctgagacaattcctctcgccggtttgatagaggaaactctcgcgcccggaatttatcttttgccgccaaacgccgcggacgaagccgccgccgctcttaccgccgccggaattgacattatttcccgcaagaatgataaatccgcttcttcatccgccgccggttcgtctctcaccgccgtgtcccccatcgccgcgccgttaaacagatattttccgcctccgtctgttgatcccgataacaagatgaaaataaaggaaataacctccgtctccgcggcgaaaaaaaacgccgccttgtccgccgcatcttcggcacaaacgccggcgtcattaataacgagttctgtcctaacagagaactttcacgctatactgaaagagacccctatgggcgatcttgaaagagcggaactttccgccagaattgacaggcgtattgttctgtgcgaaacgcagttaaaagaggcgagtctgcgttacgagaaacttgaagcgcgcaacatggattatgccggaaagcagaacattgccaaacaagccatagcccagcagtcgcccgtggagatagtccgaggcgcgggaagcggagagcgcattttcggcattcccaaagcgcttgaaaaaaaagaaggggattatattttggttgttgttcctgccggcggaaaggatgaattatccataccgctaggaaagatcagcctcttgcgccggataaaaaaatctatttttgaggtataa

SEQ ID NO: 70054 - protein, 313 aa, Unknown
  Obtained from environmental sample
  misc_feature (1)..(313): Xaa is any amino acid
MTKDSAVRAFNNNIAADEIIELLKRLSGGRLDESQIWNLKDWEKRHGEVSLKSGVILSLSPDRRYLAETIPLAGLIEETLAPGIYLLPPNAADEAAAALTAAGIDIISRKNDKSASSSAAGSSLTAVSPIAAPLNRYFPPPSVDPDNKMKIKEITSVSAAKKNAALSAASSAQTPASLITSSVLTENFHAILKETPMGDLERAELSARIDRRIVLCETQLKEASLRYEKLEARNMDYAGKQNIAKQAIAQQSPVEIVRGAGSGERIFGIPKALEKKEGDYILVVVPAGGKDELSIPLGKISLLRRIKKSIFEV

SEQ ID NO: 70055 - DNA, 1266 bp, Unknown
  Obtained from environmental sample
  misc_feature (1)..(1266): n is a, c, g, or t
atgaaagaaaaaattttccgccctgttgaattctggaaatccgccgtaatgaccctgccggacaactcgttttttgagttaatccgcagcgtcttcgggaaaataaaaaccccttttaacaaacagcagttaacggacgatcttgaaaaatttttaatgcgcgatgatatacaaaaaacaatagccgcctatatagacaggaatgacgcgaaattaatcgcgacggcagcccttttcggcgaacctgctcccggagaacttgaaagttttttttgcggcgaattcagttacacgcaattacaggatattattgtaaatcttgaagagcggtttattctgtaccgtttcagcgaggaaaacattgcccgtctcgcgctgaatcctgttttggaacaggtactcgctccgttcacggcggacacctcttcgctttttcccgcagttgatgaagacggcgcatccttcggaagcggcgcatcctccggaagcagcgcatcctccggaagcggcgccgaaaattctcctcctgccgcatcaaccgcgattttgcaaaacgagattttaaacgacagaattttagccgcgcttttatcatttgtctgccgcgaagaacaattttttaagtcggaaggcgttatccgcaaacgtattctggaagcggggaaaacctgctttggaagcatagatttgcagtttatcttcggcagccttcaaatcctcggtttgttttacgcgaacagcggcaggctttatcccgataaaaaaaggtttgaggaattcggcatgctttcggcgcgggaacgcggagaatactgcgcggcggcgttaattgtgtatgaagaaatgaagcccccatcgccgattcttccgccgctgttcagaaacagaataagggaagtggcaaattttattcatacttttctagatgctcttgaattggatcaaaagtaccatgaaaaaacactgacaaggcttgcggaagttctgaaagcaaaaacaggcatcgttatttacggcaatcccggagacgcgcttgaaaaaaccggtcttttggtatcaagctcgccgggtacaaaacagcttggagttatcgcgcagaacactatcgcaaaacagaacaacacggaagagaaggaaccggttatcgcggttgattccggtttttccgtcattgtctatccggaaatttgttacaaagacgcgattaagttagccgctttcatgaatgttgcggaagccggcgcgcggttgtccgttttgaattga

SEQ ID NO: 70056 - protein, 421 aa, Unknown
  Obtained from environmental sample
  misc_feature (1)..(421): Xaa is any amino acid
MKEKIFRPVEFWKSAVMTLPDNSFFELIRSVFGKIKTPFNKQQLTDDLEKFLMRDDIQKTIAAYIDRNDAKLIATAALFGEPAPGELESFFCGEFSYTQLQDIIVNLEERFILYRFSEENIARLALNPVLEQVLAPFTADTSSLFPAVDEDGASFGSGASSGSSASSGSGAENSPPAASTAILQNEILNDRILAALLSFVCREEQFFKSEGVIRKRILEAGKTCFGSIDLQFIFGSLQILGLFYANSGRLYPDKKRFEEFGMLSARERGEYCAAALIVYEEMKPPSPILPPLFRNRIREVANFIHTFLDALELDQKYHEKTLTRLAEVLKAKTGIVIYGNPGDALEKTGLLVSSSPGTKQLGVIAQNTIAKQNNTEEKEPVIAVDSGFSVIVYPEICYKDAIKLAAFMNVAEAGARLSVLN

SEQ ID NO: 70057 - DNA, 1173 bp, Unknown
  Obtained from environmental sample
  misc_feature (1)..(1173): n is a, c, g, or t
ttgacgaagggagaggatttgcagataacgcttcgtgcgcgctgcctttcgggcaggcagtttaatccgagggattatcaggttaccgcggcgcattccgtcacaggatcgggagggccgggttcaggttacggggttgtcgttcttccctgcggctccggcaagacaatagtcggaatgtacattatgtctttattaaagactaacacattgattttaacaaccaatgtcgcggccgttcatcaatggatagaggaacttttagacaaaaccgaattgacgaaggatcagattgcggagtatacgggcgacagcaaagcggtcgcgcccgtaaccgtcgccacttatcagataatcgcgtggagaccggacaaggacgcggattttccccattttagattattccgcgagaggcagtgggggctggtaatttacgacgaggtccacctgctgcccgcgccggtatttcgcgtaacagcggaactgcaggcgatacggcggctgggccttacggcgactttaatccgcgaggacggggaggaagacgcggtcttcagccttgtcgggccaaagcggtacgacgtgccgtggaaagaccttgaagacaagggatggatagccgaagccttttgtacggagatcaggcttgatatgccggaaaatcttaagataccgtacgccgcggctcagcccagggaaaagtacagattagccgctgaaaatccgttaaaacaaaatgttgtactgcagttagtcgaaaatcatcctgatgatcagataatggtcataggccagtatctgacccagcttaacgctcttgccaaacttcttaacgctccgattattacgggaaaaacttccaacgcggacagggagcggatttactcgggttttaagaagggagaattgcgccttattgttgtttccaaggtagcgaacttcgccattgatcttcccgacgccagcatggcgattcaggtttcaggctctttcggctcaaggcaggaagaagcccaaaggctggggcggattttaaggccgaaagaacgcaacgcgtggtttttctcgcttgtatcaagttatacggtggaagaggaatttgcggctaaccgccagaagtttttaaccgagcagggctacaaatactctattcaaaaatgggataatatatga

SEQ ID NO: 70058 - protein, 390 aa, Unknown
  Obtained from environmental sample
  DOMAIN (24)...(182): DEAD/DEAH box helicase
  misc_feature (1)..(390): Xaa is any amino acid
MTKGEDLQITLRARCLSGRQFNPRDYQVTAAHSVTGSGGPGSGYGVVVLPCGSGKTIVGMYIMSLLKTNTLILTTNVAAVHQWIEELLDKTELTKDQIAEYTGDSKAVAPVTVATYQIIAWRPDKDADFPHFRLFRERQWGLVIYDEVHLLPAPVFRVTAELQAIRRLGLTATLIREDGEEDAVFSLVGPKRYDVPWKDLEDKGWIAEAFCTEIRLDMPENLKIPYAAAQPREKYRLAAENPLKQNVVLQLVENHPDDQIMVIGQYLTQLNALAKLLNAPIITGKTSNADRERIYSGFKKGELRLIVVSKVANFAIDLPDASMAIQVSGSFGSRQEEAQRLGRILRPKERNAWFFSLVSSYTVEEEFAANRQKFLTEQGYKYSIQKWDNI

SEQ ID NO: 70059 - DNA, 573 bp, Unknown
  Obtained from environmental sample
  misc_feature (1)..(573): n is a, c, g, or t
atgacgcgcgaagaagcgatagaagaaattgccgcaaaccgagaaggaattattatttccactaccggaatgatctcgcgcgaattgtatgagttacgcgacaaagcaggtaccggtcattcgcgcgattttcttaccgtaggttcaatggggcacgcgtcttctatcgcgctgtccatcgccttgcaaaaaccgcagctgcaagttacctgccttgacggagacggcgcggctcttatgcacatgggctcctttgcagcaatcggacagcaaaaaccgcgtaactactgccatatagttcttaataacaacgcgcatgattctgtcggcggtcagcctactatcgccccatttattgatattccggctgtcgcgcgcgcctgcggatatactaaagtgtatcaggcgaaaacaaaaaaagaattacaaaagattttatcaaaaaaaaacgaagggcttacatttatcgaagtaaaagtaaaaaagggcgcgcgcaaagatttgggacggccaaaatcatcgcctcaggaaaacaaggcggcgtttatgaaatttattgaggaatatagatga

SEQ ID NO: 70060 - protein, 190 aa, Unknown
  Obtained from environmental sample
  DOMAIN (21)...(158): Thiamine pyrophosphate enzyme, C-terminal TPP binding domain
  misc_feature (1)..(190): Xaa is any amino acid
MTREEAIEEIAANREGIIISTTGMISRELYELRDKAGTGHSRDFLTVGSMGHASSIALSIALQKPQLQVTCLDGDGAALMHMGSFAAIGQQKPRNYCHIVLNNNAHDSVGGQPTIAPFIDIPAVARACGYTKVYQAKTKKELQKILSKKNEGLTFIEVKVKKGARKDLGRPKSSPQENKAAFMKFIEEYR

SEQ ID NO: 70061 - DNA, 759 bp, Unknown
  Obtained from environmental sample
  misc_feature (1)..(759): n is a, c, g, or t
atgataaaacaggcagttattgtagcggcgggtcttggttcgcgccttaaagaaaagacggtttcaatgcccaaaggatttcttgaattgggcgggatcgccattgttgaatggtcggttcaaaaactgcttgcctgcggcatcgaaaaaataattataggtacgggttatcacgccgaagcgtatgacgagcttgcgaaaaaatatcccgccatacaaaccgcctttagcgccgactacgagacaacaagcagtatggctacattgaacgtatgcgcctctcatgtaaacgatgattttttgcttttggaatctgacctaatttacgacagcataggtcttagtatcctttgcaatgatattcatgaaaatgttattctcgcttccggcgcgaccaattcaggcgacgaggtgtacctcgaagcggttaacggctttttcttaaaagcgctttcaaaaacaaaaccgagttatcttctacttacggcgagcttgtcggaattacaaaaatttcccgctctctcctttcctctatgtgcgcatattacgaaaaaaaacgcgcagaacttccaaagcttgattatgaacacgcaatcatggcgtgtactgactcgaatccggtatttatccgtaagatcgaatattacgcgtggcgagagattgacgatgacagtcatcttgaaatggcgcaaaatgaaatactcccgcttattcaggaaaatgaatcgttacgccaaatccgccgcgaagttctgttaa

SEQ ID NO: 70062 - protein, 252 aa, Unknown
  Obtained from environmental sample
  misc_feature (1)..(252): Xaa is any amino acid
MIKQAVIVAAGLGSRLKEKTVSMPKGFLELGGIAIVEWSVQKLLACGIEKIIIGTGYHAEAYDELAKKYPAIQTAFSADYETTSSMATLNVCASHVNDDFLLLESDLIYDSIGLSILCNDIHENVILASGATNSGDEVYLEAVNGFFLKALSKTKPSYLLLTASLSELQKFPALSFPLCAHITKKNAQNFQSLIMNTQSWRVLTRIRYLSVRSNITRGERLTMTVILKWRKMKYSRLFRKMNRYAKSAAKFC

SEQ ID NO: 70063 - DNA, 1302 bp, Unknown
  Obtained from environmental sample
  misc_feature (1)..(1302): n is a, c, g, or t
atgtgcgcatattacgaaaaaaaacgcgcagaacttccaaagcttgattatgaacacgcaatcatggcgtgtactgactcgaatccggtatttatccgtaagatcgaatattacgcgtggcgagagattgacgatgacagtcatcttgaaatggcgcaaaatgaaatactcccgcttattcaggaaaatgaatcgttacgccaaatccgccgcgaagttctgttaaatccgggaccggcaacaacaagcgacagcgttaaatacgctcaggtttgcgccgacatttgcccccgtgaaaaagaattcggagatgtaatgaaatgggtatgcaaagaacttaccaccgttgtcgcagacccgtccgaatatgaaacagtatttttcggcggttcgggtactgcagccgatgaggcgatgatttcttcatgtgttacagaagccggacatattcttattgtcgataacggctcttacggggaaagaatagcgaaaataacatccgtttataaaattaaacacactgtatttaaaagctccacttacgaaaaaatagatatagccgctcttgagaacgaatttaaaaccggcaaatatacccatcttggcattgtgtaccacgaaacaacaacaggcttgcttaatccgcttgatgttatttgcccgcttgcgaaaaaatacaacatagttactatagttgacgccgtaagcatttacgccggaatgccgatggagttatcaaaactcggcattgattttatggcgtctacttctaacaaaaatattcagggaatggcgggcgtcggttttgttatctgcaaaaaaaccgagcttgaaaaaacaaaaactattcctatgcggaattattatcttaatctgtatgatcaatacgcgcattttaccaaaacaggacaaacacgattcactccccctgtgcaaactctttatgcgcttagacaggcgattcttgaaacaaaacaagaaacagttgaaaaacgctgggagcgttacacagaatgttggcgtattcttgttgacgcggttaagaaatttaatcttaaaatgctggtaaaagaagaagatcagtctcatttaattaccgccatttttgatcctgatacgccgaaatacagttttgaagatttacatgatcttgcccgtaaacacgaatttaccatttacccgggaaaactcggcaacataaatacatttagaatagcaaatataggcgatattaaaccgcacgaaatgaaaagatttaccggagttcttaaaaattatcttgattctatcggatggaaataa

SEQ ID NO: 70064 - protein, 433 aa, Unknown
  Obtained from environmental sample
  DOMAIN (72)...(405): Aminotransferase class-V
  misc_feature (1)..(433): Xaa is any amino acid
MCAYYEKKRAELPKLDYEHAIMACTDSNPVFIRKIEYYAWREIDDDSHLEMAQNEILPLIQENESLRQIRREVLLNPGPATTSDSVKYAQVCADICPREKEFGDVMKWVCKELTTVVADPSEYETVFFGGSGTAADEAMISSCVTEAGHILIVDNGSYGERIAKITSVYKIKHTVFKSSTYEKIDIAALENEFKTGKYTHLGIVYHETTTGLLNPLDVICPLAKKYNIVTIVDAVSIYAGMPMELSKLGIDFMASTSNKNIQGMAGVGFVICKKTELEKTKTIPMRNYYLNLYDQYAHFTKTGQTRFTPPVQTLYALRQAILETKQETVEKRWERYTECWRILVDAVKKFNLKMLVKEEDQSHLITAIFDPDTPKYSFEDLHDLARKHEFTIYPGKLGNINTFRIANIGDIKPHEMKRFTGVLKNYLDSIGWK

SEQ ID NO: 70065 - DNA, 1032 bp, Unknown
  Obtained from environmental sample
  misc_feature (1)..(1032): n is a, c, g, or t
atgattataaggtctaaagcccctttaaggctagggctagcgggcggcggaacagacattgcggattactataaccgttttggcggttatgtgttaaacgcaacggtggatatgtacgcctattgtacaatcgaacctaatgattcaggcaaagtggaatttatcgccgccgatttaggcaaacaagaggaatacaaagcggaagaaaaacttcccatctcctctgttctgcagcttcattgcggtatttacaacagaatcatttccgattttgtaaaaaaaccgctctcctttaaaatgaccacttactctgacgctcccgccggttccggtcttggttcgtcttccacaatggttgtcgctataatcaaagcttttgaggagtggcttaatctgccgttaggcgaatacgatattgccgcccttgcctataaaattgaacgcgaagacattgggcttgcgggcggcaaacaagaccagtacgcggcgacattcggcggctttaattttatggagttttatgaaaatgagcgcgtaatcgttaatccgcttcgtctaaaacgctggataagaaacgaaattgagtcgtcgcttattttatactacaccggcgtttcaagagaaagcgctaatattataaatgaacaaattaagcacacgcaaaaaggcgacgcaaaaaacattgaaagcatgcatgaaatgaaaaggcaggcggtaattatgaaagaagccctgttaaaaggagactttaaaggattttccggctgtcttttgaacggctggcttgcaaagaaaaacgccgccgcttcaatttccaattcctttttagacgaactataccggtacgcgcttgacaacggcgcggaatcggcaaaaatttcaggcgccggcggcggcggctttatgatgatatactgtaacccctgcaaaagaatcgctcttattcgcgcgctcaaagaaaaacaggggattgtattaacgccttcattcacagaaacaggaactcaagcatggactatatacaacaattaa

SEQ ID NO: 70066 - protein, 343 aa, Unknown
  Obtained from environmental sample
  DOMAIN (241)...(325): GHMP kinases C terminal
  misc_feature (1)..(343): Xaa is any amino acid
MIIRSKAPLRLGLAGGGTDIADYYNRFGGYVLNATVDMYAYCTIEPNDSGKVEFIAADLGKQEEYKAEEKLPISSVLQLHCGIYNRIISDFVKKPLSFKMTTYSDAPAGSGLGSSSTMVVAIIKAFEEWLNLPLGEYDIAALAYKIEREDIGLAGGKQDQYAATFGGFNFMEFYENERVIVNPLRLKRWIRNEIESSLILYYTGVSRESANIINEQIKHTQKGDAKNIESMHEMKRQAVIMKEALLKGDFKGFSGCLLNGWLAKKNAAASISNSFLDELYRYALDNGAESAKISGAGGGGFMMIYCNPCKRIALIRALKEKQGIVLTPSFTETGTQAWTIYNN

SEQ ID NO: 70067 - DNA, 627 bp, Unknown
  Obtained from environmental sample
  misc_feature (1)..(627): n is a, c, g, or t
atggactatatacaacaattaattcaaagatatccgtctctggaatctgtcaaagccgatataagcgcggcgtttgacattattgccgattcatactcaaaaggcggcaaactgctgatagcgggtaacggcggaagcgcttcggacgctgaacatatcgcgggcgaattaatgaaaacattttcaaaaaaaagaaatctgcccgattcatttattagcgacataaaaaaagttgatcctgaaattgcagattatcttattcctcgtatgcagccaggtcttcctacaatcgcgctttccggtcatgcgtcgcttaacacagcttgtataaacgatattgacggtaacatcacattcgcgcagcaagtttacggatacggaaaagaaacagacgtgttactcgctatatcaacttcgggcaattcaagaaatgtgctgtatgcgtcggctgtcgcaaaggcgaaaaaattaaaaattatcgctctctcaggcggaaccggcggagcgcttaaaaaagtagcggacgtaagtatcattgtgccggaaacggaaacatacaaagtacaagaattacatttgcctgtatatcattgtctgtgtcagatgctggagaatcatttcttttaa

SEQ ID NO: 70068 - protein, 208 aa, Unknown
  Obtained from environmental sample
  misc_feature (1)..(208): Xaa is any amino acid
MDYIQQLIQRYPSLESVKADISAAFDIIADSYSKGGKLLIAGNGGSASDAEHIAGELMKTFSKKRNLPDSFISDIKKVDPEIADYLIPRMQPGLPTIALSGHASLNTACINDIDGNITFAQQVYGYGKETDVLLAISTSGNSRNVLYASAVAKAKKLKIIALSGGTGGALKKVADVSIIVPETETYKVQELHLPVYHCLCQMLENHFF

SEQ ID NO: 70069 - DNA, 564 bp, Unknown
  Obtained from environmental sample
  misc_feature (1)..(564): n is a, c, g, or t
atgaaatcagaggggaaaatgaactattacgctatacaggtaaagacccgcgcggaagctaaatttatcaaactattcaaagctatgcacccggaaatcactttacccgtttattttccacagagacgccttgacatacggagaaaagggctgataaagccttcaatggcggccgtttttcccggatacctctttattgaagtggaaaaccatgaggatatcttaaaataccagtgggatttccggcggacggacggtttttaccgttttttaaaatcaaatcaaaagataactccgcttgccgaccgtgatttggagctggtccttcattttatcaaaaacgccggccctgtagcgggcagatccaaggtgtatttcaatgaaaatgcgcgcattgtagtcgtggaaggcccccttatgggacttgagggaagaattataaaagtagacaggagaaaagggagggcgaaaataaagcttgatttatacaacgattcatttagtatagatttagggtttgaagttatcggttctatggaacctgccgggaggggggtaaggtaa

SEQ ID NO: 70070 - protein, 187 aa, Unknown
  Obtained from environmental sample
  DOMAIN (126)...(161): KOW motif
  misc_feature (1)..(187): Xaa is any amino acid
MKSEGKMNYYAIQVKTRAEAKFIKLFKAMHPEITLPVYFPQRRLDIRRKGLIKPSMAAVFPGYLFIEVENHEDILKYQWDFRRTDGFYRFLKSNQKITPLADRDLELVLHFIKNAGPVAGRSKVYFNENARIVVVEGPLMGLEGRIIKVDRRKGRAKIKLDLYNDSFSIDLGFEVIGSMEPAGRGVR

SEQ ID NO: 70071 - DNA, 1170 bp, Unknown
  Obtained from environmental sample
  misc_feature (1)..(1170): n is a, c, g, or t
ttggacgacgatcctgaaaaaataggcaaaagaatagacaacatacccgtcataggccccattaatgaagtcgcggttttagtgagggcaagccgcgccgacgaggcgattatcgccatgccgagcgcggacaggaattaccttaaacaaatctacgataccttaaaaaaaataggcttccagcaaatcagaatcctgcccggcatttcccaaatcattgacggagacgcgcactttatccaaacccgttccatagacctgcaggaccttctggggcgcaatcccgtcgcgataaaattgaaacagagcctcgcctacctcaggggcaagcgcgtccttgtcacgggcgcgggcggctctattggcagcgaactgtgccgccagcttttgtcgggaggcgcttcccgcctctaccttttcgggcacggggaaaattcaatttaccagatagacagggaattgcgccttttgcaggaagagggagtcggcgaaaaagcggctcttgtgcccgtcatcggggatttaagggatacggattatgttgattatattctggggcacttaaaggcggacgcggtttttcacaccgcggcgtacaagcacgtcccgctgatggaggaaaaccccgtagcggcggtcgaaaacaatgtctttgggaccgaaaaccttgtgcttgccgcgataaaacacaacatcaaaaggttcgtccacatcaccaccgacaaagccgtcgatcccgtttccgtatacggcgcttccaagtacctgtgcgaacaaatggtgctggaagccgccgcctcgtcgggcggccccaatttcatggtagtccgtttcggcaacgttctcggctcccgcggctctatagtgccgctgttccagcagcagattcaaaaaggcggaccggtcacaattacacatcccgacatacgccgttggtttatgaccataagcgaggcgtgctcgctggttctcaaagccggaggcgtcggcgtaaacggaggcctgtacctgctggacatgggcgagcccgtgcgtattaaagatttggcggaacagttaatccgctttcacgggtttgaaccggatacggagattaagatagtatacaccggcctgcgccccgggcgagcgcatggacgagcctctttggtcacaggacgaaaaaattaa

SEQ ID NO: 70072 - protein, 389 aa, Unknown
  Obtained from environmental sample
  DOMAIN (110)...(269): short chain dehydrogenase
  misc_feature (1)..(389): Xaa is any amino acid
MDDDPEKIGKRIDNIPVIGPINEVAVLVRASRADEAIIAMPSADRNYLKQIYDTLKKIGFQQIRILPGISQIIDGDAHFIQTRSIDLQDLLGRNPVAIKLKQSLAYLRGKRVLVTGAGGSIGSELCRQLLSGGASRLYLFGHGENSIYQIDRELRLLQEEGVGEKAALVPVIGDLRDTDYVDYILGHLKADAVFHTAAYKHVPLMEENPVAAVENNVFGTENLVLAAIKHNIKRFVHITTDKAVDPVSVYGASKYLCEQMVLEAAASSGGPNFMVVRFGNVLGSRGSIVPLFQQQIQKGGPVTITHPDIRRWFMTISEACSLVLKAGGVGVNGGLYLLDMGEPVRIKDLAEQLIRFHGFEPDTEIKIVYTGLRPGRAHGRASLVTGRKN

SEQ ID NO: 70073 - DNA, 1719 bp, Unknown
  Obtained from environmental sample
  misc_feature (1)..(1719): n is a, c, g, or t
atgaaagctcccgcctttctggaagatatttatccgcagaatttattgtacggcataaccatcaggtccccgacagcaaacgggcatctcaaaatgcttcattttcccgatcttccggacaattatatagtaattaccgccagaaatatcccgggagaaaacaggctggaagacacgtccattcccatactcgcggattcgaaactgtcctacataggagaaccggtagccattctgcttggacaggataaaacaaaacttgaagagctggcgagtcaatgcaaggttgtttttgaagaggaaacacctgaatttaacgcggtaacgcccgcggcagtcgtccgcgagattcatattggcagctgtgaaagcgtctatgacaggccggaaaaaatattagccgggacttacataacgggaatacaggaccattggtacgccgagcctgcaggagccgtaacatattatgaaaaaaaagagaaagagactaagttaaaaaagaccgaaaaaacattaattgtaaaaaccgcaacccaatggccgtatcatgtaaaacgctcggcagcccgcgtacttggaatcgaccaatcgggcgtttgcgtggaaacaacctcgctgagcctgcacatggacgggaaacttatgtttacctcccttgtcgcctgccactgcgcgctcggcacctttcttacaaacaagccggtacgccttattctaaacagggaagaagattttttgtactctccaaaacgctgtaaaaccaatattgacctggttaccaccatagacgaaaaaggcaatataaccgccgcggaagcggacatttctgttaaccttggcgcacacggagttaacggcgaggaaatactggatcaggtttgtcttggcgttatcggctataataatgttgaaaattttaaaataaccgcaaaggcgtatgtttcaaacataccgcctcagggcccgttttcgggattcggtctcgctcagggtttttttgccatgcagcgtcatttggcgcaaatcgcggataccgttcaaattaaccccctggaatggcggaaaacgcactacaacccttccatggttctgccttcgggaataaatcccaaaaaccatatctctgttgataaacttgtaagcgccgttacaaatacaagcgattataaccgtaaatgggcttcttacgaactattgaaacaaagcaggcgggataagactttagcgtatgaaaaaggcgaaaatttaagaggaataggattaacggtcggatttcagggaaacggccttctctaccacggcgcggacaagggaatttacagcgtggaagttactctgacaaaagacagtttccttgaaattaaatcaagcattacaagctcggaagaagattatgtcagaatctgggcaaaaattgctaatgatattttatcgattgaaaagggaaaaatacgccttattacacagcaagcgccggacgggggtccctcctgcgcttcaagaaacatcacggcgcttacaaaactggttgaaaaatgctgtcaggccatccgtaaacagcgctttcacgaccccttgcctattaccgtgcgccgttccgtaaaaccccaatacggctcgctgtggcagaaccgctttttgccccgcgaaggaaagaacatggacatcagcggctttcaagactcggcatggccgcctgcgtcgttgaagtttccatag

SEQ ID NO: 70074 - protein, 572 aa, Unknown
  Obtained from environmental sample
  DOMAIN (4)...(102): Aldehyde oxidase and xanthine dehydrogenase, a/b hammerhead domain
  misc_feature (1)..(572): Xaa is any amino acid
MKAPAFLEDIYPQNLLYGITIRSPTANGHLKMLHFPDLPDNYIVITARNIPGENRLEDTSIPILADSKLSYIGEPVAILLGQDKTKLEELASQCKVVFEEETPEFNAVTPAAVVREIHIGSCESVYDRPEKILAGTYITGIQDHWYAEPAGAVTYYEKKEKETKLKKTEKTLIVKTATQWPYHVKRSAARVLGIDQSGVCVETTSLSLHMDGKLMFTSLVACHCALGTFLTNKPVRLILNREEDFLYSPKRCKTNIDLVTTIDEKGNITAAEADISVNLGAHGVNGEEILDQVCLGVIGYNNVENFKITAKAYVSNIPPQGPFSGFGLAQGFFAMQRHLAQIADTVQINPLEWRKTHYNPSMVLPSGINPKNHISVDKLVSAVTNTSDYNRKWASYELLKQSRRDKTLAYEKGENLRGIGLTVGFQGNGLLYHGADKGIYSVEVTLTKDSFLEIKSSITSSEEDYVRIWAKIANDILSIEKGKIRLITQQAPDGGPSCASRNITALTKLVEKCCQAIRKQRFHDPLPITVRRSVKPQYGSLWQNRFLPREGKNMDISGFQDSAWPPASLKFP

SEQ ID NO: 70075 - DNA, 516 bp, Unknown
  Obtained from environmental sample
  misc_feature (1)..(516): n is a, c, g, or t
gtggcagaaccgctttttgccccgcgaaggaaagaacatggacatcagcggctttcaagactcggcatggccgcctgcgtcgttgaagtttccatagaccttgtggaatgcatccctcaaatccgcggtatatggcttgcaattgacggcggaaaaataatctcggaaaacagggcaagaaggaacattaaccgcggggcgacccaggccttgggctgggctttttcagaaaatatcgaatattctgaaggaacgcttcctaaagccaagtacgacaaatttgtaatttcatcttgtcttgatattccggtattaggcgttgaatttatgtctgcgggaagttccgaaacaaagggaataggagaactgccttttacatgcatacccgcggcttttttacaggctgtctctcaggcaatggatcattgttataaaaacatccctttaagaaggaaagaaatttgggaaatagcgcggcttaggaacagcgacgcgcctatacaggggcagaaatga

SEQ ID NO: 70076 - protein, 171 aa, Unknown
  Obtained from environmental sample
  misc_feature (1)..(171): Xaa is any amino acid
MAEPLFAPRRKEHGHQRLSRLGMAACVVEVSIDLVECIPQIRGIWLAIDGGKIISENRARRNINRGATQALGWAFSENIEYSEGTLPKAKYDKFVISSCLDIPVLGVEFMSAGSSETKGIGELPFTCIPAAFLQAVSQAMDHCYKNIPLRRKEIWEIARLRNSDAPIQGQK

SEQ ID NO: 70077 - DNA, 486 bp, Unknown
  Obtained from environmental sample
  misc_feature (1)..(486): n is a, c, g, or t
atgacaattaattttatattaaacggggaagacgttatggtccgcacggaagccggggtaaggctgattcatatactgcgggaaagttttggcttgttcggcgcgaaagccggctgccttaacggccagtgcggcgcatgtacggtaatttttaacagcatcgtaacttccgcgtgccttataccggcgttcagggtaagaggaagcgaaattatcacgatagaaggattttcacagacggacgagtacaatgacatattaacaggattcaaggaagtgcatttgggaaactgcgggttttgcgaagcgggaaaaattctttgcacggaaacgcttcttgaaagattcccaaacccgacaagggaagacatcattatgagttttgcgggcattaactgccgctgtaccaatatagacaggctggtagaagcggtgaactgcataataggcatacgccggcggagattgtatggacgtactgcttaa

SEQ ID NO: 70078 - protein, 161 aa, Unknown
  Obtained from environmental sample
  DOMAIN (73)...(147): [2Fe-2S] binding domain
  misc_feature (1)..(161): Xaa is any amino acid
MTINFILNGEDVMVRTEAGVRLIHILRESFGLFGAKAGCLNGQCGACTVIFNSIVTSACLIPAFRVRGSEIITIEGFSQTDEYNDILTGFKEVHLGNCGFCEAGKILCTETLLERFPNPTREDIIMSFAGINCRCTNIDRLVEAVNCIIGIRRRRLYGRTA

SEQ ID NO: 70079 - DNA, 789 bp, Unknown
  Obtained from environmental sample
  misc_feature (1)..(789): n is a, c, g, or t
atggacgtactgcttaacagaatattttttcccaattcgttcaacgaattgttttccgcgtggaaccagaacccgtccgcccaaccctacgccggaggcaccgtccttttgtggaaacaaagaaaaaccataatagacctgccgcctgtaatcatctgccttgataaattacaggaactgcaaaacattacaagaaccgaacattaccttgaaatcggctctatggtaaaattaaataaaataatcagaatgggaaaaatagtgccgcaagttctctgcgactgccttgaaaatataggcggggtccagttaaggaacgtcgcgaccataggcggcaatatctgcgccgcgccgggtctgcttgacatatccgcgcctcttgtcgccctagacgcccaatacgagttccggggcgcgcaaaattcgcgctgggtttccgcttcgcgctttcactcggaagaagaccgcagcatgcttgaaaaaaaggaaattcttaccagaatcaggctgccccttcatcaatgggactattcaatgtataaaaagttcttttcggaagacatgtataaccacaaaacaatcacttttttggcaaaggcccaaaaaaacatcctttccgacataaaagttatttgtaaaggtgacacgattatccggaacaagagcgccgaaggcataataatcggcagccacctgcccctgcacagaaaagcagccgccgattttatcgaaaactggaagggatttttgtccggtaacggcgaatggacgaatcaaaactcgcgataa

SEQ ID NO: 70080 - protein, 262 aa, Unknown
  Obtained from environmental sample
  DOMAIN (6)...(173): FAD binding domain in molybdopterin dehydrogenase
  misc_feature (1)..(262): Xaa is any amino acid
MDVLLNRIFFPNSFNELFSAWNQNPSAQPYAGGTVLLWKQRKTIIDLPPVIICLDKLQELQNITRTEHYLEIGSMVKLNKIIRMGKIVPQVLCDCLENIGGVQLRNVATIGGNICAAPGLLDISAPLVALDAQYEFRGAQNSRWVSASRFHSEEDRSMLEKKEILTRIRLPLHQWDYSMYKKFFSEDMYNHKTITFLAKAQKNILSDIKVICKGDTIIRNKSAEGIIIGSHLPLHRKAAADFIENWKGFLSGNGEWTNQNSR

SEQ ID NO: 70081 - DNA, 807 bp, Unknown
  Obtained from environmental sample
  misc_feature (1)..(807): n is a, c, g, or t
gtgccgctcgtgccggttttggctcttggaactcatataatagggcagtgtgtcagcgacaaccatgacccccgtttgaacgcctttgcgccctcaaatcttgccggaaaaagcgaggatatccgcaagtgggcgattcaggaaatgaagtacgccgcggtcgccgcgaaaaatttcggcgtaaaaacggttaccggttttatgggcagtcccatttgggcttactggtactccttcccccaaaccacggaagaaatgatcaacgacgcttacgccgcggtagtcaagcaatggacgcccatttttgacgagtttgacaagaacggaataaagttcgcgcttgaagttcatcccgcccaaatcgcgtttgattactacacctcggaacgtctgttaaaagaatttaaaaaccgcaaaactcttggctttaattttgatccgtcccaccttatctggcagggcgtaagtccgcaggtttttatcagggattttcataaacaaattatacacgtccatattaaggacgccgctgtaaccctggacggcaaggcggggctgcttggctctaaccttgctttcggcgatttaaggcgcggctggaatttccgttcgcccggacacggagacgttgactttgaaaatgttatccgcgaattaaacgcggttaattacaaaggacctctctctgttgaatgggaagacgccggaatgagcagagaaacaggcgcgaaggaagcctgtgaatttgtaaggaacataaacttttcaccttccgacgccgccgatgacggacaaaaagcggattag

SEQ ID NO: 70082 - protein, 268 aa, Unknown
  Obtained from environmental sample
  DOMAIN (3)...(210): Xylose isomerase-like TIM barrel
  misc_feature (1)..(268): Xaa is any amino acid
MPLVPVLALGTHIIGQCVSDNHDPRLNAFAPSNLAGKSEDIRKWAIQEMKYAAVAAKNFGVKTVTGFMGSPIWAYWYSFPQTTEEMINDAYAAVVKQWTPIFDEFDKNGIKFALEVHPAQIAFDYYTSERLLKEFKNRKTLGFNFDPSHLIWQGVSPQVFIRDFHKQIIHVHIKDAAVTLDGKAGLLGSNLAFGDLRRGWNFRSPGHGDVDFENVIRELNAVNYKGPLSVEWEDAGMSRETGAKEACEFVRNINFSPSDAADDGQKAD

SEQ ID NO: 70083 - DNA, 555 bp, Unknown
  Obtained from environmental sample
  misc_feature (1)..(555): n is a, c, g, or t
ttgggaggaaatatgccaatcattgctgaagaagtaaccacaacaacagatattgactctgcggagcttgctcaaagggtggcaattttaaaacgatttaaaatcctgttatcacaacagagagaacgatttaaatcatatcttgatttacttgacaaacaacagaatgtaatagaatccggcagcgccgaagaccttttaacttatgtagagatcgaagaaaaaatagtcgccgatattttctctattcagaaagttatcgacccgcttgaagaaatgtacaattcggtagtctccggacaggaccaatcacagttgtcagcaaaactggaaaattcaggcaatcaggaagaagtgccaagccttaaagcgtctcttgaaaatttaaaaaacgaagccgttctgagatcgaccaagaacaaagaattgctttccaaacgcatgttggaacttcgacaggaaattacaaccctgcggaacaacccctacgccgcaagcggcagaaacgcctacagcaactcaaacaaagcctcactgattgacgtgcagggataa

SEQ ID NO: 70084 - protein, 184 aa, Unknown
  Obtained from environmental sample
  misc_feature (1)..(184): Xaa is any amino acid
MGGNMPIIAEEVTTTTDIDSAELAQRVAILKRFKILLSQQRERFKSYLDLLDKQQNVIESGSAEDLLTYVEIEEKIVADIFSIQKVIDPLEEMYNSVVSGQDQSQLSAKLENSGNQEEVPSLKASLENLKNEAVLRSTKNKELLSKRMLELRQEITTLRNNPYAASGRNAYSNSNKASLIDVQG

SEQ ID NO: 70085 - DNA, 462 bp, Unknown
  Obtained from environmental sample
  misc_feature (1)..(462): n is a, c, g, or t
ttgaggggaataatgtcatataaaaacgcgtcatcatcatacaaagaagccaaagtaaaaactgccggtaagggacagcttataatcatgctgtatgatgaggctgtaaaacaactgaccaaagccacggaacttcttcatttgaatataaaagaaaaaagagaccccggcagaattgaacaaatatccaaagccgttttaaaaaccgaggaaattattaccgaattaaccgtttcactggattttgataatggcggcgaaatagccaaaaaccttttttctatttacacatggttcaacagagaacttgtagaagcgaatatcaatcaggatttaaacagaatgttaactgtaaaagatatgcttttggaccttagaaacacatggaatacgatcgcaaatcaaaaaacagccgaaaatccaaatcgcgaaacggcagtaggtcttaacattgccggataa

SEQ ID NO: 70086 - protein, 153 aa, Unknown
  Obtained from environmental sample
  DOMAIN (7)...(136): Flagellar protein FliS
  misc_feature (1)..(153): Xaa is any amino acid
MRGIMSYKNASSSYKEAKVKTAGKGQLIIMLYDEAVKQLTKATELLHLNIKEKRDPGRIEQISKAVLKTEEIITELTVSLDFDNGGEIAKNLFSIYTWFNRELVEANINQDLNRMLTVKDMLLDLRNTWNTIANQKTAENPNRETAVGLNIAG

SEQ ID NO: 70087 - DNA, 693 bp, Unknown
  Obtained from environmental sample
  misc_feature (1)..(693): n is a, c, g, or t
atggacggaaaaaatattttatccgacggtattgatatcctttgcaaaagcgatgaggaagtaaaaaacctcatcgctccctgccgcgaaaaaattaccgcgctctttaataattatataaaagaaatagaactttttaattccgcctacggacttgtcggcgtaagcgatacaaatgagcttatcattaaacatatactcgattcactcgcgccgcttggaataattattaaactgattaaaagtattcacgcggaaaacactccgcaaatagcggacgcgggatcaggcgcgggactgccgggcattccgctggcgattgctctgccgcagtgcgattttaccctcattgagcgaatggggcgcagggcgggatttttattcaacacaaaggcggtgttgtctctttccaatatcaatatagaagaaagcgaattggaaaaaacgcaaagcgatcgttttaatcttgtaacttttcgcgcttttaaaccgctggaaccaaaactgcttaaaacactctttaaaatctgcgcgccggggggcgtaatcgccgcttacaagggcaggcgcgaaaaaattgaggcggaaatgtcgcccttagaaaaaaactgcaaaaattgggaaataattccatgtacaacgccttttcttgaagaagaacggcatcttttggttattcaaccgcccgattaa

SEQ ID NO: 70088 - protein, 230 aa, Unknown
  Obtained from environmental sample
  DOMAIN (32)...(224): Glucose inhibited division protein
  misc_feature (1)..(230): Xaa is any amino acid
MDGKNILSDGIDILCKSDEEVKNLIAPCREKITALFNNYIKEIELFNSAYGLVGVSDTNELIIKHILDSLAPLGIIIKLIKSIHAENTPQIADAGSGAGLPGIPLAIALPQCDFTLIERMGRRAGFLFNTKAVLSLSNINIEESELEKTQSDRFNLVTFRAFKPLEPKLLKTLFKICAPGGVIAAYKGRREKIEAEMSPLEKNCKNWEIIPCTTPFLEEERHLLVIQPPD

SEQ ID NO: 70089 - DNA, 1122 bp, Unknown
  Obtained from environmental sample
  misc_feature (1)..(1122): n is a, c, g, or t
ttgctatggctagggcgttacaccgtaatacccgttttggtgttttctctgacagtcgcggtttatgaactccgcatggacgaccaattctggtcaatcatttttaaaaatatccttttcatctttttttcgtccgctattgtcatttttatcggcattgcggttacaatgatttttacgccgggaagaatcccgataggaaccatcgagcagatggaagtattaagtttgaatgccggagacaacttgctggatatattcccgtccaatatgctcagcgtaatctcgacaggcggaatatacctctttccggcgtgtatattcgcgttctttctcggactagggcttgattatgaccgtaactattcaaaacctgttatatcgctcgtggattcgctttcgcgcattttctaccatatcgcttcatttttttccgagattttaggatttgtattaatcgtacttgccgcgttttgggcagtccgctttaacggattattacaggcaaaagtttacaaagatttacttgtccttttgggagtattcagcgttgttttgtgttttggcataatgccgctctttttatacttattaaaaccaaaaacaaacccttggcatattttatacggttttttgggaccggcaatcgcggcgtttttttcgggagacattaattttgcaattccggtgcttatacgccacacaaaagaaaatttcggcataagacgccgttcaagttccatatccctggcgttatttgcaactttctgcagatgcgggagcgccatggtggcggcggcggcgtttattgtcattattaaatcctattcgtatttaagaatcggcacgatcgatttattcactatcggcttatacgcctttttattttcttttattcttgcgcgccaccccggcgacggagcgttcatcgcgttagccgctctttgccttacctacggcggcggagcatacagcgcgggttacctgattttaaagccaatggctttttaccttgcggcaataggcgcttttatcgatgtaatgctcaactctttctgcacctatgttctggcgcggacaaacgggtttattgaggaaaaaaatctggtgcattttatttaa

SEQ ID NO: 70090 - protein, 373 aa, Unknown
  Obtained from environmental sample
  DOMAIN (3)...(360): Sodium:dicarboxylate symporter family
  misc_feature (1)..(373): Xaa is any amino acid
MLWLGRYTVIPVLVFSLTVAVYELRMDDQFWSIIFKNILFIFFSSAIVIFIGIAVTMIFTPGRIPIGTIEQMEVLSLNAGDNLLDIFPSNMLSVISTGGIYLFPACIFAFFLGLGLDYDRNYSKPVISLVDSLSRIFYHIASFFSEILGFVLIVLAAFWAVRFNGLLQAKVYKDLLVLLGVFSVVLCFGIMPLFLYLLKPKTNPWHILYGFLGPAIAAFFSGDINFAIPVLIRHTKENFGIRRRSSSISLALFATFCRCGSAMVAAAAFIVIIKSYSYLRIGTIDLFTIGLYAFLFSFILARHPGDGAFIALAALCLTYGGGAYSAGYLILKPMAFYLAAIGAFIDVMLNSFCTYVLARTNGFIEEKNLVHFI

SEQ ID NO: 70091 - DNA, 519 bp, Unknown
  Obtained from environmental sample
  misc_feature (1)..(519): n is a, c, g, or t
atgatgggtattaacaaacaatatcaatcgtttatattggcaatgacgctttgtacgctctcgttgctattgacgtcatgcaaaatctacaccttcagcggctccacgctgcccggccacatcaagacggtgatgataccggtattcataaataaaacattggaaccgggtatcgacgacgatgttaccacagagctttctaaggaagtgctcaagagccagctgcgtcccgctaacagcgacgccgacgcgacgatcagcggcgccgtgacacgctacgtcaaccgcccgcacacgttcggcgcggggggggcggaggtcagcgtcgagcagtacatcgtacagatatcggcggatgtcgagttcttcgacaataggaaagaggaatccatctataagggcgccgtgtcgggagagggaatttacctttttgagagcgaggacgaggcggttgggcgggagaaagcggtgaagaatttggtggagaagattatgcagaattctgtgcaaatttggtga

SEQ ID NO: 70092 - protein, 172 aa, Unknown
  Obtained from environmental sample
  misc_feature (1)..(172): Xaa is any amino acid
MMGINKQYQSFILAMTLCTLSLLLTSCKIYTFSGSTLPGHIKTVMIPVFINKTLEPGIDDDVTTELSKEVLKSQLRPANSDADATISGAVTRYVNRPHTFGAGGAEVSVEQYIVQISADVEFFDNRKEESIYKGAVSGEGIYLFESEDEAVGREKAVKNLVEKIMQNSVQIW

SEQ ID NO: 70093 - DNA, 2004 bp, Unknown
  Obtained from environmental sample
  misc_feature (1)..(2004): n is a, c, g, or t
ttggtcgccgaggcgggaaccggcacgggaaagtcgctggcgtacttggtcccggccgcaatccacgcgctgaagaataattgccgcgtgatagtgtccacgcatactcgcaacttacaggatcagctcataaccaaagacctcccaagcgtggcggcgctctgcggcggggagttgcgctattctaagttgaaggggcggggcaattacctttgccgcaaccgtttttataagatgctgaagggcgagatcggcagtttctcgcaacgtgaacgcaacgcggcgcttccgcttatcgtctggtcgcagtacacggagagcggagacgttgaggagcagaccttcttcaatcccaagtggttcttcaaggtatggaacttgatctccgccgacagtttggagtgctcaggacgcaggtgcccgtactattccacgtgcttcctgcagaaggcgcgtcaactcgctcagtcttcgcatatcgtcgtgataaaccacgcgctcttttattccgacgtatgctccgaggcctcgtttctgggcgcaaccggttctatcatcttcgacgaggcgcaccacttggagtcaagcgggcaccaacacctgcgcaccgaactggacacgaaccgcgtgacggcgtttatcgacaggttgcaaaacgtgctgcacatcgcgccgaatttcaaggcgttcattaatgtcgatgggtttgagaaagagatgaaggggcatctgaagcatatccgaaaatgctctcaggatatgatgtccgaggttgacaattgggcgtcgtttaaccttccggcggctaaggctgagtaccagatcacggtcaacgaggacacatttaatcagatgctgacgccggcaatcttcgacgtcgcgctgggcagtttgcaggacacattccatgaattcaggcagatactctccgggatacgtgagagagacacggttgacgaactgcgagacgaagtacaagcttgcgcggagcagacttcgcagatgcgcgccgacttacagtatttgacggcggcaaagacggaggagcacgtcttctgggcggagggcaaccatgagaaaaagtgggcgaagctctgcggcgttccgcttgacataagcgaactcttggcgcagatatgggagcgttgcggcggcggaatagtctttacctccgcgacactggcggcgcaggggtcaacggagtacgtatgccgcgccataggcttagatcgcttcgccgaccgcgcggagtccatcatactgccaagcccctacggcgcagaccagacgctcttttgcgcgttcagaaactgtccggagcccgacgcgccggagtttgccgccttcgcggcggaggccgtcgccgcaatccacgcgaaactcggcaagaacgtgctggcgctcttcacatcaaacgcgatgctgaacaacgtctacacgcaactaaaggcgcgtccggaggtagaccgcaacaacattttggcgcagggctactccggcagcagaaacgcgatgctggatcagttcaaggcgcagagcgctatgatacttttaggcacagactcgttctgggagggcgtagacgcgccgggcgaggcctgcgaggcggtggtcattccgcgtctgccgttccccgtcccaacccacccgctcactatggcgcttgggaaacggatggaggagcgttacggcagcgcgttcttctcctactccgttccggaggcggtaataaaattccgtcaagggataggacggctgataaggtcggttaatgataaaggggtgctggtcgtgcttgacaacaggatactcactaagggttacggcaagcagttttccaaggcggtggggagcggggtaaacgaacttagcggggttgacgggatggctgaggctatgcgggaatttttcgggcgggccgccgataatgataacggtattaatgacggtgaagaaaccgcgccggcgtcaacaattacatacgtgccgtttgaggatttatga

SEQ ID NO: 70094 - protein, 667 aa, Unknown
  Obtained from environmental sample
  misc_feature (1)..(667): Xaa is any amino acid
MVAEAGTGTGKSLAYLVPAAIHALKNNCRVIVSTHTRNLQDQLITKDLPSVAALCGGELRYSKLKGRGNYLCRNRFYKMLKGEIGSFSQRERNAALPLIVWSQYTESGDVEEQTFFNPKWFFKVWNLISADSLECSGRRCPYYSTCFLQKARQLAQSSHIVVINHALFYSDVCSEASFLGATGSIIFDEAHHLESSGHQHLRTELDTNRVTAFIDRLQNVLHIAPNFKAFINVDGFEKEMKGHLKHIRKCSQDMMSEVDNWASFNLPAAKAEYQITVNEDTFNQMLTPAIFDVALGSLQDTFHEFRQILSGIRERDTVDELRDEVQACAEQTSQMRADLQYLTAAKTEEHVFWAEGNHEKKWAKLCGVPLDISELLAQIWERCGGGIVFTSATLAAQGSTEYVCRAIGLDRFADRAESIILPSPYGADQTLFCAFRNCPEPDAPEFAAFAAEAVAAIHAKLGKNVLALFTSNAMLNNVYTQLKARPEVDRNNILAQGYSGSRNAMLDQFKAQSAMILLGTDSFWEGVDAPGEACEAVVIPRLPFPVPTHPLTMALGKRMEERYGSAFFSYSVPEAVIKFRQGIGRLIRSVNDKGVLVVLDNRILTKGYGKQFSKAVGSGVNELSGVDGMAEAMREFFGRAADNDNGINDGEETAPASTITYVPFEDL

SEQ ID NO: 70095 - DNA, 306 bp, Unknown
  Obtained from environmental sample
  misc_feature (1)..(306): n is a, c, g, or t
ttgaggcttaacatgaagtaccttattgatactcaccttcttttatgggcggctgcggacaaacttcccaaaaaagctattccttatttttccgacaaagaaaatatattgcttttcagttccgccagtatttgggagataataattaaaaaaggattaaaccgccctgattttacggtagatcccgacgctctgtattggggtcttcttgataatgggtatatggaagtcaccataacaagcccccatgtgcttttagttgccgatttaccttctttacacaaagacccctttgatcgtatttga

SEQ ID NO: 70096 - protein, 101 aa, Unknown
  Obtained from environmental sample
  misc_feature (1)..(101): Xaa is any amino acid
MRLNMKYLIDTHLLLWAAADKLPKKAIPYFSDKENILLFSSASIWEIIIKKGLNRPDFTVDPDALYWGLLDNGYMEVTITSPHVLLVADLPSLHKDPFDRI

SEQ ID NO: 70097 - DNA, 783 bp, Unknown
  Obtained from environmental sample
  misc_feature (1)..(783): n is a, c, g, or t
gtgggcgctggcatcaaaatggcgtattcaacggacggcgcaacatggacagcagttacgcaaaatatctttgtttcaggagacgtcctttcttcaatcgcttatggcaataacaagtttgtcgctgttagcgatgaaaaaatggcgtattcagcggacggtgtaacatggacagcagtaaggcaaaacatcttcggatcatcagacatcatcgaaacaatagcctatggcaacggcaagtttgtcgcaggcggccattacggcaaaatggcgacttcaccggacggcgtaacatggacagccgtaaacagtacattcggaaactataatactatcttttcaatcgcctatggcaataacaagtttgtcgcagttggtaataacggaaaaatggcgacttcatctgacggcacaacatggacagccgtaggaaacagcacattcggcacagtcatcatctgtgcaatcgcttatggtaataataagtttgtagcagttggtgataacggaaaaatggcgacttcaccagacggcacaacatggacagcagtatcgaacagcaccttcggcacaagcttcatcaaatcaatagcgtatggcaacgattattttgttgcagttggcgcgcagggcaaaatggcaatttcaacggacggcgtaacatggacaaccgttatggacaacaccttcggtacaagcaacatctgggcaatcacctatggtaacggcaagtttgtcgcaggcgatgaaaacggtaaaatagcttatttatcggacaattaa

SEQ ID NO: 70098 - protein, 260 aa, Unknown
  Obtained from environmental sample
  misc_feature (1)..(260): Xaa is any amino acid
MGAGIKMAYSTDGATWTAVTQNIFVSGDVLSSIAYGNNKFVAVSDEKMAYSADGVTWTAVRQNIFGSSDIIETIAYGNGKFVAGGHYGKMATSPDGVTWTAVNSTFGNYNTIFSIAYGNNKFVAVGNNGKMATSSDGTTWTAVGNSTFGTVIICAIAYGNNKFVAVGDNGKMATSPDGTTWTAVSNSTFGTSFIKSIAYGNDYFVAVGAQGKMAISTDGVTWTTVMDNTFGTSNIWAITYGNGKFVAGDENGKIAYLSDN

SEQ ID NO: 70099 - DNA, 1455 bp, Unknown
  Obtained from environmental sample
  misc_feature (1)..(1455): n is a, c, g, or t
gtgacatctgtcggaagagacttgttttccggatgtaaaaacctgacgtctgttaccacaggtaacggaatgccttatgtcggaagctctatgttttacaactgtgccaaattgacgtcggtcaccttcggtaccggcgtgaccattatcggaagcgatgcgttttacggctgtaccggcctgacgtcaatcaccattcccaacagcgtgaccattatcggaagcagtgcgttttccggttgcaccggcctgacgtcaatcaccattcctgacagcgtgactactatagaacacgccgcgttttccggctgtaccggtctgacgtcggtcgccattcccaacagcgtgactgacatcaaaggttgggcgtttcgggaaaataaaaacctgacatcaatcgctatcggcagcggcgtaaagtctatagggggcggggtgttttaccgttgtaccaacctgacgtccatagaagtggcgtcggataacgcaaattacagttcggaaaacggcgtattattcaataaagataaaaccgcgctaatacaatatccgcaaaaaaaacaaggcgcgtcatactcaattccacaaagtgtaacttctataggagatggcgcgtttgagtattgccgcggcctgacatcggtaactattcctaatggcgtgacttatatcggggacgatgcgttcttcatttccggcctgacgtcggtaactattcccaacggtgtgacttatatcggggtcgatgcgtttcacggatccgatctaacgtcggtaactattcccaacagcgtggtttctatagggcacagcgcgttttcctccatgtacctgacgtctgtcaccatcggcagcggcgtaacttctataggagacggggcgttttccgatgccgatgtgacgtcaatcgtcattttaagcgccaacccgccgaagacaagccgccacgatccgttcggtggtttggataaaaccgccgtttgcctctacgtacctgagggcagcataagcgcttacggcgaagccgaatactggaaagatttcagttgtatcaaaagcgcgacgacatccgtggctctatatgaccgcgtggttccgcaacccaatccgtccgaagcggcggcgttggcgccggtaaagcctttttcggccgagtttgtcgcgggcccgaatcccgccggtaaatcgtccggcgcggtgagtttcttccgtagcggcgcggtaataaagagcgccgagcttcgcgtctacgacgcatcgggcaattccgtgaagaagattagcatccgcgacaaggcggccgccggcggcaacgtcaagcggtcggtaggctcatgggacttgacggacgccaaagggcgtcaggtatccgagggcgcgtatttggtaaaaggcgcgctgaaaacgtccggcggaaagagcgagaaggtgtcgttgattttgggcgtgcggtga

SEQ ID NO: 70100 - protein, 484 aa, Unknown
  Obtained from environmental sample
  misc_feature (1)..(484): Xaa is any amino acid
MTSVGRDLFSGCKNLTSVTTGNGMPYVGSSMFYNCAKLTSVTFGTGVTIIGSDAFYGCTGLTSITIPNSVTIIGSSAFSGCTGLTSITIPDSVTTIEHAAFSGCTGLTSVAIPNSVTDIKGWAFRENKNLTSIAIGSGVKSIGGGVFYRCTNLTSIEVASDNANYSSENGVLFNKDKTALIQYPQKKQGASYSIPQSVTSIGDGAFEYCRGLTSVTIPNGVTYIGDDAFFISGLTSVTIPNGVTYIGVDAFHGSDLTSVTIPNSVVSIGHSAFSSMYLTSVTIGSGVTSIGDGAFSDADVTSIVILSANPPKTSRHDPFGGLDKTAVCLYVPEGSISAYGEAEYWKDFSCIKSATTSVALYDRVVPQPNPSEAAALAPVKPFSAEFVAGPNPAGKSSGAVSFFRSGAVIKSAELRVYDASGNSVKKISIRDKAAAGGNVKRSVGSWDLTDAKGRQVSEGAYLVKGALKTSGGKSEKVSLILGVR

SEQ ID NO: 70101 - DNA, 1200 bp, Unknown
  Obtained from environmental sample
  misc_feature (1)..(1200): n is a, c, g, or t
atgtatatctaccctaaccggccaatatcaaccgaacctcgattaatttggaaggacgatagtatgcgcggacttgcacggataactgcgttattagcggcggcattatgcgcggtttacgccgatgatccgtcgttcgggactgtcgccgacttgcgagacgggcggacgtatcggacggttaagataggacggcagacttggatggcggagaatctgaattatgagacggatggctcttggtgctatggcgactacgacagcgataataagtattggcgttatggcgataataatcccaactgcgacgaatacggcagactgtacgactgggagacggcgaaaaccgtttgcccgtacgggtggtatttgccgtctcgtcaggattggggtaatttgtggctggcggcgggaggcaggtcgttttttgacggttggagcgtagctagcaagaaattgaaaacgaaaaccgcttgggaaagttatctcggcaaaagcggtaacggcacggatgattacggattttccgccctgcccggcggcggccgctacatagacggcaatttctacaaggccgggttcttcggcaattggtgggacgccacggactacgacaccgccgacgcatacttctggcgtatgtatcacgacgaaaaattcgtgcaagataggactatcggcaagagcagcggtttgtcggtgcgttgcgttcaaggcaccggcggcggcccgaatcgtaaaggcgcgccaggcagcaggatatactattccaatttcggctttgacggcgctattgaagacctgttattcggtctgaagggaggcggaaataataaaaatattgaaccaaaaaatacaaaaagatatgaatgcacgcaaccgatatacaactcatccggactcataggcggcagaagccgcgagagcgttcagcgcgttcttatgcagaatatggccgcgtttcgttacgcttacaataagcgcctccgcgagaaaccgggattgtccggtcgaattaacgtcaaatttgccattgatgaacacggcagcgtgatattcgctcaattactggaatcgacaatgaacgattcggcgttggaagaaaccattgtgcataaggttaagagtttggagtttgaaaaaatcgacaaacccggcgacgtgacggaggttgttttcccctttgttttttcgcaatag

SEQ ID NO: 70102 - protein, 399 aa, Unknown
  Obtained from environmental sample
  misc_feature (1)..(399): Xaa is any amino acid
MYIYPNRPISTEPRLIWKDDSMRGLARITALLAAALCAVYADDPSFGTVADLRDGRTYRTVKIGRQTWMAENLNYETDGSWCYGDYDSDNKYWRYGDNNPNCDEYGRLYDWETAKTVCPYGWYLPSRQDWGNLWLAAGGRSFFDGWSVASKKLKTKTAWESYLGKSGNGTDDYGFSALPGGGRYIDGNFYKAGFFGNWWDATDYDTADAYFWRMYHDEKFVQDRTIGKSSGLSVRCVQGTGGGPNRKGAPGSRIYYSNFGFDGAIEDLLFGLKGGGNNKNIEPKNTKRYECTQPIYNSSGLIGGRSRESVQRVLMQNMAAFRYAYNKRLREKPGLSGRINVKFAIDEHGSVIFAQLLESTMNDSALEETIVHKVKSLEFEKIDKPGDVTEVVFPFVFSQ

SEQ ID NO: 70103 - DNA, 798 bp, Unknown
  Obtained from environmental sample
  misc_feature (1)..(798): n is a, c, g, or t
gtgaaaatcctcaatccgctgaatcccgatatggcggagatgcgcacctctatggcgctgtcccttttggacacggcggcttacaacctgaataggaagaacggtaataaccgcctattcgaaatcggcaaggtattcgagccggacgaaaaatcaggactggcgacagaaagggatattttagctatagccatagagggcgactacgtccagcagtcttggggcaatcagaaacttgagaataacttcttcgtccttaaaggcatcatagaagcctttgccgcgcattgcggcctggggacggcgaaattcgagcgccttgtaacaacctgcccgctctacgggccggagtccgccaaaataacgtttaagaacggcataagcggaacgatgggacgcgtctcggacaagattcgtaaagcgttcggcataaagacccccgtcttctacgccggctttgacgtgacggagtggctatcgaccccaaagccgctgcccaaatacaacccgctgcccaagttcccgccgcttgaacgcgatttcagtttcgtgatgccggaagccctctcaagcgacacggtcaaaaacgaaatcaaatccgtatcgccgttaataaaaaccgtccgcccgttcgacctctaccgcggcgaaaagctaagcgccggaacgaagagcatgaccttctccgtggagttcagatcgcctgagaaaacgctgaccgacgaggacgtggcggagacctgcgcaaaaatcgtatcggttatggagaagaagcacggggcggcgcttaggaagtaa

SEQ ID NO: 70104 - protein, 265 aa, Unknown
  Obtained from environmental sample
  DOMAIN (172)...(264): Ferredoxin-fold anticodon binding domain
  misc_feature (1)..(265): Xaa is any amino acid
MKILNPLNPDMAEMRTSMALSLLDTAAYNLNRKNGNNRLFEIGKVFEPDEKSGLATERDILAIAIEGDYVQQSWGNQKLENNFFVLKGIIEAFAAHCGLGTAKFERLVTTCPLYGPESAKITFKNGISGTMGRVSDKIRKAFGIKTPVFYAGFDVTEWLSTPKPLPKYNPLPKFPPLERDFSFVMPEALSSDTVKNEIKSVSPLIKTVRPFDLYRGEKLSAGTKSMTFSVEFRSPEKTLTDEDVAETCAKIVSVMEKKHGAALRK

SEQ ID NO: 70105 - DNA, 1641 bp, Unknown
  Obtained from environmental sample
  misc_feature (1)..(1641): n is a, c, g, or t
atgaaaatcgtttacagttggttgaaagactttgtcgacattgccgcccctgtaacccaggttgccgacacgttggcgagcgccggtatagaggtggcttccgtgacggagatttccgtgccgcgcggcgtcaaggtggcccgcgtcgtctcgcgcctcccccaccccaacgccgacaagctgtcgctctgccgggtggactccggcgagggcgaaccgctacaaatcgtctgcggcgcccccaacgtcgccgagggcatgaccgtggcgctggccaccatcggcaccgtactccccggcgacttcaaaatcggcaaatctaagatacgcggcttggagtccttcgggatgctctgttcgggcaaggagcttgggctatcggacgaccactccggaatcattgcgctgccggacgactacaccgtaggcgcgccgcttgccgagtacatcccctacgacgccgttattgagatagagattaccccgaaccgcggcgactgccttagcgtcgtgggcgtggcgcgggaggtgagcgcccgcttcggcctgccgttcagaaagccggctaagcagccgcaggcgcgtgacgacgaccccgtatcggcggcgatatccgttgaggtggaggctccggagcgttgcccgcgctatatgggacgattggtgcggaacgtgaccatagggccgtcgccggagtggatgaaaaggcgcctgacgctcgccggcctgcgccccatcaacaacgtggttgacatcaccaactacatattggttaagtacggccagccgatgcacgctttcgactacgacgcaattgagggcaagaaaataacagtgaaaaccgccggcgcaatgggcgtctcgtctttcaccactctagacaacgtggagcgaaagcttaccggcgacgatctgctgatctgcgacggaaaacgcgccgtagccctagccggcgtgatgggcggcgccgggtcggaaatcaaagaacacacaaagaacgtctttctggagtgcgccttctttgaacccggcggcatccgcaaaacttcaaagcgcctcgggctctccaccgactcctcctaccgctttgaacgcggcgtagatccggcgcagggtctggcggacgctttggaaagggcggcggacctaatgttggaactcgccggcggaagcatggccaacggagttatcgacaccaacccgaatccattcccagacaaggtgataaccgtacgcccgtcgcgaaccaagaggatattgggcgccgagtttccggctgacaacatggtcttctccctaaacgcccttggaatcaaaagcgtaaaaaactccgaggaactggtgacctgcaccgtgccgcactaccgccacgacatcaccgaggagatcgacctgattgaggaggtgggccgccagtacgggtacgacaacatacccacggccgaaagcgccgccgtgaacttagtcaggcagccgtcaacagcggaaacaaaccgcgacaccgcccgcttcgcactgtgctatttcgggcttaatgagatcatgaccaacagcatggtgtcggaatcaaagcggaaactgctgacccccctatcaacgcccgtcgcggaaaatcaacataagcgcccacggaaccggtga

SEQ ID NO: 70106 - protein, 546 aa, Unknown
  Obtained from environmental sample
  DOMAIN (406)...(475): tRNA synthetase B5 domain
  misc_feature (1)..(546): Xaa is any amino acid
MKIVYSWLKDFVDIAAPVTQVADTLASAGIEVASVTEISVPRGVKVARVVSRLPHPNADKLSLCRVDSGEGEPLQIVCGAPNVAEGMTVALATIGTVLPGDFKIGKSKIRGLESFGMLCSGKELGLSDDHSGIIALPDDYTVGAPLAEYIPYDAVIEIEITPNRGDCLSVVGVAREVSARFGLPFRKPAKQPQARDDDPVSAAISVEVEAPERCPRYMGRLVRNVTIGPSPEWMKRRLTLAGLRPINNVVDITNYILVKYGQPMHAFDYDAIEGKKITVKTAGAMGVSSFTTLDNVERKLTGDDLLICDGKRAVALAGVMGGAGSEIKEHTKNVFLECAFFEPGGIRKTSKRLGLSTDSSYRFERGVDPAQGLADALERAADLMLELAGGSMANGVIDTNPNPFPDKVITVRPSRTKRILGAEFPADNMVFSLNALGIKSVKNSEELVTCTVPHYRHDITEEIDLIEEVGRQYGYDNIPTAESAAVNLVRQPSTAETNRDTARFALCYFGLNEIMTNSMVSESKRKLLTPLSTPVAENQHKRPRNR

SEQ ID NO: 70107 - DNA, 525 bp, Unknown
  Obtained from environmental sample
  misc_feature (1)..(525): n is a, c, g, or t
gtgttgcggacgcacacgtcgcccgtgcagatccgcgtcatggaggcgcggaagccgcctataaggatcatagcccccggccgcgtctaccgtaacgaggcgatcagcgcgcgcagttactgtatgttccaccaagtcgaaggactctacgtagacgaaaacgtgagcttcgccgacctaaagggtacgctactagccttctcacggcgcttcttcgacgaaaacacaaagataaagatccgccccagtttcttccccttcacggaacccagcgtcgaggtagacgtggagtgcttcttgtgcaaagggaaagggtgcaacatctgcaagcatagcggatggctggagatacttggggccgggatggtccaccccaacgtattcaaggcctgcaagatcgacccggaacagtatacaggtttcgccttcgggatgggcatagagaggatcgcgctgctcaaatacgggattgacgatattcggctgctttatgagaatgatgttaggtttttaaagcagttttaa

SEQ ID NO: 70108 - protein, 174 aa, Unknown
  Obtained from environmental sample
  DOMAIN (1)...(174): tRNA synthetases class II core domain (F)
  misc_feature (1)..(174): Xaa is any amino acid
MLRTHTSPVQIRVMEARKPPIRIIAPGRVYRNEAISARSYCMFHQVEGLYVDENVSFADLKGTLLAFSRRFFDENTKIKIRPSFFPFTEPSVEVDVECFLCKGKGCNICKHSGWLEILGAGMVHPNVFKACKIDPEQYTGFAFGMGIERIALLKYGIDDIRLLYENDVRFLKQF

SEQ ID NO: 70109 - DNA, 2280 bp, Unknown
  Obtained from environmental sample
  misc_feature (1)..(2280): n is a, c, g, or t
ttgagtatgacggtaaccatacccatcggcggcatgcactgcgccgcgtgttccgccagggtcgaaaaggccatcggcaagctgacgggcgtttcgagcgcctccgtgaacatcgccacggaaaaggcgaccgtcgcgtttgatccggccgccatacgcctttccgctataaaagaggccatcgtcggcgtcggcttcaccccgctagacgcctccaaggagaccgccggcgcggacaaaatccgtcgtgaacgtgaaatcaaagtcttgcgggcaaagttcgtagtggccgcgctcttcgggctgccgctgctctatatcgccatgtcccccatgataccgtggttcacgctgcccctgccgcggacgctctccatgatgcgctaccctttgatctacgggcttgcgcaattgttattggtaatacccatagttacagtaggatacaggttttacaccgtaggcttcaaaaacttggcggcgcgtagcccgaacatggattcgctaatcgccatcgggacgtcggcggcgatattttacagcgtatacaacctcttccgcgtagccacgggcgactttaaggcggcggaatctttctactttgagaccgccggcgtgattatcgcgttgatccttttgggaaagacccttgaggcgacatccaagggccgcacgggcgaggctataaagaagctcatgggactggctccgaagacggcaatcgtcatcgacggcggacaggagaaggagatccccgtagacgacgtgatgccgggcgacgtcgtcgtggtgaagccgggcgcgaaaattccggttgacgggacggtgatcgaggggcagagcgccgtggacgagtccatgctgaccggcgagagcctgcctatcgacaaaaaaaccggcgacgccgtttacggcgccacgataaacgcanacggcctgctccgtttcaaggcggagaaggtcggcgccgagacggcgcttgcgcaaatcatcaagctcgtggaggacgctcagggctccaaagcccctatagccaaaatggcggacatcgtctccggctactttgtgcccatcgtgtgccttatagccgccgccgccgccatcgcttggtttgccgccgtccacgcgggtatcgccgtccctccggcgggcaagtccgctctcgagttttcgcttatggtctttatctccgttttggtcatagcctgcccgtgcgccctcggtcttgccacgcccaccgccataatggtgggaacgggcaagggcgcggaaaacggcatcttgataaagggaggcgaggcgctggagacggcccacaagattcagactatcgtgtttgacaaaacgggaaccataaccgagggtaagccgaccgtcaccgatgtggtggtcgcccccgacgtgtatgagggatatttattgaagacgacggcctccgccgagcgtgggagcgaacacccgctgggccgcgccatcgtgaatggggcgcgggagcgcggacatcagctattaaacgcggagaatttctccgccataaccggtatgggcatagaggcctcggtcggcggcaccgtcgttttggccggaaaccgcagactgatggacgagcggggcgtcgctctagccgaacttgaggccgcagccgataagcttatggccgagggaaagacgccgatgtacgtggccttcgacgggaaagcggccggtatcgtggcggtggccgacgtactgaaaaagaacagcaagacgacaatcgaacggcttcacaaaatgggaatcgaagtcgcgatgataaccggcgacaacaagaagacggcggaggccatagccaaacagacggggattgaccgcgtgctttccgaggtgttaccgggggacaaagccgccgaagtaaagaagctgcaggcgggcggccgcaaagtggcgatggtaggcgacggcataaacgacgcgccggcgctggcgcaagcagacatcggcatagccataggaagcggcaccgacgtggcgatggagtcggcggacatcatcctgatgcggagcgacctgatagacgtcccgaccgcgataaccttgagcaagcgaacgataaacaatatcaaacaaaacttgttctgggccttcggttacaacgtgctgggcatcccaatagcggcgggagcactgcacctattcggcggcccgttgctaaatccggtcttcgccgcggcggcaatgagcttgagttcggtatcggtattgactaatgctctgcggctgaaaggattcaaagcggattag

SEQ ID NO: 70110 - protein, 759 aa, Unknown
  Obtained from environmental sample
  DOMAIN (6)...(70): Heavy-metal-associated domain
  misc_feature (1)..(759): Xaa is any amino acid
MSMTVTIPIGGMHCAACSARVEKAIGKLTGVSSASVNIATEKATVAFDPAAIRLSAIKEAIVGVGFTPLDASKETAGADKIRREREIKVLRAKFVVAALFGLPLLYIAMSPMIPWFTLPLPRTLSMMRYPLIYGLAQLLLVIPIVTVGYRFYTVGFKNLAARSPNMDSLIAIGTSAAIFYSVYNLFRVATGDFKAAESFYFETAGVIIALILLGKTLEATSKGRTGEAIKKLMGLAPKTAIVIDGGQEKEIPVDDVMPGDVVVVKPGAKIPVDGTVIEGQSAVDESMLTGESLPIDKKTGDAVYGATINAXGLLRFKAEKVGAETALAQIIKLVEDAQGSKAPIAKMADIVSGYFVPIVCLIAAAAAIAWFAAVHAGIAVPPAGKSALEFSLMVFISVLVIACPCALGLATPTAIMVGTGKGAENGILIKGGEALETAHKIQTIVFDKTGTITEGKPTVTDVVVAPDVYEGYLLKTTASAERGSEHPLGRAIVNGARERGHQLLNAENFSAITGMGIEASVGGTVVLAGNRRLMDERGVALAELEAAADKLMAEGKTPMYVAFDGKAAGIVAVADVLKKNSKTTIERLHKMGIEVAMITGDNKKTAEAIAKQTGIDRVLSEVLPGDKAAEVKKLQAGGRKVAMVGDGINDAPALAQADIGIAIGSGTDVAMESADIILMRSDLIDVPTAITLSKRTINNIKQNLFWAFGYNVLGIPIAAGALHLFGGPLLNPVFAAAAMSLSSVSVLTNALRLKGFKAD

SEQ ID NO: 70111 - DNA, 813 bp, Unknown
  Obtained from environmental sample
  misc_feature (1)..(813): n is a, c, g, or t
gtgggccgtctccagcgcctcgcctccctttatcaagatgccgttttccgcgcccttgcccgttcccaccattatggcggtgggcgtggcaagaccgagggcgcacgggcaggctatgaccaaaacggagataaagaccataagcgaaaactcgagagcggacttgcccgccggagggacggcgatacccgcgtggacggcggcaaaccaagcgatggcggcggcggcggctataaggcacacgatgggcacaaagtagccggagacgatgtccgccattttggctataggggctttggagccctgagcgtcctccacgagcttgatgatttgcgcaagcgccgtctcggcgccgaccttctccgccttgaaacggagcaggccgtntgcgtttatcgtggcgccgtaaacggcgtcgccggtttttttgtcgataggcaggctctcgccggtcagcatggactcgtccacggcgctctgcccctcgatcaccgtcccgtcaaccggaattttcgcgcccggcttcaccacgacgacgtcgcccggcatcacgtcgtctacggggatctccttctcctgtccgccgtcgatgacgattgccgtcttcggagccagtcccatgagcttctttatagcctcgcccgtgcggcccttggatgtcgcctcaagggtctttcccaaaaggatcaacgcgataatcacgccggcggtctcaaagtagaaagattccgccgccttaaagtcgcccgtggctacgcggaagaggttgtatacgctgtaaaatatcgccgccgacgtcccgatggcgattag

SEQ ID NO: 70112 - protein, 270 aa, Unknown
  Obtained from environmental sample
  misc_feature (1)..(270): Xaa is any amino acid
MGRLQRLASLYQDAVFRALARSHHYGGGRGKTEGARAGYDQNGDKDHKRKLESGLARRRDGDTRVDGGKPSDGGGGGYKAHDGHKVAGDDVRHFGYRGFGALSVLHELDDLRKRRLGADLLRLETEQAVCVYRGAVNGVAGFFVDRQALAGQHGLVHGALPLDHRPVNRNFRARLHHDDVARHHVVYGDLLLLSAVDDDCRLRSQSHELLYSLARAALGCRLKGLSQKDQRDNHAGGLKVERFRRLKVARGYAEEVVYAVKYRRRRPDGD

SEQ ID NO: 70113 - DNA, 1092 bp, Unknown
  Obtained from environmental sample
  misc_feature (1)..(1092): n is a, c, g, or t
atgcgcaaactaatcgataaattagaggcctctcaaaccctctctcgaaacgaattcaagaaattgctgttttgcggcaacgactatctattcgaacgcgcaaggcgcgtcgccgacgacgtgtacgggaaaaatatctttatgcgcggtttggtcgagtttacaaactactgcaaaaacgactgcctctactgcggactgcgggccggcaacaaaaaaattacgcggtacagactttcaaagcgggagatgcttgactgttgcgaaaaaggccacgccttaggctttcgcacctttgtattgcagggcggggaggacccatattatacggatgatattttgacggatatcgtccgtgagataaggaccgcgtacaaggactgcgccataacaatatcgataggcgagcgcagtatcgagagttacaaacgcctgcgcgacgccggcgcggacaggtacctgttgcgccacgaaacggcgaatgatagccactaccgctccatgcaccccaaatatatgtcgcccgtcgcccgtaaacagtgtctatacgacctgaaaaagttaggctatcaggtagggtgcggcttcatggtgggctcgcccggccagacgcccgaccacattgtcgatgatctgatgttcataaaagagctgcagccgcacatggtaggcataggccccttcgtcccgcactccgacacgcctttcggcggttcgtgggagggcgatctgcgcctaacgctgaacattctatccatattgcgccttatgcagcccaatctgcttattcccgcgacgaccgctatggggacggtagacgcccaaggacgggaacgcggaattctcgccggcgccaacgtggtcatgccgaacttgtcgcccgtggaggtacgcgacaagtacatgctgtacgacaacaaaatctgcaccggcgaagaggccgcggagtgcgtcgcttgtttgcgttcgcgaatcgaaagcatcgggtacgaacttgtggtgtcgcgcggagattttaaagattgggcagcgcccgatccttgtccgacaatatcggttccgacccgccaagcggccagtcaacccgtataa

SEQ ID NO: 70114 - protein, 363 aa, Unknown
  Obtained from environmental sample
  DOMAIN (52)...(215): Radical SAM superfamily
  misc_feature (1)..(363): Xaa is any amino acid
MRKLIDKLEASQTLSRNEFKKLLFCGNDYLFERARRVADDVYGKNIFMRGLVEFTNYCKNDCLYCGLRAGNKKITRYRLSKREMLDCCEKGHALGFRTFVLQGGEDPYYTDDILTDIVREIRTAYKDCAITISIGERSIESYKRLRDAGADRYLLRHETANDSHYRSMHPKYMSPVARKQCLYDLKKLGYQVGCGFMVGSPGQTPDHIVDDLMFIKELQPHMVGIGPFVPHSDTPFGGSWEGDLRLTLNILSILRLMQPNLLIPATTAMGTVDAQGRERGILAGANVVMPNLSPVEVRDKYMLYDNKICTGEEAAECVACLRSRIESIGYELVVSRGDFKDWAAPDPCPTISVPTRQAASQPV

SEQ ID NO: 70115 - DNA, 531 bp, Unknown
  Obtained from environmental sample
  misc_feature (1)..(531): n is a, c, g, or t
atggaattcataaaaaccgcgctttccggattaacgctaatcaaacccaaggtccactccgatcatcgcggtttcttcttagagacctactcgtctcctatcttcaaggccgccggtatagacagcgtcttcgtacaagataatcactcccgctccctagagcgaaacgtaattcgcggcttgcactttcagaaaccgcccttcgagcagagcaagctggtgcgcgtaatccgcgggtcgattttcgatgtcgcggttgacattcgccgcgaatcggctacctacgggcagtggctcgggttcgaactcagcgaacgcaacttcgatatgctctttgtccctcgcggcttcgcgcacggattctgtacgcttgaggaggggacggaggtcgtttacaaggtggacaacatttactcgcgtgagcacgacgccggtatagtctggaacgatccggttatacgggttgactggccgcttggcgggtcggaaccgatattgtcggacaaggatcgggcgctgcccaatctttaa

SEQ ID NO: 70116 - protein, 176 aa, Unknown
  Obtained from environmental sample
  DOMAIN (3)...(172): dTDP-4-dehydrorhamnose 3,5-epimerase
  misc_feature (1)..(176): Xaa is any amino acid
MEFIKTALSGLTLIKPKVHSDHRGFFLETYSSPIFKAAGIDSVFVQDNHSRSLERNVIRGLHFQKPPFEQSKLVRVIRGSIFDVAVDIRRESATYGQWLGFELSERNFDMLFVPRGFAHGFCTLEEGTEVVYKVDNIYSREHDAGIVWNDPVIRVDWPLGGSEPILSDKDRALPNL

SEQ ID NO: 70117 - DNA, 1536 bp, Unknown
  Obtained from environmental sample
  misc_feature (1)..(1536): n is a, c, g, or t
atgttgataagagcggatatgatctacgaattggtgtccggcgccagatttcagtactttctatcccgtccgcggcgtttcggtaagtcgctcacctgctggacgctggacgcgctgttcagcggtaagcgggaactctttgaggggctggctatctccaagaccgattgggcgtgggagagctatccggtcatccacctagacatgagcaaagtaatcaccgacaccggggttgacggcgtcaggagatctttggcaaagcagacggaatatattgcccgcgaacacggaatagatcttggcggagagacaataccgggattgatgttggggatggcgctcgtcgaaatctctcaaaaatacggcaaaccggcggtggtaatcgtagacgaatatgacaagccgtttctagacttctacaacaagcctccgatggcgcaggaaatccgcgatattatgaggaattattacacgcagttcaaagctaacgaaccgcagatacggtttttgtttatgacggggatttccaaatttacaaaggccggcgtcttttcgacgctaaacaatctgaacgatatttcgctcgatagaaaattcggtacgctgctaggatataccgaaaaagagcttgctgagaattttgacgaacacattgaggcgggggcgaaagatttaaatatatcaacagatgaactggtgaataagctaagagcctactataacggattctgttttgacggtataaataaagtccactgcccgttttcggtgcttaatttcttcagcgactacaatatttcgaattattggatggaaagcgcaaaccccaagataatcgccgattacatgaaagaccgcaacctgacagtcgagcaattcattggtatgcaggtatccagtgattttgttaggaaccccggcgagatagagacagcgtcgccggagagttttctctatcaagccggttacttgacgcttcgtgaaggtgtcaccgatgatttttcgctcgactatcccaatgccgaagtactcgagtctatgtcacggttggtaactatgaacattattcagagcgttgacggcaattactttgttgatttccgtaccccgcttttggacgcattggcggatggaaaaagcgacctcttcattgaaacgataaaccgcctattggcaagtatcccttacgacgactacgccaaggcggcacaagcgactataaggcgctcgggtgttcccgcacgggagtggctctatcgttcggcgattctgtcgttcctgcacggttgcggagtaatcgcgctctgcgaaccgcacacgagtaaagggcgctccgatctgctattgtgccataggggcgcaacatgggtagtcgagataaaagtcgcctacaacgacgactgcgccgcgatggcggccgaggccttgaaacagataaacgacaaccaatacgccgatccgtacaaaaacgctaagaagctgggaattgctattgacgataaggcgagacgggtcggggagtgggttgaggggtaa

SEQ ID NO: 70118 - protein, 511 aa, Unknown
  Obtained from environmental sample
  DOMAIN (1)...(508): Protein of unknown function (DUF1703)
  misc_feature (1)..(511): Xaa is any amino acid
MLIRADMIYELVSGARFQYFLSRPRRFGKSLTCWTLDALFSGKRELFEGLAISKTDWAWESYPVIHLDMSKVITDTGVDGVRRSLAKQTEYIAREHGIDLGGETIPGLMLGMALVEISQKYGKPAVVIVDEYDKPFLDFYNKPPMAQEIRDIMRNYYTQFKANEPQIRFLFMTGISKFTKAGVFSTLNNLNDISLDRKFGTLLGYTEKELAENFDEHIEAGAKDLNISTDELVNKLRAYYNGFCFDGINKVHCPFSVLNFFSDYNISNYWMESANPKIIADYMKDRNLTVEQFIGMQVSSDFVRNPGEIETASPESFLYQAGYLTLREGVTDDFSLDYPNAEVLESMSRLVTMNIIQSVDGNYFVDFRTPLLDALADGKSDLFIETINRLLASIPYDDYAKAAQATIRRSGVPAREWLYRSAILSFLHGCGVIALCEPHTSKGRSDLLLCHRGATWVVEIKVAYNDDCAAMAAEALKQINDNQYADPYKNAKKLGIAIDDKARRVGEWVEG

SEQ ID NO: 70119 - DNA, 906 bp, Unknown
  Obtained from environmental sample
  misc_feature (1)..(906): n is a, c, g, or t
atgtataaattccgaaaacttatcccgcggcctatacgacacgccctattgggttggttcgcgaaagccggttttgtcgtcggacggaacctcccgcgccacatcggactgccgctcttttcgttcttggggacgctatgctactacacgttgcgcactgaccggcggttgaccgtagacaatctgaggtttgtcttcggaaacgagtgggacgagaagaaaattcgcgccgtagcccgagcggtgttccggtcgctggggaaaaatctctttgactcggttcacttgggcgctataaaagccgaggtcttagacaggatagtctcccacgacaccctatacgatgtggcccaagccggcggacgcggcaagggcatagtgattatcaccgcgcacctcggttgcttcgagttactgctgcactttttcgcccgctgcggcttcaactgcttcgccgtaggacgggccttcaaaaaccgtgacctgaacgaggccgtacgaaaggtaaggagcggaccggacatagagtacattgacagatcggaaagtaaccgcaagataattcaaatgatgcgccaaggaaaggttatgggcgtgttaatagaccaagacacaaaagtggagggcgtattcgccgacttcctgggacaccgtgccttcacgccaagtagcgcggtacgcttcgcgacgaagctgggaatcccgatattcatatcggtcacggcaagattacccggcgacaaacactacgtttatgtcagcgaagaattagtacccgtagacacgggcgaccccaaagcggatttagtaactaacatacagaagatcaacgacattctcggcgaatacatccgcaaacacccggaacaatgggtctggatgcacgagcggtggaagactcagtga

SEQ ID NO: 70120 - protein, 301 aa, Unknown
  Obtained from environmental sample
  DOMAIN (6)...(300): Bacterial lipid A biosynthesis acyltransferase
  misc_feature (1)..(301): Xaa is any amino acid
MYKFRKLIPRPIRHALLGWFAKAGFVVGRNLPRHIGLPLFSFLGTLCYYTLRTDRRLTVDNLRFVFGNEWDEKKIRAVARAVFRSLGKNLFDSVHLGAIKAEVLDRIVSHDTLYDVAQAGGRGKGIVIITAHLGCFELLLHFFARCGFNCFAVGRAFKNRDLNEAVRKVRSGPDIEYIDRSESNRKIIQMMRQGKVMGVLIDQDTKVEGVFADFLGHRAFTPSSAVRFATKLGIPIFISVTARLPGDKHYVYVSEELVPVDTGDPKADLVTNIQKINDILGEYIRKHPEQWVWMHERWKTQ

SEQ ID NO: 70121 - DNA, 1899 bp, Unknown
  Obtained from environmental sample
  misc_feature (1)..(1899): n is a, c, g, or t
gtgtggctctgcgattgcgggcacaaagagtgcgtgggcgggttggacgagctgcatacgcttgcgggcggcggcgacaagtcggcgggggaatccatacacgcgcaaacggcgcggcgggtgcaagagagcctgaaagcgaaagacgcggcgcaacggctctccgacgcgggtattgactctgtatggatagaaaggcttgcaaacgtaaatatcagccccgtggacatacatcgccacatcatagacaattttgaggtgaagtgtcccaaatgcggcgcgcttatgaagcgcactgccgaagtgctcgactgctggttcgagtcggggtctatgccctacgcgcaacagcattatccgtttgacaataaggaaatctttgagaaaaatttccctgcggacttcatcgcggaggggctggaccaaacacgcggatggttctatacgctgacggttctctcaggagcgctcttcgggaaaccggcctttaagaacgttatcgtcaacggcatcatcctcgccgaagacgggaagaagctctctaagcgcctgcgtaactacgccccgcccgaagatatactgaataaactgggcgccgacgcgttgcgtttgtttctgataaattcaccggcggtcaaggctgaagacctgcgtttctcggagaagggcgtgacggaaatgtcccgcgccgtgttgctgcccttttggaacgcctacgcatttttcgtcacctacgccaatgtggacgggtggaagccctccggcctaaatccgccaaagggcgggactgagcttgaccggtggatagtgtcgcttcttagcgacgtaattttgtccgtcaacaaagaaatggagctttacaatctctacaaagtcgtaccgcacttggttgactttatcgacaatttaacaaactggtacatccgccgcagccgccgccgcttctggcgcagcgaaaacgacagcgacaaaaataccgcctacgggactctctactacgtcctcgtccagttctccaaggtgatggccccgttcttgccgtttgtcaccgagaccatctatcggaatttagtccacggcaaattggcgaacgaaccgcccagcgtacacttaaccgcctacccgacggtcgaaagcgacgccattgatgaaccgcttgaacttaagatgcaacttgtgcgccaagccgtcgctatgggccgcgcccttcgcagccgcttcaccataaagacgcgtcaaccgcttagcgagttcaccgtcgtcctctccgaccgcaaaaagattgacttaatcagagacatggaagaacttgtcaaagaggaattaaacgtcaaaaaggtggtctttgacaatgacgaagaacgtgttgtaagcatatcggccaagccgaatttcaagaaattgggcaaagtctttgggcaaaaaatgaaggatgccggcgcgttgatagagcggtttagcgccgctgatataaagagactcgagggtggggccgcaattgacgtgatgggaacggctctggcttacggcgacatagaggtccgccgcgtcaagcgcgaagggttggaagtggaaacggagggcgaacttacggtggcgcttgaggtcacaatcacgccggagctaaaacgtgagtgcgtggcgcgcgagtttgtcaaccgcgtacagaatagacgcaaggagataggcctaagcgtcgccgaccgaatcgtcatacgctactcgtccccaaaagagatagaggacgcgcttgccgatttccgcgattacgtatgcgccgagacgctggccgtcaatatagagagcgttccctcagcaaaaatcgacaacgccgagagcgttgaggtcgaggggatgggtgttacgatcggcgttgaaaaaacggaaatcggcggctga

SEQ ID NO: 70122 - protein, 632 aa, Unknown
  Obtained from environmental sample
  DOMAIN (2)...(218): tRNA synthetases class I (I, L, M and V)
  misc_feature (1)..(632): Xaa is any amino acid
MWLCDCGHKECVGGLDELHTLAGGGDKSAGESIHAQTARRVQESLKAKDAAQRLSDAGIDSVWIERLANVNISPVDIHRHIIDNFEVKCPKCGALMKRTAEVLDCWFESGSMPYAQQHYPFDNKEIFEKNFPADFIAEGLDQTRGWFYTLTVLSGALFGKPAFKNVIVNGIILAEDGKKLSKRLRNYAPPEDILNKLGADALRLFLINSPAVKAEDLRFSEKGVTEMSRAVLLPFWNAYAFFVTYANVDGWKPSGLNPPKGGTELDRWIVSLLSDVILSVNKEMELYNLYKVVPHLVDFIDNLTNWYIRRSRRRFWRSENDSDKNTAYGTLYYVLVQFSKVMAPFLPFVTETIYRNLVHGKLANEPPSVHLTAYPTVESDAIDEPLELKMQLVRQAVAMGRALRSRFTIKTRQPLSEFTVVLSDRKKIDLIRDMEELVKEELNVKKVVFDNDEERVVSISAKPNFKKLGKVFGQKMKDAGALIERFSAADIKRLEGGAAIDVMGTALAYGDIEVRRVKREGLEVETEGELTVALEVTITPELKRECVAREFVNRVQNRRKEIGLSVADRIVIRYSSPKEIEDALADFRDYVCAETLAVNIESVPSAKIDNAESVEVEGMGVTIGVEKTEIGG

SEQ ID NO: 70123 - DNA, 1386 bp, Unknown
  Obtained from environmental sample
  misc_feature (1)..(1386): n is a, c, g, or t
atgcgcgggcgctacgtagaccgccgcttcggatgggactgccacgggctgcccgttgataacgagatggagaaagagtttaaagtctccggcaaattcggcaagcgcgacatagagaaactcggcatccacctcttcaacgaggcctgccggtctatagtgctgcgctatacgagccaatgggaaaaagtcgtcaaccggatggggcggtgggtggactttgtcaaccagtaccgaactatggatccgccgtacatggagagcatctggtgggtatttaagcagatgtgggacaaagggcttatttataggggattcagggtgcagccctactgcccccggtgcgccacgccgctttcaaattttgaggtcaacgagggatataaagagatcagcgggccgtctatcaccgtaacgtttcctatagttaaaggcggtgtcaataacgctattgccgacgagtttgttaatgataacgtcaagatattggtgtggacgaccacgccgtggacgctgccgtccaacgtggcgcttgccgtgggagaaaagatagcgtatgtcaagataagagacggcgaaaacgtttacataatggcaaaggagcggctcggcgcctactacaaagacctgtcaaagatagagattctcaaggagatgacgggcggcgaccttgtcgggctgcgctacgccccgatattcgattacttcaaggacagagacccgcgcttctttaccgtcaccgccgcagattttgtgtctacggaggacggcacaggcattgtccacatcgcccccgcgtttggcgaggacgactttattgtcgggcaaaagatggaactgcccatagtctgcccggttgacgacgagggaaaattcaccgacgaggttccgcaatggcagggtcaaatcgtctacaccgccgacgatgagatcacgcggcaaataaaaatgtccggcaggctgttccacaagacgaccgtcttgcaccgctacccgcactgctaccgctgcgacagcgcgctcatctacaaggcgataacgacttggttcatgaaaatagagccgctcaaggcgaatatgcttgagaataatcagcagatccgctgggttccgccgcaccctcaaaacgggcgcttcggcaagggcatagagagcgcgcctgactggaacatatcgcgtaacaggtactggggaaacgcccatccccgtgtggctctgcgattgcgggcacaaagagtgcgtgggcgggttggacgagctgcatacgcttgcgggcggcggcgacaagtcggcgggggaatccatacacgcgcaaacggcgcggcgggtgcaagagagcctgaaagcgaaagacgcggcgcaacggctctccgacgcgggtattga

SEQ ID NO: 70124 - protein, 461 aa, Unknown
  Obtained from environmental sample
  DOMAIN (1)...(458): tRNA synthetases class I (I, L, M and V)
  misc_feature (1)..(461): Xaa is any amino acid
MRGRYVDRRFGWDCHGLPVDNEMEKEFKVSGKFGKRDIEKLGIHLFNEACRSIVLRYTSQWEKVVNRMGRWVDFVNQYRTMDPPYMESIWWVFKQMWDKGLIYRGFRVQPYCPRCATPLSNFEVNEGYKEISGPSITVTFPIVKGGVNNAIADEFVNDNVKILVWTTTPWTLPSNVALAVGEKIAYVKIRDGENVYIMAKERLGAYYKDLSKIEILKEMTGGDLVGLRYAPIFDYFKDRDPRFFTVTAADFVSTEDGTGIVHIAPAFGEDDFIVGQKMELPIVCPVDDEGKFTDEVPQWQGQIVYTADDEITRQIKMSGRLFHKTTVLHRYPHCYRCDSALIYKAITTWFMKIEPLKANMLENNQQIRWVPPHPQNGRFGKGIESAPDWNISRNRYWGNAHPRVALRLRAQRVRGRVGRAAYACGRRRQVGGGIHTRANGAAGAREPESERRGATALRRGY

SEQ ID NO: 70125 - DNA, 1080 bp, Unknown
  Obtained from environmental sample
  misc_feature (1)..(1080): n is a, c, g, or t
gtgcagatgaaaacatttaacccgcaaaagaccctgcttgtttttatttgctttctccttgtttgtacggggctttttgcgcaggaggagccgcaagaacaggatgagaagcaagaacataatgagaagcaagtgcataatgaaaaaaaaaccggccgtgaatataaacctagggaacaaaaactctacattgatattccccttaccataggcgaaatcgcgctcatcaatgtgatagggaatataaactggcgtctttggggagccgactctgaaacggcgtatgttactttagaatccatgcgcagaaattttgatcctaaaggatggcctgattgggattttgagataggccggggacgcgacacgtttctggtgaatcagttttttcatccctacgccggaggcatttatttcgcctccgcacgttccaataatcttaatttttactggtctatactttcgcccattatcggcagcttcacatgggaagcgttatgtgaaattgaatcgccttccgcaagcgattttattactaccgcggtgggcgggatcgccatcggcgagatactgcatcggctctatatcgaacttgataaaggcggacttggcgggaaaatagccgcgtcttttgtaagccctcccgacaggttaaccgccgccataagaggctacggaccggataagagcccgaataaaattaacagcgcttcattggcgtttggtttttcatggctcaacgccatgttctttgacggcgatgaggaaacatcattttggaacaccccgtcgggctttattaaccttgaccttgtttacggcgatccctttacggcgcacagcaagacgccgttcgaccaatttgatttaaatgcgtcgcttacggtgactgttccgctcatctataattttaccctcattgccgacggctatctggcatcatggcttttgaaggatgatgacacgtatcaggccagcaacggcctgtcccttcactttgacatttttgtaatcgacaaaggcgcgattattgctctaacaacggcagggaaaatctggacttcaactctaactccctga

SEQ ID NO: 70126 - protein, 359 aa, Unknown
  Obtained from environmental sample
  SIGNAL (1)...(27)
  misc_feature (1)..(359): Xaa is any amino acid
MQMKTFNPQKTLLVFICFLLVCTGLFAQEEPQEQDEKQEHNEKQVHNEKKTGREYKPREQKLYIDIPLTIGEIALINVIGNINWRLWGADSETAYVTLESMRRNFDPKGWPDWDFEIGRGRDTFLVNQFFHPYAGGIYFASARSNNLNFYWSILSPIIGSFTWEALCEIESPSASDFITTAVGGIAIGEILHRLYIELDKGGLGGKIAASFVSPPDRLTAAIRGYGPDKSPNKINSASLAFGFSWLNAMFFDGDEETSFWNTPSGFINLDLVYGDPFTAHSKTPFDQFDLNASLTVTVPLIYNFTLIADGYLASWLLKDDDTYQASNGLSLHFDIFVIDKGAIIALTTAGKIWTSTLTP

SEQ ID NO: 70127 - DNA, 576 bp, Unknown
  Obtained from environmental sample
  misc_feature (1)..(576): n is a, c, g, or t
ttgccgcagtgcataacgttaccgccatcgcgagcggcatcgccagaagcggcgcggacattatcgccatcgacggtttcccgcggcggaacaggagccgcgcctactcgtattcgcgaccatgtcggcattcccatagagcttgcccttgccggcgttgataagcgtctgcgcgacgaaggaatccgcgacagggtgtcaatcgtcgccggcggcagtatccgctccagcgccgacattgtaaaagcgctcgctctgggcgcggactgcgtatacattgccacctccgcccttgtcgcgctcggctgccacttgtgcagaagctgccacggcggcaaatgcaactggggcatagcgacgcaggttcccgaactggtaaaacgcctgaacccggacataggctacaagcgcctgattaatttgcttacggcgtggcagcacgaaataaaagagatgatgggcggcatgggaattaactcaatcgacggacttaaaggcaacaggcttatgctgcgcggcgtgggattaaacgaaaaagaacttgaaattctgggcattaaacacgcaggagaatag

SEQ ID NO: 70128 - protein, 191 aa, Unknown
  Obtained from environmental sample
  DOMAIN (2)...(159): Conserved region in glutamate synthase
  misc_feature (1)..(191): Xaa is any amino acid
MPQCITLPPSRAASPEAARTLSPSTVSRGGTGAAPTRIRDHVGIPIELALAGVDKRLRDEGIRDRVSIVAGGSIRSSADIVKALALGADCVYIATSALVALGCHLCRSCHGGKCNWGIATQVPELVKRLNPDIGYKRLINLLTAWQHEIKEMMGGMGINSIDGLKGNRLMLRGVGLNEKELEILGIKHAGE

SEQ ID NO: 70129 - DNA, 1092 bp, Unknown
  Obtained from environmental sample
  misc_feature (1)..(1092): n is a, c, g, or t
atggcgttgaatttattataccccgaatatgaaatgacaaggaattacgacagatgtatctgctgccgcgcctgtgaacgtcaatgcgccaatgaggcccatgaataccttgccgacgcgggtaagatgatatgcgatgacgcgaaatgcgtaaactgccaccgctgtatctccctttgtcccacacgcgcccttaaaattttaaagagcggcaacacatacaaacaaaatatgaactggaacggcaagactatcaacgagatctacaagcaggcggactcaagcggcgtgcttttatccagcatgggcaatcccgaagattatcccgtgtactttgacaaaatactcctgaacgcctctcaggttacaaacccgtccatagatcccttgcgcgaacctatggaaacaaggatatccttaggcgcgaagccggaaagcatacaacgcgataaaagcggacggatagtgaacaaccttccgcctcaacttcatctttctttaccggtaatgttttccgccatgagctacggttccataagttacaacgcgcacgaaagcctggcgcgagccgcgcaggagcttggtattctttacaataccggcgaaggcggcctgcacgaggatttttataaatacggaaagaacacgattgtgcaggtcgcatcgggccgtttcggcgtccatcctggatatttaaattcgggcgcggctgttgagataaaaatggggcagggcgcaaaacccggcatagggggacatctgccgggagcaaaaatagtagacgacatttcccgcaccagaatgattcccgaaggcagtgacgcgatctctcccgcgccgcaccacgacatttactctatagaagatttgcgccagcttgtcttctccttaaaagaggctactaattatcaaaaaccggtaattgtaaaaattgccgcagtgcataacgttaccgccatcgcgagcggcatcgccagaagcggcgcggacattatcgccatcgacggtttcccgcggcggaacaggagccgcgcctactcgtattcgcgaccatgtcggcattcccatagagcttgcccttgccggcgttga

SEQ ID NO: 70130 - protein, 363 aa, Unknown
  Obtained from environmental sample
  DOMAIN (43)...(66): 4Fe-4S binding domain
  misc_feature (1)..(363): Xaa is any amino acid
MALNLLYPEYEMTRNYDRCICCRACERQCANEAHEYLADAGKMICDDAKCVNCHRCISLCPTRALKILKSGNTYKQNMNWNGKTINEIYKQADSSGVLLSSMGNPEDYPVYFDKILLNASQVTNPSIDPLREPMETRISLGAKPESIQRDKSGRIVNNLPPQLHLSLPVMFSAMSYGSISYNAHESLARAAQELGILYNTGEGGLHEDFYKYGKNTIVQVASGRFGVHPGYLNSGAAVEIKMGQGAKPGIGGHLPGAKIVDDISRTRMIPEGSDAISPAPHHDIYSIEDLRQLVFSLKEATNYQKPVIVKIAAVHNVTAIASGIARSGADIIAIDGFPRRNRSRAYSYSRPCRHSHRACPCRR

SEQ ID NO: 70131 - DNA, 1092 bp, Unknown
  Obtained from environmental sample
  misc_feature (1)..(1092): n is a, c, g, or t
atgcagaatgaagggcaggtgcggattccatccggctgcgccatatcgggtataatagacaggtcggggcggcgaatgagcggcgaggcgattattaagtcgatcagcatcatgcacgaccgctctaacgggctgggcggcggttttgccgcttacggaatatacccggagtacaaagattattatgccctccacctgttctatgaatcaacgtcagcgaaaaaagagtgcgagcagttccttgaggaacattttgacattatcaacctttcaaaaatacctacaagaaaaattaaggaaataaccgacgaaccattaatttggcgttactttgtaatcccgctgccaacaagacttgccgacagccagcttgacgagagggaatttaccgcaaaatgcgtattccgcgtcaacacaaaaatcaacggcgcttatgttttttcaagcggaaaaaatatgggcgtgtttaaggctgtcgggttccccgaggatgtcgggcgcttttacaaacttgaagaatatgaaggctggtgctttacggcgcacggacgctacccgacaaatacgccgggctggtggggcggcgcccatccgttctcccttcttgattataccgttgtgcataacggcgaaatatcttcctacgataccaacaggcgcgccatcgaaatgtacggctacaaatgcaccttgcagacagacacggaagttattacctatataatagattaccttcacagaaaacaaaaactttcctttgaggaaatcgcatccgttatcgccgcgtctttctggcagaccattgaaaaacaaccgcccaaagagcgggaaatacatgaatatttgcgcgtaatgttcagcgcgcagttgattaccggtcctttttcaatccttgtgggttatgacggcgggcttatggcgttaaacgacaggctcaaactgcgcagtatggtggtcggtgaaaaagacgatctggtctacattgcaagcgaggaagcggctatccgcatcattcagccggatcttgactctgtatgggcgccaaaaggcggccagcctgtaatcgtcaatataaacagaggtaaagcgtaa

SEQ ID NO: 70132 - protein, 363 aa, Unknown
  Obtained from environmental sample
  DOMAIN (133)...(332): Glutamine amidotransferases class-II
  misc_feature (1)..(363): Xaa is any amino acid
MQNEGQVRIPSGCAISGIIDRSGRRMSGEAIIKSISIMHDRSNGLGGGFAAYGIYPEYKDYYALHLFYESTSAKKECEQFLEEHFDIINLSKIPTRKIKEITDEPLIWRYFVIPLPTRLADSQLDEREFTAKCVFRVNTKINGAYVFSSGKNMGVFKAVGFPEDVGRFYKLEEYEGWCFTAHGRYPTNTPGWWGGAHPFSLLDYTVVHNGEISSYDTNRRAIEMYGYKCTLQTDTEVITYIIDYLHRKQKLSFEEIASVIAASFWQTIEKQPPKEREIHEYLRVMFSAQLITGPFSILVGYDGGLMALNDRLKLRSMVVGEKDDLVYIASEEAAIRIIQPDLDSVWAPKGGQPVIVNINRGKA

SEQ ID NO: 70133 - DNA, 1272 bp, Unknown
  Obtained from environmental sample
  misc_feature (1)..(1272): n is a, c, g, or t
ttggacagccgccttgagcttgcgatggaagccctgcgatgcccggccggaagcgaagttgtcgatcatctttcgggcggggagagaaggcgcgtcgccctctgccgcctgctgttacagaagccggacattcttttgcttgatgagccgaccaaccacctggacgcggaaactgtagcctggctggagcggcacttgcgcgattacgcgggcacggtcatcgcggttacgcacgaccgctactttttggataatgtcgcgggctggatactggaacttgaccgcggagaaggaatcccctggaaaggcaattattccggctggcttgaacagaaagaaaaacgcatggagcaggaagaaaaaggagagagcgacaggcgtaaaacccttcagcgagaacttgaatggatacgcatgagtccaaaaggacgtcacgcaaagagcaaggcgcgtatcacccagtacgaaaaactttttcaggatgatgaaagggagcgttccaagggcgcggcgcagaataacaagataacaattcccgccggtcctcatcttggtaaactggtaatcgaaaccgaaggcttgtcaaaatctttcggtgaaaaactgttattcgacaacatgagtttcactgtgccgccgggagcgtgcgtaggcattatcgggcctaacggcgccgganagacgacgttgttcaaattgataacaggcgcagagaagccggacgcgggagttctgcgtctgggagacagcgtanaactcggctacgcagatcanatgcgcgccggccttgacggcgagaaaacagtttgggaacagctttcggacgggcttgaccttattaaacttggttcggggcaggcgccgcgtgaagtgaactcccgcgcctattgcgcattgtacaattttttcgggagcggatcagtcaaaaaaagtgggagtccttccggcggagagcgcaaccgtttgaacctcgcgatgatgctaaaagagggagcgaatgtctttcttcttgacgagccgaccaatgatctggacgtgaacactntgcgcgctcttgaggaagcgcttgattctttcgccggagtcagtcttgtaatcagccacgaccgctggttccttgaccgcatcgtcacgcacatcctcgcctttgaagacggcgaggtagtctggtacgacggtaactggtccgaatacgccgaatggcgcagagaaaaactgggcaccgccgccgacagccctcatcggtatgtttatcgaaagttggaaagatag

SEQ ID NO: 70134 - protein, 423 aa, Unknown
  Obtained from environmental sample
  DOMAIN (1)...(96): ABC transporter
  misc_feature (1)..(423): Xaa is any amino acid
MDSRLELAMEALRCPAGSEVVDHLSGGERRRVALCRLLLQKPDILLLDEPTNHLDAETVAWLERHLRDYAGTVIAVTHDRYFLDNVAGWILELDRGEGIPWKGNYSGWLEQKEKRMEQEEKGESDRRKTLQRELEWIRMSPKGRHAKSKARITQYEKLFQDDERERSKGAAQNNKITIPAGPHLGKLVIETEGLSKSFGEKLLFDNMSFTVPPGACVGIIGPNGAGXTTLFKLITGAEKPDAGVLRLGDSVXLGYADXMRAGLDGEKTVWEQLSDGLDLIKLGSGQAPREVNSRAYCALYNFFGSGSVKKSGSPSGGERNRLNLAMMLKEGANVFLLDEPTNDLDVNTXRALEEALDSFAGVSLVISHDRWFLDRIVTHILAFEDGEVVWYDGNWSEYAEWRREKLGTAADSPHRYVYRKLER

SEQ ID NO: 70135 - DNA, 435 bp, Unknown
  Obtained from environmental sample
  misc_feature (1)..(435): n is a, c, g, or t
atgaggaccggcgggaattgttatcttgttattctgcgccgcgcccttggaacgctccctttcatcatcctgaaaaagtttttcgtactgggtgatacgcgccttgctctttgcgtgacgtccttttggactcatgcgtatccattcaagttctcgctgaagggttttacgcctgtcgctctctcctttttcttcctgctccatgcgtttttctttctgttcaagccagccggaataattgcctttccaggggattccttctccgcggtcaagttccagtatccagcccgcgacattatccaaaaagtagcggtcgtgcgtaaccgcgatgaccgtgcccgcgtaatcgcgcaagtgccgctccagccaggctacagtttccgcgtccaggtggttggtcggctcatcaagcaaaagaatgtccggcttctgtaa

SEQ ID NO: 70136 - protein, 144 aa, Unknown
  Obtained from environmental sample
  misc_feature (1)..(144): Xaa is any amino acid
MRTGGNCYLVILRRALGTLPFIILKKFFVLGDTRLALCVTSFWTHAYPFKFSLKGFTPVALSFFFLLHAFFFLFKPAGIIAFPGDSFSAVKFQYPARDIIQKVAVVRNRDDRARVIAQVPLQPGYSFRVQVVGRLIKQKNVRLL

SEQ ID NO: 70137 - DNA, 1818 bp, Unknown
  Obtained from environmental sample
  misc_feature (1)..(1818): n is a, c, g, or t
gtggtagaatctgtggattatgactgtattgttataggaggaggccatgccggaattgaagcgtctcttgcggcaagccgtcttggtttttcgactcttctttatacgcagaaccctgataaaataggcgctctctcctgtaatcctgcaatcggaggtctttccaaaggcaaccttgtccgtgaagtagacgctcttggcggagaaatggcaaaactgacagatgcggtaatgattcaataccgtgtgcttaaccgttccagaggaccggctgtacaggctccgagagcgcaggcggataaacacgcatatcaggcggcggcgcgttcagttcttgaaaagcaaaaaaatctttcaatttttatggatacggtggttgatttaattgttgaaaaaaatagcgccatcggagacgatgctttttccatgaaaattgccggagtaattacccggcggggacatcgtatatcttcgcgtactgtaattctctctgcgggtacttttatggaagggaagatatttatcggcgaatatgatgctttgcagggacggcttggagaagaagcggcgttagggcttggcgtttccctgcgccgtctcgggtttccggtaggcaggttaaagaccggaactccggcgcgtattgcagacggctctatcaattactctgtaatggaaaaacaggacggtgaggaaatgtgtccattttcgttctgtgccggaactattacgcaaaggccgtccatgccatgctggattacatataccaatttaaaaacacacgaaataattaagtcaaatattcaccgttctccgttatacggcggaaaaattacgggaacaggggcgcggtactgcccttctatcgaagacaaggttgtccgtttcccgcagcgggaacggcatcatatttttatcgaacctgaagggctttcaactaacgaaatgtacatgaacggcgcttcaagctctctgccagaagacgtgcagcgtgaatttatccgcaccatttccggtcttgaagacgcccgcattgtccgccctgcctatgcggtggagtacgattacattgatccgcttgatctttatccgtctcttgaatcaaaacgtatctccggtttttattcggcagggcagacaaacggcagttccggttatgaggaagccgccgcccaggggttaattgccggcattaatgccgcaatgaaaatgctaaatcgtccgccgctgatactaggacgcgccgaagcttacatcggtgttttggtggacgaccttacaacccttggaacaaaagagccgtaccgtatgtttacaagccgcgccgaacaccgcttaatgctccgccacgacacagcggacacaaggcttactcccagggggcgcgatgccggtcttgtagacgacagccgctgggaacagtttcttgaaaagacaaaaacactggacgcaattacagaaattcttgcgcagcgtccttcaaaagtgaaatacggcgaaactgataatgcgttagccgcaaatgccgcttgtacggaattatccggatatccggctgaattgattgaaagggcgcttttggacataaaatacgcaggttacatagaaaaggaaaaacgcttcgccgcaaaaacctctaaaatggacgctatcaaacttgatcctaaagcggattattctgtcataaacgggctttctgtcgaggcaagggagaagctgcaagccgtaaagccgttgaatgtagggcaggcagcgcggataccgggtgttcgtcagggggatattgcagtgttgattatcttggccggcaagaagtaa

SEQ ID NO: 70138 - protein, 605 aa, Unknown
  Obtained from environmental sample
  DOMAIN (8)...(408): Glucose inhibited division protein A
  misc_feature (1)..(605): Xaa is any amino acid
MVESVDYDCIVIGGGHAGIEASLAASRLGFSTLLYTQNPDKIGALSCNPAIGGLSKGNLVREVDALGGEMAKLTDAVMIQYRVLNRSRGPAVQAPRAQADKHAYQAAARSVLEKQKNLSIFMDTVVDLIVEKNSAIGDDAFSMKIAGVITRRGHRISSRTVILSAGTFMEGKIFIGEYDALQGRLGEEAALGLGVSLRRLGFPVGRLKTGTPARIADGSINYSVMEKQDGEEMCPFSFCAGTITQRPSMPCWITYTNLKTHEIIKSNIHRSPLYGGKITGTGARYCPSIEDKVVRFPQRERHHIFIEPEGLSTNEMYMNGASSSLPEDVQREFIRTISGLEDARIVRPAYAVEYDYIDPLDLYPSLESKRISGFYSAGQTNGSSGYEEAAAQGLIAGINAAMKMLNRPPLILGRAEAYIGVLVDDLTTLGTKEPYRMFTSRAEHRLMLRHDTADTRLTPRGRDAGLVDDSRWEQFLEKTKTLDAITEILAQRPSKVKYGETDNALAANAACTELSGYPAELIERALLDIKYAGYIEKEKRFAAKTSKMDAIKLDPKADYSVINGLSVEAREKLQAVKPLNVGQAARIPGVRQGDIAVLIILAGKK

SEQ ID NO: 70139 - DNA, 1644 bp, Unknown
  Obtained from environmental sample
  misc_feature (1)..(1644): n is a, c, g, or t
atgagcgtttttgcctatatgccctatggggctggcggaattattattcgggttgaaactgatattcgcaggggtattcccggcgttgatattacggggcttgccgaaggagcagtccgtgaagcgagggatcgagtacgcgccgctttcaggaattcgggcttaagtttcccggctgacaggatattgattaacctcgctccggcgggcttaaaaaaagacggagccgcccttgatttgccgatagctctttccgtgatgtccgctgcaggacttgcgcccgcttcagggaatctgcttgtaatgggagaacttgaactctccggcagaatcaggccggtgcgcggagtgcttgccgcaatcgccgcaggacttgctgaggggatcagagaatttattgtccccgcagaaaacgccggagaagcggcaattcttgcctcaaacaaaaactcagacggaaagaacgcacggtttacggctgccgaaaatttacagggagcggttaacgcattgtttgtaagagaggaaaaaggcttccttcccgaatcggacgtatttgttgatgcttcttctgcggtaaataaagacaacgccgccgctattggcgcagcggtcgcgggagatttttccgaagtaaaggggcaggctgtctataaacgggcgctggaaattgcggcggcgggcggacacaatatgcttgtcttcgggccgccgggagcgggaaagacaatgctcgcaaggcggatgccttcgataatggctcccctcactcccgatgaagctgtagaagtaacccgtctttacagccttgcgggaccgctttcaaataacggctttatcgaccgcctaataacacgccctcccttccgcgccccgcaccattccgccagtgctgaaggcattctcggcggcggcagaattccccgccccggtgaaataacccttgcgcacttcggcgtgcttttccttgacgaagcccccgaattcaaaatcaacgtactgcaagccctgcgggagccgctggaagacagagttatcagcatatccagagctgaggggcttgtccgtcttcctgcggaattccagttggtactggcggcaaactcctgtccctgcgggcggctgggcatgaaggacacggaaacgcaagcctgttactgctcgccggaagaaatcaaccgttactggcgcaagtttggcggagcgctgctcgacagagtggaaattcgcaccgccgtccttccgccgaaaatcgaggaaatggggctgtctgttccggacaagtttcccgtaacggacgcaaaaaacggtgcggaagaaaagagcagcgaaattgccgcccgtgtaaacgcagccgttgaaatccagcgcaaccgtttcaaagggacaggcgttcgccgcaacgcccttcttcctgccggaaaagccgcagacttatgcccgttaagcgaaaaggcggcaggagcgtttcacaaggcaattgcgaaactagggctttccggcagggcataccacggaatcctgcgggtagccagaacaatcgccgaccttgaaggcagggaaaccatcgaggctgaacatatcctcgaagctgtttttcaccgccgtcttggagaagacccttgggaaattttgtcagtctga

SEQ ID NO: 70140 - protein, 547 aa, Unknown
  Obtained from environmental sample
  DOMAIN (231)...(415): ATPase family associated with various cellular activities (AAA)
  misc_feature (1)..(547): Xaa is any amino acid
MSVFAYMPYGAGGIIIRVETDIRRGIPGVDITGLAEGAVREARDRVRAAFRNSGLSFPADRILINLAPAGLKKDGAALDLPIALSVMSAAGLAPASGNLLVMGELELSGRIRPVRGVLAAIAAGLAEGIREFIVPAENAGEAAILASNKNSDGKNARFTAAENLQGAVNALFVREEKGFLPESDVFVDASSAVNKDNAAAIGAAVAGDFSEVKGQAVYKRALEIAAAGGHNMLVFGPPGAGKTMLARRMPSIMAPLTPDEAVEVTRLYSLAGPLSNNGFIDRLITRPPFRAPHHSASAEGILGGGRIPRPGEITLAHFGVLFLDEAPEFKINVLQALREPLEDRVISISRAEGLVRLPAEFQLVLAANSCPCGRLGMKDTETQACYCSPEEINRYWRKFGGALLDRVEIRTAVLPPKIEEMGLSVPDKFPVTDAKNGAEEKSSEIAARVNAAVEIQRNRFKGTGVRRNALLPAGKAADLCPLSEKAAGAFHKAIAKLGLSGRAYHGILRVARTIADLEGRETIEAEHILEAVFHRRLGEDPWEILSV

SEQ ID NO: 70141 - DNA, 567 bp, Unknown
  Obtained from environmental sample
  misc_feature (1)..(567): n is a, c, g, or t
ttgtctttatttaccgcagaagaagcatcaacaaatacgtccgattcgggaaggaagcctttttcctctcttacaaacaatgcgttaaccgctccctgtaaattttcggcagccgtaaaccgtgcgttctttccgtctgagtttttgtttgaggcaagaattgccgcttctccggcgttttctgcggggacaataaattctctgatcccctcagcaagtcctgcggcgattgcggcaagcactccgcgcaccggcctgattctgccggagagttcaagttctcccattacaagcagattccctgaagcgggcgcaagtcctgcagcggacatcacggaaagagctatcggcaaatcaagggcggctccgtctttttttaagcccgccggagcgaggttaatcaatatcctgtcagccgggaaacttaagcccgaattcctgaaagcggcgcgtactcgatccctcgcttcacggactgctccttcggcaagccccgtaatatcaacgccgggaatacccctgcgaatatcagtttcaacccgaataataattccgccagccccatag

SEQ ID NO: 70142 - protein, 188 aa, Unknown
  Obtained from environmental sample
  misc_feature (1)..(188): Xaa is any amino acid
MSLFTAEEASTNTSDSGRKPFSSLTNNALTAPCKFSAAVNRAFFPSEFLFEARIAASPAFSAGTINSLIPSASPAAIAASTPRTGLILPESSSSPITSRFPEAGASPAADITERAIGKSRAAPSFFKPAGARLINILSAGKLKPEFLKAARTRSLASRTAPSASPVISTPGIPLRISVSTRIIIPPAP

SEQ ID NO: 70143 - DNA, 741 bp, Unknown
  Obtained from environmental sample
  misc_feature (1)..(741): n is a, c, g, or t
atgtcggtttcggtaccccaaacgctggtaggaaacgccgataacgtaaaacgctgggaggaagcctcggaagtgggcgcaacggggctgcgtgaagtcgctacggatattcaggaaatagcgaaagactccaaggtactgctggaaataaacgccgtaatgaaaaacatagccagccagaccaacctgctttcgatgaacgcggcgatagaagcggcccacgccggggaagcgggcaatggcttcgccgttgtcgccgatgaaatccgcaaactggcggaaagctccagcgaacagtccaagaccatcggcgccgtgcttaaaaagataaagggttcaatcgacaagataacccattccacggaaaccgtgcttaacgagtttgaagcgattgacttgagcgtcaagacggtggtggaacaggaggataatatccgtaacgcgatggaggaacagggccagggcagcaggcagatactggacggcgtaagcaatgtaaacgaaattacccggcaggtaaagggcggcagcgaggaaatgcttgaaggcagcaaggaagtgataaatgaaagccacaaccttgaaacggtaacgcaggaaataaccggcggcatgaacgagatggcttccggggcggaacaggtaaacatagcggtacaccatgtcaacgagatatgcgcaaagaaccgcgagatgattgggtctttgatgcaggaagtgtcacgtttcaaagtagcctaa

SEQ ID NO: 70144 - protein, 246 aa, Unknown
  Obtained from environmental sample
  DOMAIN (3)...(211): Methyl-accepting chemotaxis protein (MCP) signaling domain
  misc_feature (1)..(246): Xaa is any amino acid
MSVSVPQTLVGNADNVKRWEEASEVGATGLREVATDIQEIAKDSKVLLEINAVMKNIASQTNLLSMNAAIEAAHAGEAGNGFAVVADEIRKLAESSSEQSKTIGAVLKKIKGSIDKITHSTETVLNEFEAIDLSVKTVVEQEDNIRNAMEEQGQGSRQILDGVSNVNEITRQVKGGSEEMLEGSKEVINESHNLETVTQEITGGMNEMASGAEQVNIAVHHVNEICAKNREMIGSLMQEVSRFKVA

SEQ ID NO: 70145 - DNA, 621 bp, Unknown
  Obtained from environmental sample
  misc_feature (1)..(621): n is a, c, g, or t
ttgaaacgtgacacttcctgcatcaaagacccaatcatctcgcggttctttgcgcatatctcgttgacatggtgtaccgctatgtttacctgttccgccccggaagccatctcgttcatgccgccggttatttcctgcgttaccgtttcaaggttgtggctttcatttatcacttccttgctgccttcaagcatttcctcgctgccgccctttacctgccgggtaatttcgtttacattgcttacgccgtccagtatctgcctgctgccctggccctgttcctccatcgcgttacggatattatcctcctgttccaccaccgtcttgacgctcaagtcaatcgcttcaaactcgttaagcacggtttccgtggaatgggttatcttgtcgattgaaccctttatctttttaagcacggcgccgatggtcttggactgttcgctggagctttccgccagtttgcggatttcatcggcgacaacggcgaagccattgcccgcttccccggcgtgggccgcttctatcgccgcgttcatcgaaagcaggttggtctggctggctatgtttttcattacggcgtttatttccagcagtaccttggagtctttcgctatttcctga

SEQ ID NO: 70146 - protein, 206 aa, Unknown
  Obtained from environmental sample
  misc_feature (1)..(206): Xaa is any amino acid
MKRDTSCIKDPIISRFFAHISLTWCTAMFTCSAPEAISFMPPVISCVTVSRLWLSFITSLLPSSISSLPPFTCRVISFTLLTPSSICLLPWPCSSIALRILSSCSTTVLTLKSIASNSLSTVSVEWVILSIEPFIFLSTAPMVLDCSLELSASLRISSATTAKPLPASPAWAASIAAFIESRLVWLAMFFITAFISSSTLESFAIS

SEQ ID NO: 70147 - DNA, 864 bp, Unknown
  Obtained from environmental sample
  misc_feature (1)..(864): n is a, c, g, or t
atgatacagcccagggtggaacagactattaaagatttcgatgaagtcacctccatggtcgtttattccgacaacgggtttgtcctgggaaattacctgccggaatttatagggaaacaaattgacacggaaacgcaatacggcccttacttaaacgaagtcaaagacgttatcaaaaacgcgaaagaatgggaaggaaaagcatacgaccccgaactgaaaacaaacatggtaatggcggtagccaatatccccataggggtttccccgacaacatggtcggtaatggtcggctcaaccgaggcttacatcctgaaagatgtcaacgcgatgaaaaactttgtcatcgtgctggcctcaatagcccttacggtggctgtagcgcttatataccttgttctgagcagaacaaccaccccaatcgtcaaggtagctgacacgctgaaagacatctccgaaggcgaaggcgacttgacgcggactataaccgtcaattccaatgacgagataggcgaccttgctctgtacttcaacaaaacgctggaaaaaatcaagaatatgatcatacatatcaaggatgaggcgaacggtttgacagagataggcaatgaccttgccggcaacatgaccgaaaccgccgccgctgtgaaccaaattaccgccaacatccagagcatcaagggccgcgtcataagccagagcgccagcgttacccanaccaacgccaccatggaacaggttatcgtcaatatcaacaaaactcacgaccatgtagaagaccagagcacntatatctccccaggcttcgtccgctatcgagcagatggtagccaatgtcggtttcggtaccccaaacgctggtag

SEQ ID NO: 70148 - protein, 287 aa, Unknown
  Obtained from environmental sample
  DOMAIN (116)...(186): HAMP domain
  misc_feature (1)..(287): Xaa is any amino acid
MIQPRVEQTIKDFDEVTSMVVYSDNGFVLGNYLPEFIGKQIDTETQYGPYLNEVKDVIKNAKEWEGKAYDPELKTNMVMAVANIPIGVSPTTWSVMVGSTEAYILKDVNAMKNFVIVLASIALTVAVALIYLVLSRTTTPIVKVADTLKDISEGEGDLTRTITVNSNDEIGDLALYFNKTLEKIKNMIIHIKDEANGLTEIGNDLAGNMTETAAAVNQITANIQSIKGRVISQSASVTXTNATMEQVIVNINKTHDHVEDQSTYISPGFVRYRADGSQCRFRYPKRW

SEQ ID NO: 70149 - DNA, 1011 bp, Unknown
  Obtained from environmental sample
  misc_feature (1)..(1011): n is a, c, g, or t
gtgaagaacgtcaagaacgaggcggaaaacctgtcggagatcggaggcgatctcgcggacaacatgaacgagaccgccgctgcggtgaacgaaattaccgccaacatccgcagcatgaaaggccgcgttatcaatcagagcgccagcgtaacccaaacccacgccaccatggaacagtccgtcgtgaacattaagagccttgacgagcttatttccaggcagggggataacatttccagggcctcctctgccattgagcagatggtggccaatatccattcggttacagaaaccctggccaaaaactcagacaacgtaaagaacctacaggaggcttcggaagtgggccgctcgggtctgcgggaagtgtccggggacattgaggagatcgccaaggagtccgaggggcttctgcagattaacgccttaatgaaaaacatcgccagccaaaccaatttactgagcatgaacgccgccattgaagcggcccacgccggggaagccggaaagggctttgccgtggtggcagaggaaatccgcaagcttgccgagaactcaagcgagcagtccaagaccataggcgcggtcttgaagaagataaaggggtcgattgacaagatatcctattccaccgggaacgtgcttaacaagtttgaggccatcgactccaacgtaagaatcgtggcccagcaggaagacgttgtcctgaacgccatggaggagcagagcgaaggaagcaagcagatactccaggcctcaagcgatttgggcgcgataagccggctcgtgcagaacggctcggacgagatcgaagagggcgtaagggaagtgataaaggaaagcgacaacctagagaagataacgcaggaaataaccagcggtatgaacgagatggcttcaggcgcggatcaaatgaacgtcgcagtacaccacgtcaacgagataagcggcaagaaccgtgacgccattgacgttttgctaaaggaagtttcgcggtttaaggtggagtag

SEQ ID NO: 70150 - protein, 336 aa, Unknown
  Obtained from environmental sample
  DOMAIN (72)...(292): Methyl-accepting chemotaxis protein (MCP) signaling domain
  misc_feature (1)..(336): Xaa is any amino acid
MKNVKNEAENLSEIGGDLADNMNETAAAVNEITANIRSMKGRVINQSASVTQTHATMEQSVVNIKSLDELISRQGDNISRASSAIEQMVANIHSVTETLAKNSDNVKNLQEASEVGRSGLREVSGDIEEIAKESEGLLQINALMKNIASQTNLLSMNAAIEAAHAGEAGKGFAVVAEEIRKLAENSSEQSKTIGAVLKKIKGSIDKISYSTGNVLNKFEAIDSNVRIVAQQEDVVLNAMEEQSEGSKQILQASSDLGAISRLVQNGSDEIEEGVREVIKESDNLEKITQEITSGMNEMASGADQMNVAVHHVNEISGKNRDAIDVLLKEVSRFKVE

SEQ ID NO: 70151 - DNA, 1122 bp, Unknown
  Obtained from environmental sample
  misc_feature (1)..(1122): n is a, c, g, or t
atggcatctttaactatcccggcctctgccggtaccgttcacgatttattggccctgggagctcttgtaaccaggctggatccggggattgttccctttgcggaggcggacaattactgccttcatgttgccggaggggaatataatgtggcagcgaatctgtcctcctgttttggcatgaggactgccatcgccagcgccatggtgaattaccccattggcaagcgcatagaacgcgcggtacagaagatgggtgtcactccctattacaagcgctttgaatttgacggggtacgcgggccgaacatggctattgtgtggagcgaccgcggtcagggactccgcgccccggtggtgttctacaaccgctccaacgaggccgcccaacaactggctcctgggagttttgactgggatgcgatttttggcggatcgaagccggcaatccgctggtttcattcaggcggcattttcagcgccctttcgccgacaacatcacagctcgtcatcgaggcgatgcaagcggcgaagaaagccggcgcggtagtgtctttcgatctgaattacagggccaagctctgggcagtcgctgcggcggaacagggcaagagcgcggcccaggcaagcgaggaagctgcaaaaaccctgcggaagattgccggttatgtggatgtgctggtcgggaatgaagaagatttacagaaaggtttgggcttaaaaggccaggatgtggaggccaaaagctccctcgatccatcggcgtttttcggcatgatagaaagcgttacaaaggacttccccaacatcaaggcagtagctactaccttgcgcgaggttcactcaaccaaccgccatacatggagtgcagtactttggattgacggcaagcactaccaggcacctactgccgaactggatgtgtacgacagggttggcggtggcgatggttttgcctcggggctgttctacggccttttgtccggcaaaagccatgaggaagccctgcgacttggctgggcccacggcgcactgcttaccaccacccctggggacaccaccatggtcagcctggatcaggttgaggcttttgcctccggaggctctgcgcggatccaacgctaa

SEQ ID NO: 70152 - protein, 373 aa, Unknown
  Obtained from environmental sample
  DOMAIN (13)...(358): pfkB family carbohydrate kinase
  misc_feature (1)..(373): Xaa is any amino acid
MASLTIPASAGTVHDLLALGALVTRLDPGIVPFAEADNYCLHVAGGEYNVAANLSSCFGMRTAIASAMVNYPIGKRIERAVQKMGVTPYYKRFEFDGVRGPNMAIVWSDRGQGLRAPVVFYNRSNEAAQQLAPGSFDWDAIFGGSKPAIRWFHSGGIFSALSPTTSQLVIEAMQAAKKAGAVVSFDLNYRAKLWAVAAAEQGKSAAQASEEAAKTLRKIAGYVDVLVGNEEDLQKGLGLKGQDVEAKSSLDPSAFFGMIESVTKDFPNIKAVATTLREVHSTNRHTWSAVLWIDGKHYQAPTAELDVYDRVGGGDGFASGLFYGLLSGKSHEEALRLGWAHGALLTTTPGDTTMVSLDQVEAFASGGSARIQR

SEQ ID NO: 70153 - DNA, 1983 bp, Unknown
  Obtained from environmental sample
  misc_feature (1)..(1983): n is a, c, g, or t
atgtttaaacatgaaaataacaggctcatttatcattatgattcggagaaattgtggttagaagcatggggtgtaaatagccttagaatacgagcgacaaagcaaagcggtatgagcggtaataattgggcgcttcaggaacaaaaatcaaataagcctgaaataataatttccgaatcgaaggggatcattaagaatggaaatatcagggcggaaattaataaattcggacatattattgtctataacaaaaacgaaaaaaaaatccttgaagaatattcccgaaaccgtcgcgatgtaacaagcccgaaatgcagcgctcttgaaatagaaggccgtgaattcaaacccattccaggcggtgattaccatcttactgcccgttttgaatctcttgatcccaatgaaaaaatatttggtatggggcaatatcagcaatcgcgcttcaatctaaaaggtacggatattgaactggctcaacgaaattcacaggcaagcgtaccttttgccatttcttctcttggttatgggttcttctggaacaatccaggtatcggaagggcggtattcggaacaaacattatgagttttgaggcttattctacaaaagaactggattactgggttacagcagctgatacgccttcagagatgattgaagcctatactggtgtaacaggcagggttcctatgatgccggattatgcaatgggattttggcaatgcaagcttcgctatcaaacgcaggatgaattattgcacattgcccgtgaatataaacgaagggaattgcctatctcggtaattgttgttgatttttttcattggcccaggcagggagaatggaaatttgacactgattattggccaaaccctgatttgatggttaaagaattgcaatcaatgggtatagaacttgtggtttcaatatggcccactgttgacaaacaatccgaaaattacaaagaaatgcttgaaaagggctatctgatacggacagatcgcggtgtcaggacaggcctggattttcagggagatacaattcatattgacgtaaccaaccctgaagcccggaagtatctctgggaaaaagtcaaaaataattactacacaaaaggaataaaaatgttttggcttgacatagcagaaccagaatatgcggtttatgattttgataattaccgttattaccttggaccaaatatacaaattggtaatgtctatcctgtgatgtatgctcaggccttttatgaagggcaagctaatgaaggccagaaggatattattaatttattacgtactgcatgggcgggttcccaaaaatatggcgctctggtttggtcaggcgatattgcatcaagttttgaaagcctccgaaatcaattcattgccgggcttagcatgggaattgccggtattccctggtggacaaccgatattggaggttttcatggcggtgatccaagtgacctcggtttccaagaattgttgattaggtggtttcaatttggagcatattgcccggttatgcgtttgcacggcgacagggaaccgcgccagccacaggtcggcaattcagggggctcttcctgccgctcaggcgcggataatgaagtttggtcttttggcgaaaccgcttatgggatctgcaaaaaatacctgaatatccgtgaagagttaaagccatatataaaaaaaattatggccgaagctcacgagaaaggtacgcctgttatccgtccattattttatgattttccttctgatcctgttgcctgggaaatgaagatgaatatatgtttggaccggatatctttgtgcaccggttatgtatgcgaatatgcgcaaacgtttgtttattttccttatggcgcttcttgggcgaaaaagaaagcggcactatttatcagggccgcatcaaagcagaaattgatgccccgctggaatacatgccggtatttgaaagaaaaaattagtttctag

SEQ ID NO: 70154 - protein, 660 aa, Unknown
  Obtained from environmental sample
  DOMAIN (207)...(642): Glycosyl hydrolases family 31
  misc_feature (1)..(660): Xaa is any amino acid
MFKHENNRLIYHYDSEKLWLEAWGVNSLRIRATKQSGMSGNNWALQEQKSNKPEIIISESKGIIKNGNIRAEINKFGHIIVYNKNEKKILEEYSRNRRDVTSPKCSALEIEGREFKPIPGGDYHLTARFESLDPNEKIFGMGQYQQSRFNLKGTDIELAQRNSQASVPFAISSLGYGFFWNNPGIGRAVFGTNIMSFEAYSTKELDYWVTAADTPSEMIEAYTGVTGRVPMMPDYAMGFWQCKLRYQTQDELLHIAREYKRRELPISVIVVDFFHWPRQGEWKFDTDYWPNPDLMVKELQSMGIELVVSIWPTVDKQSENYKEMLEKGYLIRTDRGVRTGLDFQGDTIHIDVTNPEARKYLWEKVKNNYYTKGIKMFWLDIAEPEYAVYDFDNYRYYLGPNIQIGNVYPVMYAQAFYEGQANEGQKDIINLLRTAWAGSQKYGALVWSGDIASSFESLRNQFIAGLSMGIAGIPWWTTDIGGFHGGDPSDLGFQELLIRWFQFGAYCPVMRLHGDREPRQPQVGNSGGSSCRSGADNEVWSFGETAYGICKKYLNIREELKPYIKKIMAEAHEKGTPVIRPLFYDFPSDPVAWEMKMNICLDRISLCTGYVCEYAQTFVYFPYGASWAKKKAALFIRAASKQKLMPRWNTCRYLKEKISF

SEQ ID NO: 70155 - DNA, 510 bp, Unknown
  Obtained from environmental sample
  misc_feature (1)..(510): n is a, c, g, or t
atgaaaaatgaaaaattatttttgaacaatgcattttttattgtatcaattattatttttattattttatttttcccgttttattggattatcattacatcccttaaaacagaacaggaaatattctcttttccaccaacgttttttccccatgtcttgaatatagattcttaccaggcgcaaataggaacaggcgattttaacatgtttcgctcttttggcaatagcattattatttcattaggggctttatgtatttctgtattgctatccgtcccggcatcttatggcattgcgctttatcaatttaaagggaagagccttatgttattggttttccttgtaactcaaatgttgccggtttcagttcttttgacccctatgtttattatgttcaggaatatgaaattgcttaatacgccgttttcagctattatcgcggatgccactattgggatacctttttcagttttgatactaaagaaattattttgcatccattcctgctga

SEQ ID NO: 70156 - protein, 169 aa, Unknown
  Obtained from environmental sample
  misc_feature (1)..(169): Xaa is any amino acid
MKNEKLFLNNAFFIVSIIIFIILFFPFYWIIITSLKTEQEIFSFPPTFFPHVLNIDSYQAQIGTGDFNMFRSFGNSIIISLGALCISVLLSVPASYGIALYQFKGKSLMLLVFLVTQMLPVSVLLTPMFIMFRNMKLLNTPFSAIIADATIGIPFSVLILKKLFCIHSC

SEQ ID NO: 70157 - DNA, 1452 bp, Unknown
  Obtained from environmental sample
  misc_feature (1)..(1452): n is a, c, g, or t
atggatttactgtttaaccaagatgatccttctacagaaatcatttgtacatacagcgctggaaacggaagacaagcctacaccataaattccgacgacgctgaaaacggagttatcaaggtttacgccgtatttattcacgataatattgaaccgtcgccggagttgccgacacatgttaccattaccggcttgtcggcaaataacaaagtttatgacggtacaacaacagcgtcagttaccggaacgccggtaatcaacggattgaaagccggagataatgtaacggtaaccggcggaaccgcagaatttgcgaacgcaaacgcgggaacagacaagacagttacttttaaggattggtctctgaccggaacagacgcggataagtatcttttaatggtacaaccctcaagcgtaacggcgaatatttttaaagcccccggttctgatgtaactcagcctgttgtaaaaggtacgcccacaggtaaaactattaccgttaacgaagtaagtttgataacggctacaggacaaaatattgaatacgccgttagtacgtcgagtaacgcatccggtttatcggcatggcagagcggcgttacttttgtcggtcttaccgaatcaacgacatactttgtctatgcgagatccgcgtccaatatcaattatgaagccggaaaggtaagcgtcgccaacgcgggtattactacttcacccagcgttacaacaggctttaccgtaacatttgaaaccaacggcggcagttatgttccgagccagaacgtagaggacggcggctttgcgacccgtccggcaaatcctacaagaagcaattatacctttgactactggtacgagaatgccgctcttaccaaaccttactattttaaaactcatgtaacggcaaatattaccctttacgccaaatgggtttccgattccgataacgaatataccacaagtccagatacaggcaatataaacatgatatggatatccggcggaacatatatgatgggaagtccctccggcgaaaaagggcataaagacgctgaaggaccgcagcatgaagtaacgttgagcggtttttacatgggcaagtatgagataacgcaagatcagtacagagcggtaatgggaagcaatccaagtgaattctccggttggaatcgacctgttgagagtataacatggcttgacgctgtaaaattatgtaatcagttaagttacaaggaaggattggagcagatttataatatagtcggcgataatgtaacggcggatttcagcaaaaacggttatcgtttacctaccgaggcggaatgggaatacgcgtgccgcgccggaacaacgacggcgtttaataacgggagtaatgattacaacaatatcgcatcggttaacgaagtggcatggtttattacnacggcagtaattggactcatgatttag

SEQ ID NO: 70158 - protein, 483 aa, Unknown
  Obtained from environmental sample
  DOMAIN (325)...(479): Domain of unknown function (DUF323)
  misc_feature (1)..(483): Xaa is any amino acid
MDLLFNQDDPSTEIICTYSAGNGRQAYTINSDDAENGVIKVYAVFIHDNIEPSPELPTHVTITGLSANNKVYDGTTTASVTGTPVINGLKAGDNVTVTGGTAEFANANAGTDKTVTFKDWSLTGTDADKYLLMVQPSSVTANIFKAPGSDVTQPVVKGTPTGKTITVNEVSLITATGQNIEYAVSTSSNASGLSAWQSGVTFVGLTESTTYFVYARSASNINYEAGKVSVANAGITTSPSVTTGFTVTFETNGGSYVPSQNVEDGGFATRPANPTRSNYTFDYWYENAALTKPYYFKTHVTANITLYAKWVSDSDNEYTTSPDTGNINMIWISGGTYMMGSPSGEKGHKDAEGPQHEVTLSGFYMGKYEITQDQYRAVMGSNPSEFSGWNRPVESITWLDAVKLCNQLSYKEGLEQIYNIVGDNVTADFSKNGYRLPTEAEWEYACRAGTTTAFNNGSNDYNNIASVNEVAWFITTAVIGLMI

SEQ ID NO: 70159 - DNA, 1470 bp, Unknown
  Obtained from environmental sample
  misc_feature (1)..(1470): n is a, c, g, or t
ttggggcggcttcgtgtttccttccgttacaaaccgaaagccttgaaaaaacaattaccgaggtgttttccaagaaagatgagaaagtcgcgcaggcaaacgctaaggcttttaaacttggacagactgcttgtaaaacatcaggaaaagcctgacatggattttcaatactggcagcctgaaatagagaaaatgcccagagcgcagcttgaagaattgcagctgacaaagttaaaaaccgagattggctatgctctgcggacaactttttacaaagagcgtcttgcgaaagttgggataaaaagtcctgatgatattaaatcgcttgccgatcttaaaaaaattccttttacttcaaaaaacgatctacgagacggcttcccttacggatttttaagtattccaaatgatgaagttgtgcgtcttcacgcttcaagcggcactacgggtattccaacgacaatttattttaataaagacgatataaaacaatgggcgaattatatggcgcgctgtatctacggaacaggctgtaccaaaagcgacgtgtttcaaaacatgataacttatggtcttttcaccggcgggctgggtatgcatcagggcggcgaggaagtgggaatgcttgtcattccggcgggagcgggaaatacagcccgccaattcagaatgatgcaggattacggaactactgtgttacacgcaacgccgagtttccttctgcaccttgaaacaaaaatgaaagaagcgggcgttgcgcgggaaagcctttccctaaaacgcgcattcgccggagcggagccttactccgaggacacacggcggcgtattgaagcgttattaaaaatcgatgtctttaattcttacggactttcggaaatgaacggtcccggcgtcgcatttgaatgtcagtgcaaggacggacttcacatctgggaagacggatacatcgcggagattgtcaatcccgatactcttgagcctgtcaaagagggcgaaatcggcgagcttgttcttacaattctctgccgtgaagctacgcctattttgcgttaccgcacaagagaccttacatctttctatactgaagcgtgcaaatgcggaagaacccaccgcaggcttcatcgcataactggacgaagcgacgatatgcttatcatcaacggtgtaaatgttttcccaagccagattgaagaagttatcatgagcatgaaggaagtcggcaacaattaccttatcgtcgtggagaaagacggcgttctggacagactgactgtaaaaacagaagtaagcgccgacactttcatggacgatacgcgccccttaaacgctcttaaagacaaaattaaagaaacactgcaagcgtcaatctcaatcagcccaagggtggaactgcacgaaagcggcagtctgcctatttccgaaggaaaagcggtaagggtgcaggataccagaccgaaagacgtgtag

SEQ ID NO: 70160 - protein, 489 aa, Unknown
  Obtained from environmental sample
  DOMAIN (30)...(412): AMP-binding enzyme
  misc_feature (1)..(489): Xaa is any amino acid
MGRLRVSFRYKPKALKKQLPRCFPRKMRKSRRQTLRLLNLDRLLVKHQEKPDMDFQYWQPEIEKMPRAQLEELQLTKLKTEIGYALRTTFYKERLAKVGIKSPDDIKSLADLKKIPFTSKNDLRDGFPYGFLSIPNDEVVRLHASSGTTGIPTTIYFNKDDIKQWANYMARCIYGTGCTKSDVFQNMITYGLFTGGLGMHQGGEEVGMLVIPAGAGNTARQFRMMQDYGTTVLHATPSFLLHLETKMKEAGVARESLSLKRAFAGAEPYSEDTRRRIEALLKIDVFNSYGLSEMNGPGVAFECQCKDGLHIWEDGYIAEIVNPDTLEPVKEGEIGELVLTILCREATPILRYRTRDLTSFYTEACKCGRTHRRLHRITGRSDDMLIINGVNVFPSQIEEVIMSMKEVGNNYLIVVEKDGVLDRLTVKTEVSADTFMDDTRPLNALKDKIKETLQASISISPRVELHESGSLPISEGKAVRVQDTRPKDV

SEQ ID NO: 70161 - DNA, 612 bp, Unknown
  Obtained from environmental sample
  misc_feature (1)..(612): n is a, c, g, or t
ttgattttacgcaataatatacctatgaaatacgatgtaattttagccggtgtcggcggacagggcgttctttctatcgcctcaattattgcccaagccgcgatgaacgaaggttttgaggtgcgtcagagcgaagtacacggcatggcgcaaagaggcggggcggttctttcttccctgcgtatctccaaaaagaaaatagcgggcgatcttgtgccaaagggcggcgcggatttaataatttccatggaaccgcttgaaagcctgcgttatgtgtcataccttaaaccggacggcattcttattaccgctgctgaaccttttaacaacatcgcaaattatcccgacattaacggcattcattccactgttaaaaaactgccaaaatggcggattattcaggcggctgctctggcgaaagaagcggggctggcaaaaaccgtaaatactgtcatggttggggcggcttcgtgtttccttccgttacaaaccgaaagccttgaaaaaacaattaccgaggtgttttccaagaaagatgagaaagtcgcgcaggcaaacgctaaggcttttaaacttggacagactgcttgtaaaacatcaggaaaagcctga

SEQ ID NO: 70162 - protein, 203 aa, Unknown
  Obtained from environmental sample
  DOMAIN (19)...(195): Pyruvate ferredoxin/flavodoxin oxidoreductase
  misc_feature (1)..(203): Xaa is any amino acid
MILRNNIPMKYDVILAGVGGQGVLSIASIIAQAAMNEGFEVRQSEVHGMAQRGGAVLSSLRISKKKIAGDLVPKGGADLIISMEPLESLRYVSYLKPDGILITAAEPFNNIANYPDINGIHSTVKKLPKWRIIQAAALAKEAGLAKTVNTVMVGAASCFLPLQTESLEKTITEVFSKKDEKVAQANAKAFKLGQTACKTSGKA

SEQ ID NO: 70163 - DNA, 768 bp, Unknown
  Obtained from environmental sample
  misc_feature (1)..(768): n is a, c, g, or t
ttgggacaatggaatcgggtgtgcgtaatcttgaacgcgaaacgggcgcggtgtatcagacgcatagcaagagacgccgtgaacaaaggttacggaaaagacaaggctgtatcggaattcaataaaattataacgcccgcaaacctggaaaaattactcggcaagaaaaaatacaaacgggacgttgtttacagggaagcgcgcgtaggcgtaacatacgggcttgcgtggacggaaacaggcggaacaatcctccctgtcgaaacaatccgttacgccggaagcggggaactgcttataaccggaaacctcggcgatgtaatgaaagaaagcgcgcgtatcgctctttcatacttgcgcagtaccggaaacaaatacaattttatcgccaaagatttgctaaaatccgacttccacatacacgttcccgaaggcgcaatccccaaagacggaccttccgccggcgttactctcgcctcgtctctgctctctaccctctgcaaagttccgccgcatccgtgcatcgccatgacaggcgagcttactctcacaggcagaattcttcccatcggcggattaaaagaaaaagtgcttgccgctatcagaaacggcatggaaacggtactgctgcccaaagacaacacagaggactggaacgagcttgataaggatattcgctcatgtataaaagttgagtttgccgagacagccgccgatgtgtttgatcttttatttgacacaaaaaaaattaaaaaatcttcgaaataa

SEQ ID NO: 70164 - protein, 255 aa, Unknown
  Obtained from environmental sample
  DOMAIN (43)...(247): Lon protease (S16) C-terminal proteolytic domain
  misc_feature (1)..(255): Xaa is any amino acid
MGQWNRVCVILNAKRARCIRRIARDAVNKGYGKDKAVSEFNKIITPANLEKLLGKKKYKRDVVYREARVGVTYGLAWTETGGTILPVETIRYAGSGELLITGNLGDVMKESARIALSYLRSTGNKYNFIAKDLLKSDFHIHVPEGAIPKDGPSAGVTLASSLLSTLCKVPPHPCIAMTGELTLTGRILPIGGLKEKVLAAIRNGMETVLLPKDNTEDWNELDKDIRSCIKVEFAETAADVFDLLFDTKKIKKSSK

SEQ ID NO: 70165 - DNA, 468 bp, Unknown
  Obtained from environmental sample
  misc_feature (1)..(468): n is a, c, g, or t
gtgtcaaataaaagatcaaacacatcggcggctgtctcggcaaactcaacttttatacatgagcgaatatccttatcaagctcgttccagtcctctgtgttgtctttgggcagcagtaccgtttccatgccgtttctgatagcggcaagcactttttcttttaatccgccgatgggaagaattctgcctgtgagagtaagctcgcctgtcatggcgatgcacggatgcggcggaactttgcagagggtagagagcagagacgaggcgagagtaacgccggcggaaggtccgtctttggggattgcgccttcgggaacgtgtatgtggaagtcggattttagcaaatctttggcgataaaattgtatttgtttccggtactgcgcaagtatgaaagagcgatacgcgcgctttctttcattacatcgccgaggtttccggttataagcagttccccgcttccggcgtaa

SEQ ID NO: 70166 - protein, 155 aa, Unknown
  Obtained from environmental sample
  misc_feature (1)..(155): Xaa is any amino acid
MSNKRSNTSAAVSANSTFIHERISLSSSFQSSVLSLGSSTVSMPFLIAASTFSFNPPMGRILPVRVSSPVMAMHGCGGTLQRVESRDEARVTPAEGPSLGIAPSGTCMWKSDFSKSLAIKLYLFPVLRKYERAIRALSFITSPRFPVISSSPLPA

SEQ ID NO: 70167 - DNA, 2151 bp, Unknown
  Obtained from environmental sample
  misc_feature (1)..(2151): n is a, c, g, or t
atgagcgccaataccagcgcactcttgcgttatacgcagaaccgcgagctctcgtggctcaaatttaacgaacgtgtcctcgaagaagcgcaagacgcgaatgtaccgatcctcgagcgactgaaattcgtatccatatttacgaacaacctcgacgaattctttatggtgcgcgtgggcagtctatgcgacctcgccatggagcacaacgacgccatagacaacaaatcggggcttacgcccagcggacaacttgaggtcgtctacaacgccgtgcggccgctctacgcaaaacgcgacgaggtgtactccgaaatcagcagtcagatacggcagtacggtatatgcccgctcgacatagccgacctcacagccgaggaaaagaaattcgtaaagaactacttcaagcttgaggtgcttccggtcatgtcgccgcaaatcgtcggctcgcaccatccatttccccacctgtcaaacaaggctattcacgtcgcggcaatgctgcaacgcaaaaacagcgccatggtcggcatagcggcgctgccggacaccgtgccggaggtgctcttccttcccggcgacgacctcagatacatcacgcttgacaaaatagtgctcgaaaatatagacgctctctttgagatgtatgaaatcgccgaaaagaacgtcctatgcgccacgcgcaacgccgatataaactacgaggaggagggtgaggagatagagggcgacttccgcttcctaatgaaaaggttgctgaaaaaacgccgccgcctctccgtcgtcagattggaaatgatgacgccgccggaagaaaattttgagaaggtcttctgcgagaggctgcaaatcgggaaacgcgaaattttcgcgactaagacgcctatgaaattctcgcacctctcgctcgtaacaagcaaactcaacccaaacgtcaagatttctatgtcctacccgagtttcacaccgcaaatcacgctgcaggcgacgcctgccgaaggcataatgaaacagatacgcaagcaagacgtactcctgatgtacccgtttgagagcatggacccgttcttgcgcatgataagggaggcggccaacgatccgaccgtcatctccataaagataagcatataccgcgtggcccaaaaggcgcggcttatcgagtacctctgcgccgccgccgaaaacggcaaggacgtcaccgtgcttatagaactacgggcgcgtttcgacgaacagaacaacatcaactggtcggagaggcttgaggaggcggggtgccggctcattttcgggttcgacgatatcaaagtacacgcaaagctgtgcctaatcacccgcaaggaacgcggggagatacaatatattacgcaggtggggacgggtaactacaacgagattaccgcagagttctacaccgacctcacgctcatcaccgccgaccaaaagatcggcgccgaggccaaccgcttcttcagaaacatggccgtggcgcacctaaacgacaactacgaatacctgttggtcgcgccggcaaatctaaagagcggcgtcttggcgttgatcgacgagcagattgcgctgggggaaaatggacgcatagtaatgaagctaaactccatgaccgacatagacgtgatacaaaaactctcggaggcctcctgtgccggcgttaagatagacctcataatccgcggcatctgctgcctgataccgaggctgccgggggctacggagaacatatctgtgacaagcatagtgggacgcttcttggagcactcgcgagtttacagtttcggcgtgggcacggcgcaaaagatgtacatagcgtcggcggacatgatgacgcggaacacgacgcgccgcgtggaggtggccgcgcctatcctcgacgagcagataaaggcgctcatcaacaagatgatcgagatggaactctacgacaacgtgaaggcgcgccgcctgcgcagcgacgggtactacgaaaagatacgcaacggcggcgagccggtggacagccaagaactgttgataaaagaggcggtggaacgaatggagataatgcggcggcaggagacgtccgcgccggataagaagagcgtggtgcgctcaaagctcaaggactggctggggaggctgacggactggatatga

SEQ ID NO: 70168 - protein, 716 aa, Unknown
  Obtained from environmental sample
  DOMAIN (6)...(682): Polyphosphate kinase
  misc_feature (1)..(716): Xaa is any amino acid
MSANTSALLRYTQNRELSWLKFNERVLEEAQDANVPILERLKFVSIFTNNLDEFFMVRVGSLCDLAMEHNDAIDNKSGLTPSGQLEVVYNAVRPLYAKRDEVYSEISSQIRQYGICPLDIADLTAEEKKFVKNYFKLEVLPVMSPQIVGSHHPFPHLSNKAIHVAAMLQRKNSAMVGIAALPDTVPEVLFLPGDDLRYITLDKIVLENIDALFEMYEIAEKNVLCATRNADINYEEEGEEIEGDFRFLMKRLLKKRRRLSVVRLEMMTPPEENFEKVFCERLQIGKREIFATKTPMKFSHLSLVTSKLNPNVKISMSYPSFTPQITLQATPAEGIMKQIRKQDVLLMYPFESMDPFLRMIREAANDPTVISIKISIYRVAQKARLIEYLCAAAENGKDVTVLIELRARFDEQNNINWSERLEEAGCRLIFGFDDIKVHAKLCLITRKERGEIQYITQVGTGNYNEITAEFYTDLTLITADQKIGAEANRFFRNMAVAHLNDNYEYLLVAPANLKSGVLALIDEQIALGENGRIVMKLNSMTDIDVIQKLSEASCAGVKIDLIIRGICCLIPRLPGATENISVTSIVGRFLEHSRVYSFGVGTAQKMYIASADMMTRNTTRRVEVAAPILDEQIKALINKMIEMELYDNVKARRLRSDGYYEKIRNGGEPVDSQELLIKEAVERMEIMRRQETSAPDKKSVVRSKLKDWLGRLTDWI

SEQ ID NO: 70169 - DNA, 831 bp, Unknown
  Obtained from environmental sample
  misc_feature (1)..(831): n is a, c, g, or t
gtggacaagcggagtttcttgacggacgagggggtgcgggagacctgcgcggcgctcaaccgtttccgcgcctccgtctcgggaatgaacatcacggagacgcacgttttcgctacggcgtcgctgcgtaacgtgctcaacgcctcgcgggtgatagaggatgtcaagcgtgaaacggggtacgacgtcatcataatatcgggcgaggaggaggccatctgcgactacataggggccaacaaccgcgcgcccatgagcgacgggcttctcatagatatcggcgggggcagcacggagctcgtgataattaaggacgggcgtatagacaaggccgcgtccttacccataggggcgctgagcatgtactcaaagtacgtcggctcggtcatcccaaccaaggctcaacgcgagaaaatctctctcgaaacgctcaagaagctggaggtcatcaaaggcaaatctctccaaacgatgtgcggcgtaggcggaacgatgcgggcgctatacaaactcaacaacttgatattcggagcgccgccggacaaccgcgccgtgctcgtgagaaacgcgaaaaagatactcagcctcatcgccaccgacacgaaactcatggtcggcaggatactgcagatagcgccggaacgtatacacacgattacgccgggacttatcatcctgaacacggtaataaaaaagtataattgcaaaaccatctccgtcagcgaatccggcgtgcgcgagggatatttgataagaaacgtattacacagagatatcgggaaatccggatcgccggttacgcttaccgcttataattgcaaggggtcttga

SEQ ID NO: 70170 - protein, 276 aa, Unknown
  Obtained from environmental sample
  DOMAIN (1)...(257): Ppx/GppA phosphatase family
  misc_feature (1)..(276): Xaa is any amino acid
MDKRSFLTDEGVRETCAALNRFRASVSGMNITETHVFATASLRNVLNASRVIEDVKRETGYDVIIISGEEEAICDYIGANNRAPMSDGLLIDIGGGSTELVIIKDGRIDKAASLPIGALSMYSKYVGSVIPTKAQREKISLETLKKLEVIKGKSLQTMCGVGGTMRALYKLNNLIFGAPPDNRAVLVRNAKKILSLIATDTKLMVGRILQIAPERIHTITPGLIILNTVIKKYNCKTISVSESGVREGYLIRNVLHRDIGKSGSPVTLTAYNCKGS

SEQ ID NO: 70171 - DNA, 1101 bp, Unknown
  Obtained from environmental sample
  misc_feature (1)..(1101): n is a, c, g, or t
atgtatggaattaagttttacaaacatatattagtttgctttttatttttatctctgattttttcctgttccacttcaaagaacataaaggattccggaagcgcagaaaataaaaaagcggaacccgttatggtttattacgaaggcgagttactcaatattttttttcacgcgttgattgcgcgtccggaaatagcgtttaatggaagcaggaaagatcattataaggaatggtttgttacatccgatgaatataaaaaaatactggatgaactgtatttacaaaattatgtattggtcgatataaaagaattttacaccgtaacgtatacaaataaaacaaaaactgttaaagcgaataaattactggttccccagggaaaaagaccactcattttatccgttgacgatttatcatattatgatactaacaggagaaacgggaccgtacataaacttataattgataaaaacggcaatatcgcggcatggaccgatactccgtccggcggtgaaatatcctatgatctggatattattaccattacggaagactttattaaaaagcatcctgatttttcaatccgcggggcaaaaggaattattgcgcctacgggatttcaaggagtgctgggatatcgaacgcaagcggataattcaaaagccgatggatataaaaaagaaatagaaaacgccgttaaggtggcaaagaaattaaaagaactgggctggcgttttgcgtcgcatagctatagacatttgaatatgccaaaggtaactatggcggcatttttaaatgaccttgattcatgggataaagaagtaaagccgattttaggcgatacagatctttacatatatccctatggagcgacgctggaaaagcaagaggagaaacataaagtactgcgcgatagaaattataatttatttttcggcgtcggcagcggatacggttacaaggtcggtcccagatcggaatatatttatttaacgcgcagaaatattgacggttgttattttaggttattcagaaatagcgataagaaactatttgatatcgataaagtaatggataaaaaaaatcgcggtatcaagtaa

SEQ ID NO: 70172 - protein, 366 aa, Unknown
  Obtained from environmental sample
  SIGNAL (1)...(27)
  misc_feature (1)..(366): Xaa is any amino acid
MYGIKFYKHILVCFLFLSLIFSCSTSKNIKDSGSAENKKAEPVMVYYEGELLNIFFHALIARPEIAFNGSRKDHYKEWFVTSDEYKKILDELYLQNYVLVDIKEFYTVTYTNKTKTVKANKLLVPQGKRPLILSVDDLSYYDTNRRNGTVHKLIIDKNGNIAAWTDTPSGGEISYDLDIITITEDFIKKHPDFSIRGAKGIIAPTGFQGVLGYRTQADNSKADGYKKEIENAVKVAKKLKELGWRFASHSYRHLNMPKVTMAAFLNDLDSWDKEVKPILGDTDLYIYPYGATLEKQEEKHKVLRDRNYNLFFGVGSGYGYKVGPRSEYIYLTRRNIDGCYFRLFRNSDKKLFDIDKVMDKKNRGIK

SEQ ID NO: 70173 - DNA, 999 bp, Unknown
  Obtained from environmental sample
  misc_feature (1)..(999): n is a, c, g, or t
ttgcgttttacaatactgccgaggaaattgataagctggttatcgctgtcagagaactggtataacatggaaatagatcaagaaatcgaacaaatcgcggctgagttactgagtgattttcagaagaaacgcgatgtcgcgaaacagccggtgaaatcggtcataatcgaaattatcggcaaaatgcagcatcttttgttcccgggaatttttgaaagcgttttaacaagcggctctgtaaagaacaaactcaatgtcatgctggaagaagtttccaatgatctagccgcgcagacaagattggctttgcgttatgacctgcggtacaaagacacagatcaggacgagattgacaaaatagcgtgggacataacgcgccaatttatccttaagattccgactatcaaagattttttggaaaaagatattgaggcggcgtatagcggcgaccccgcggcgtacagcaaagcggagattgtcatatcctaccccggcatttataccactatgatttacaggatagcgcatgaactttatttgctgtccgtgccgcttatcccaagaattatgagcgaatacgcgcacagcgcaaccggcattgacattcacccgggcgcggcgataggcaaatatttttttatagaccacggcacgggcactgtaataggcgagacagcgattatagggaacaatgtaaaattgtatcagggtgtaactcttggcgcgttgtccacaaaaggcggacaaagtataaagggagtaaaacgccacccgactatttgcgacaatgttacgatatactcaggagcaagtattttgggaggggacactattatcggcgagggagtggtaatcggcggcaacgcttttgtgatacgctccgtaccggaaaaaacaagagtcagcgtaaaaaacccggaattgcagtttaagagcagcggcaatatttcatctcacatggaactggatcaactggacttctggcattacgagatatag

SEQ ID NO: 70174 - protein, 332 aa, Unknown
  Obtained from environmental sample
  misc_feature (1)..(332): Xaa is any amino acid
MRFTILPRKLISWLSLSENWYNMEIDQEIEQIAAELLSDFQKKRDVAKQPVKSVIIEIIGKMQHLLFPGIFESVLTSGSVKNKLNVMLEEVSNDLAAQTRLALRYDLRYKDTDQDEIDKIAWDITRQFILKIPTIKDFLEKDIEAAYSGDPAAYSKAEIVISYPGIYTTMIYRIAHELYLLSVPLIPRIMSEYAHSATGIDIHPGAAIGKYFFIDHGTGTVIGETAIIGNNVKLYQGVTLGALSTKGGQSIKGVKRHPTICDNVTIYSGASILGGDTIIGEGVVIGGNAFVIRSVPEKTRVSVKNPELQFKSSGNISSHMELDQLDFWHYEI

SEQ ID NO: 70175 - DNA, 1311 bp, Unknown
  Obtained from environmental sample
  misc_feature (1)..(1311): n is a, c, g, or t
gtgggcgctgccttattttcccgaatttcaggaaaaaagacagacagagttacgtattcacctgttgtcgcgccttacaggagtgcgcctttgggagcgggcggttttgacgtaaaccgtattcgcggcgatttccctattctgaatgagagagtcgcgggcggtaaacagcttatctggcttgacaacggcgcgacaacgcaaaaaccaaacgccgtaatagaccgtatctcatatttttacagacacgaaaattcaaacgtccaccgcggcgcgcacgaacttgccgcccgttccacagacgcttacgaagcggcgcgggaaaccatcgccaaatttataggcgctccctcaaaagacaatattgtctttgtgcgcggaacaacggaaggcgttaaccttgtcgcgcaaagttatgtgaaacccctgctttcacccggcgatgaaataatactcaccattcttgaacaccacgccaatattgttccctggcagatgatagcgcaggaaacaggcgcggtaataaaagtcgctcccgttgacgatacgggacagatcattttgtccgaatacgcgcgcttgttttgcccgcgcacaaagttcgcctcagtaacgcatgtttcaaacgcattgggaacaattacccctattcacgagatgattcagatagcgcacggtaacggagtgcgaattcttatcgatggggcgcagtctgtagcgcatacgccgcttaatgtcagcgaattggacgcggatttctttgtgttttcgggacacaagattttcggtcctacgggcataggcgcggtgtacggaaaagcggacgctcttgaagaagccaaaccgtatcagggcggcggcaatatgataagggacgtaacttttgaacgcacggtatacaatcccgcgccatccaagtttgaagcgggaaccggcaatattgccgacgcggtagggcttggcgcggcgcttgattacgtttccggcattgggatagcgaacataagcgcgtatgaacatgaattgcttgattacgcgacccgcgagcttaaacgcataaacggtctgcgccttatcggcactgccgcggaaaaggcgagcgttctgtctttcgtgcttgacaacgtaagcgttgaacaagtcggcaaacatcttgcaagccacgggatagcggttcgcgccggacaccactgcgcgcagccgattctgcgccgcttcggattggaagcgacagtgcgcccgacgattgcgttttacaatactgccgaggaaattgataagctggttatcgctgtcagagaactggtataa

SEQ ID NO: 70176 - protein, 436 aa, Unknown
  Obtained from environmental sample
  DOMAIN (56)...(432): Aminotransferase class I and II
  misc_feature (1)..(436): Xaa is any amino acid
MGAALFSRISGKKTDRVTYSPVVAPYRSAPLGAGGFDVNRIRGDFPILNERVAGGKQLIWLDNGATTQKPNAVIDRISYFYRHENSNVHRGAHELAARSTDAYEAARETIAKFIGAPSKDNIVFVRGTTEGVNLVAQSYVKPLLSPGDEIILTILEHHANIVPWQMIAQETGAVIKVAPVDDTGQIILSEYARLFCPRTKFASVTHVSNALGTITPIHEMIQIAHGNGVRILIDGAQSVAHTPLNVSELDADFFVFSGHKIFGPTGIGAVYGKADALEEAKPYQGGGNMIRDVTFERTVYNPAPSKFEAGTGNIADAVGLGAALDYVSGIGIANISAYEHELLDYATRELKRINGLRLIGTAAEKASVLSFVLDNVSVEQVGKHLASHGIAVRAGHHCAQPILRRFGLEATVRPTIAFYNTAEEIDKLVIAVRELV

SEQ ID NO: 70177 - DNA, 654 bp, Unknown
  Obtained from environmental sample
  misc_feature (1)..(654): n is a, c, g, or t
gtggataccgccgtggaagatgtgttttcttcgccttatgatcagacaaaagaacagcttcatttggccattgaaagtttgcgcgagaggcaggagagccaaattatcaataacgatgattacggtttattgaaaaatgttccggacagccaacgtataacgcccggaaacaaagctggttcaccaatgcccgacgatctggacgaactgatttcaaaagtgtggaaagaaccggcgttctttttggcgcacccgagggctgttgccgcttttcagcgggaatgtacgcgcaggggggttccccccgcgaccacttcgctttttggcggcacgtttattctgtggcgcggtatcccaattgtgcctacggataaattgtttgtggacgggttaaaaaaccccaagagcaaaagcggcaaaaccaatattctgctggtgcgtaccggagaggcaaaacgtggagttatcggtttgtaccagacaggtttgcagaacgagcagggtagggggctttccgtgcgtttcaggggagtggataacaaagggcttgcgtcctatctcctgtcgctgtactgctcagccgcaattctctccgaggacgcgatagccgtactcgaagatgtggaagtaggtaactactatgactactcctag

SEQ ID NO: 70178 - protein, 217 aa, Unknown
  Obtained from environmental sample
  misc_feature (1)..(217): Xaa is any amino acid
MDTAVEDVFSSPYDQTKEQLHLAIESLRERQESQIINNDDYGLLKNVPDSQRITPGNKAGSPMPDDLDELISKVWKEPAFFLAHPRAVAAFQRECTRRGVPPATTSLFGGTFILWRGIPIVPTDKLFVDGLKNPKSKSGKTNILLVRTGEAKRGVIGLYQTGLQNEQGRGLSVRFRGVDNKGLASYLLSLYCSAAILSEDAIAVLEDVEVGNYYDYS

SEQ ID NO: 70179 - DNA, 807 bp, Unknown
  Obtained from environmental sample
  misc_feature (1)..(807): n is a, c, g, or t
atgtcgaaaagcagtaagcttgtggaggtcgcctttaagggcgagcgtaaggcgatattcaaggacaagaacgaactcgacatcgttgagggcgagtacatcgtcgtggaggcggaacgcggtcaggatatgggcaaggcgtcgtgcgtgggctccttggtcaaactcaaacgcggaaagggcgagacccgcggcgttatccgcaaagctcaggagagcgatttagaaaccttaaagagaaatcaggaacgggagaaatccgcgttcaaagtctgccgcgacaagataaagcactacaagctcgacatgaaattggtggacgtggagatgcagttcgacggcggcaagataaccttctactttaccgcggcgcagcgcgtcgactttcgcgagctcgtaaaggatttggcctccgtatacaggacgcgtatagaactgcggcagatcggggtgagagacgaggctaagcgcatcagcgggtgcggggtatgcgggcgcaagcagtgctgcgccgcgtttttgagcgagtttgagcagataaccacgcagatggcgaaagatcagcagatcgctttgaatccgtcgaaaatatccgggaattgcgggagattgctgtgttgcttgcggtatgagaatgatatgtacacggagatattctcgaagtttccgccgatcggggcgcggataaagtacgggaataaggaggggactttgaactatatcaatatattccagaataaagggttggtgcatttcggggattcgcaggagtggttggaacaggaggatttggttaaatcggtttga

SEQ ID NO: 70180 - protein, 268 aa, Unknown
  Obtained from environmental sample
  DOMAIN (62)...(149): PSP1 C-terminal conserved region
  misc_feature (1)..(268): Xaa is any amino acid
MSKSSKLVEVAFKGERKAIFKDKNELDIVEGEYIVVEAERGQDMGKASCVGSLVKLKRGKGETRGVIRKAQESDLETLKRNQEREKSAFKVCRDKIKHYKLDMKLVDVEMQFDGGKITFYFTAAQRVDFRELVKDLASVYRTRIELRQIGVRDEAKRISGCGVCGRKQCCAAFLSEFEQITTQMAKDQQIALNPSKISGNCGRLLCCLRYENDMYTEIFSKFPPIGARIKYGNKEGTLNYINIFQNKGLVHFGDSQEWLEQEDLVKSV

SEQ ID NO: 70181 - DNA, 1116 bp, Unknown
  Obtained from environmental sample
  misc_feature (1)..(1116): n is a, c, g, or t
atgaacaaacgaaaaattctcgtgaccagcgccttaccctacgctaatggggatattcatcttgggcatcttttagaggccgtccaaacggatatatatgttcggtatcatcggcttatcggggacgaggtgctttatgtttgcgccgacgatactcatgggactcctatcgagataagcgccatgcggcagggtattactccggaagcgcttattgacaaggctaggaagaaccatatacgcgactacgccgggtacgatatcagcttcgatatttattacaccacaaattccgaagagaatcgccgctacgcggagcggatttacgagagtttgcgtcaaaacgggcttgtgtcggaaaaagaaatcaaccaatactactgcgaacacgacaagcgttttttgccggacaggttcatcgtaggcacctgcccccgttgcggggcgcataagcagtacggcgacgtttgcgaggtctgcggggccacatacgaacccaccgacatcatggacccgacatgcagcctttgcggcaatgcgccgcaattgcgctcctccacgcatatatacgtgcagctctctaaacgggaggagtttctgagggagtttgtaaataggcccggcgttttacagtccgatatgcggaactttgtgtgcacttggatagacgaggggttaaaagagtggtgcatatcgcgtgacgggccttacttcggtttcaagataccgggcaccgagaataaattcttctacgtgtggatggacgcgcccatcggctacctttcgtcgaccgatcgctactgcgccgaacgcggcttggacgttatggactattggggaagcggcggccccaccgagatcgtccactttatcggcaaggacatcgtatacttccacgctctcttctggccggtgatgctggacagcgccggattcgccgtcccgtcaagcatccgcgtccacggtttcctgaatgtggagggcgagaagatgtcaaaatcccgcggcacgttcatactcgcccgcgattacgtagagaaggtcagccacttgcaggccggggagttcctccgcttctactacggctcgaaactctccccaacagcgccgacttag

SEQ ID NO: 70182 - protein, 371 aa, Unknown
  Obtained from environmental sample
  misc_feature (1)..(371): Xaa is any amino acid
MNKRKILVTSALPYANGDIHLGHLLEAVQTDIYVRYHRLIGDEVLYVCADDTHGTPIEISAMRQGITPEALIDKARKNHIRDYAGYDISFDIYYTTNSEENRRYAERIYESLRQNGLVSEKEINQYYCEHDKRFLPDRFIVGTCPRCGAHKQYGDVCEVCGATYEPTDIMDPTCSLCGNAPQLRSSTHIYVQLSKREEFLREFVNRPGVLQSDMRNFVCTWIDEGLKEWCISRDGPYFGFKIPGTENKFFYVWMDAPIGYLSSTDRYCAERGLDVMDYWGSGGPTEIVHFIGKDIVYFHALFWPVMLDSAGFAVPSSIRVHGFLNVEGEKMSKSRGTFILARDYVEKVSHLQAGEFLRFYYGSKLSPTAPT

SEQ ID NO: 70183 - DNA, 1584 bp, Unknown
  Obtained from environmental sample
  misc_feature (1)..(1584): n is a, c, g, or t
ttggccgagctacgcactcagggacttacggatatgcttaataccgcggttgccagcggcgagcgcctcccatttctagtaacatccaacattgactgggacaggactctggcggatgaaaaacgcgcgtccaaagccgccgatcttcaaaaagctttaaaactttacggcgcggcggaatataccgttatagagaaaggcggcgtaaaggcggccattttcggcatcttaggcaaacaggccgacagttatgcgccattaagcggattgtattttaaggatcaaattgaggtttcaaaaaatatcgtcgcgaaaataaaagccgaaacttccgcggacataataatctgcctgtcgcacagcggaaccgatgataaccctcaaaaatcggaagatgaactattggcggccgctgtgccggaaattgacgtcataatcagcggtcatacgcactcaacgcttgaggaacctattattatcggcaatacaattattgtctcctgcggtgaatacactcacaatataggtcatcttaagcttactcgtaacggaaacagttattcggtatcggaatacagattgctgcatttagccggcatactgttgaaaaaccacgaggttgaggccgctatacaaaaattcaagtccttggtggataaaaattatttctcccgtttcggttacagctatgatcaggtaatttcatatacggattttgattttactccggtggagaatttcggcaaagtacagggcgaggaaactcttggcaacctgatttccgactcgtacatagcggcaattaaaaaagccgaaggcgctgattaccgcaaaattgacgtcgccgtagtccccagcggcgttgtaagaggctccttctcaaaaggtccgataaccacagccgacgcgtttaatgtcagcagtctgggtattgggccggatatgattcccggttatccattggtcaacatataccttacagggaaagaattaaaaacaatagcggaaatagacgcgtctgtttcaacgttaatgagcgaagcgcggctgtacacttcaggtttaacttatacttacaatccccgaaggcttcttcttaacagggtaacggatgtaaaattaatgaatcccgacggcagtttgtcaaaattgaaaaacaaaaaattgtaccgcgttataggcggactttattcatgccagatgctgggagccgtagaagctcattctttcgggctattaaaagttcagcccaaagacgaaaacggaaacccaatcacggactttgaaaaacatattatttataacggcgatacggaacttaaagaatgggccgcgctggcgtattatcttgaatcatttgataaatcaggcggcgtttcaaagatacctgaatactacaaccggctccacggccgcaaaattgaggtaacaagcagagcgccctgggcgatcctgaaaaaacccaacaaaatattttttatgctgttaggtgtaattattgtggtattggcgatagtttttgttccgattttctttattatcagggcgttacgccgcaggtcgcgcgcagtaaaaatcacctga

SEQ ID NO: 70184 - protein, 527 aa, Unknown
  Obtained from environmental sample
  DOMAIN (233)...(404): 5'-nucleotidase, C-terminal domain
  misc_feature (1)..(527): Xaa is any amino acid
MAELRTQGLTDMLNTAVASGERLPFLVTSNIDWDRTLADEKRASKAADLQKALKLYGAAEYTVIEKGGVKAAIFGILGKQADSYAPLSGLYFKDQIEVSKNIVAKIKAETSADIIICLSHSGTDDNPQKSEDELLAAAVPEIDVIISGHTHSTLEEPIIIGNTIIVSCGEYTHNIGHLKLTRNGNSYSVSEYRLLHLAGILLKNHEVEAAIQKFKSLVDKNYFSRFGYSYDQVISYTDFDFTPVENFGKVQGEETLGNLISDSYIAAIKKAEGADYRKIDVAVVPSGVVRGSFSKGPITTADAFNVSSLGIGPDMIPGYPLVNIYLTGKELKTIAEIDASVSTLMSEARLYTSGLTYTYNPRRLLLNRVTDVKLMNPDGSLSKLKNKKLYRVIGGLYSCQMLGAVEAHSFGLLKVQPKDENGNPITDFEKHIIYNGDTELKEWAALAYYLESFDKSGGVSKIPEYYNRLHGRKIEVTSRAPWAILKKPNKIFFMLLGVIIVVLAIVFVPIFFIIRALRRRSRAVKIT

SEQ ID NO: 70185 - DNA, 975 bp, Unknown
  Obtained from environmental sample
  misc_feature (1)..(975): n is a, c, g, or t
atgacaatacatattgcggctacaacagtactgacgacagaaggctctccggctttgttattttgcagcattttcatattatatacggctttttatttccctgatataattatcggctgtaggaatagaaaatatatgaaaataagagaatattcactgcccgcgggctggtttccgagggatccggcggaagtttccgcccaaataacgcgttttttagcaaaatcaggcggccagacccgctcttgcgccgccgcagtctccccccatgccggctggtactactcagggaggctttcctcccttgccgtctcgtcattggacagggaagcgcaaaccgtcgttgtcctcggcggtcacttgccgcccggctctcccgtgctttgcgcgatggaagacgccgccaggaccccattcggccccatgcatattgattcagaaatgcgctccgtcttacaaaaagagcttgcctgtgaggaagactgttaccgcgacaacaccgtcgaggtgcttctgcctatggttcgtttctttttcccgcaatccaagcttgtatggctgcgcctccccgcggaaacctcctcctatgacgccgggattaccatcgcgaagacggcggcaaagttaaaacgtaaaataaatgttctggcttctaccgatttaacccattacggcgtcaattacggcttttcgccgcgcggttcgggaagcgccgctttgcgctggatgcgcgaggtaaacgacgcaaactttatcaaagcggtcgagtcgggaaactcaggcgatgttcttctgcgcgccgcaggggatttttccgcctgttccgccggcgccgttttaggcgctatgggtttcgcgaaagaaacgggtctcggcggcgcgaagcttttggagtacgcgaccagcgcggatatggatgaaagcggagtgccggattcctttgtgggatacgcggcttttgtctttgacggttaa

SEQ ID NO: 70186 - protein, 324 aa, Unknown
  Obtained from environmental sample
  DOMAIN (53)...(321): Protein of unknown function DUF52
  misc_feature (1)..(324): Xaa is any amino acid
MTIHIAATTVLTTEGSPALLFCSIFILYTAFYFPDIIIGCRNRKYMKIREYSLPAGWFPRDPAEVSAQITRFLAKSGGQTRSCAAAVSPHAGWYYSGRLSSLAVSSLDREAQTVVVLGGHLPPGSPVLCAMEDAARTPFGPMHIDSEMRSVLQKELACEEDCYRDNTVEVLLPMVRFFFPQSKLVWLRLPAETSSYDAGITIAKTAAKLKRKINVLASTDLTHYGVNYGFSPRGSGSAALRWMREVNDANFIKAVESGNSGDVLLRAAGDFSACSAGAVLGAMGFAKETGLGGAKLLEYATSADMDESGVPDSFVGYAAFVFDG

SEQ ID NO: 70187 - DNA, 1365 bp, Unknown
  Obtained from environmental sample
  misc_feature (1)..(1365): n is a, c, g, or t
atgaaaatgctgcaaaataacaaagccggagagccttctgtcgtcagtactgttgtagccgcaatatgtattgtcatttatcttgtctctttggtccaggcggcggttcggttatacctgagcgtcgacaagcaaaaaatccaggccgattatgattttcaatctttgggaaatatcgtcacatcctcgggatcgcgcggatttatgaatgagccgtttattacttcgataaacagcctcctggcgtccagcaatacaattgaggcggtgatagttttcggacccagcgttgaatacgcttttgaaaaacagaggggcgcgacaattacatgggtaaacaacacgcccagaattattaataaatttaatatttacacacagggcctgtacagaacttttcctcttgacaatatgatgaatgtaagcattcaggccgctgcaagggtttttaattattccgtaatatcaaaaatattaaaagaaaccttaatcttcatattgattggatttgcccttgccttctttaccatgttattgcaattattgcttgggaaaacagaagaagccgaagaagaagaaatcaaagaatcttccccattaaaacatgaattttcgcctgttgacataagactcagcgaacctatcagcgtgcgtgttaatgagcctgttaacgtgcatattcacgaaactgtccaggcgccgccggttcacacaccacctccgcctccgccgcctgtacatgcgccgccgccgcctccgccgccggtacatacgccgccgcccgcgccaagccatgaccatgccgaacctgcgccgttctctgaagaagatttaattgatgatgcctcgggacctaagggactatattcaccgcgcagccatataggctgggaagaatacttaaacgacaggttagattcggaactgcaccgctgcgcttcaacagaaaaagatttaacgcttttaatgctggaattcaaagataaaataactaattatcaatttaaggacgcagcgcatgaagcggcttctttatttacagcaagggatctgttattcgaaaaaggcgaacagggtatttccgtaataatgcccggcgttgatcttgatacaggactcagcaaagcgcggaaatatcaggaacgcattaaagaaaaactcttcaaaagcgctatagacgattgcgcttacattgggctttcttcgcgcgcgggccgccttttgaacgcggacaggcttaaactggaagctaacgaagctcttaaaaaagcaaaagcggacagcgacacgtcaattatcgcgttcaagagcgatcttgaaaagtacagaaaatttattgcttctcaaaatcaaccgcgttcctga

SEQ ID NO: 70188 - protein, 454 aa, Unknown
  Obtained from environmental sample
  misc_feature (1)..(454): Xaa is any amino acid
MKMLQNNKAGEPSVVSTVVAAICIVIYLVSLVQAAVRLYLSVDKQKIQADYDFQSLGNIVTSSGSRGFMNEPFITSINSLLASSNTIEAVIVFGPSVEYAFEKQRGATITWVNNTPRIINKFNIYTQGLYRTFPLDNMMNVSIQAAARVFNYSVISKILKETLIFILIGFALAFFTMLLQLLLGKTEEAEEEEIKESSPLKHEFSPVDIRLSEPISVRVNEPVNVHIHETVQAPPVHTPPPPPPPVHAPPPPPPPVHTPPPAPSHDHAEPAPFSEEDLIDDASGPKGLYSPRSHIGWEEYLNDRLDSELHRCASTEKDLTLLMLEFKDKITNYQFKDAAHEAASLFTARDLLFEKGEQGISVIMPGVDLDTGLSKARKYQERIKEKLFKSAIDDCAYIGLSSRAGRLLNADRLKLEANEALKKAKADSDTSIIAFKSDLEKYRKFIASQNQPRS

SEQ ID NO: 70189 - DNA, 891 bp, Unknown
  Obtained from environmental sample
  misc_feature (1)..(891): n is a, c, g, or t
atggataaaaaagcgtcggagtttatggaagcggaaaaccttgacgtgcttttcggctcccgccccttaaatgacaaggacgcgaaagaaaaagtgaaactgggcgttttgtccctgcttaacgctaaatacggcataacggaaagggatttcgccagcgcggaaattgaatttgtccccgccttcaaagccgtggacataggttttgacagaagcatgatcggcgcttacggccacgacgaccgctgctgctccttccccgccctaaaagcccttaccgccctcgcgcacgaaaaatccgcgccggaaaagaccgttatctgctacctgtccgacaaagaagaaataggttccgccggaaacacaggcgcgcgatcttacaattttgaaaattttatctctctgttatgtgaaaacgaagcggatttacggctttgttaccaacgctgcagcatgctgtccgccgacgtaaacgccgcctttgaccccacctacgccggagtcttcgacaaaaagaattcttcatttatgggcaaggggctggtacttacaaaatacacaggttcgggcggcaagtacggggcaagcgacgccaacgcggaattctgcgccaaggttcagtctataatgaacaagaacaaagtccagtggcagttcggcgctctcgggaaagtggacaaaggcggcggcgggacaatcgcgctttacgccgccaatttgggaatggacgtccttgactgcggcgtgcccgtcctgtccatgcactcgccttttgaggttatcagcaagatcgatctttttacgacgtacaggggatatatcgcgtttttgataacgcgtagaattaagagctatacaagttataacatttcatactatactacattatag

SEQ ID NO: 70190 - protein, 296 aa, Unknown
  Obtained from environmental sample
  DOMAIN (1)...(277): Aminopeptidase I zinc metalloprotease (M18)
  misc_feature (1)..(296): Xaa is any amino acid
MDKKASEFMEAENLDVLFGSRPLNDKDAKEKVKLGVLSLLNAKYGITERDFASAEIEFVPAFKAVDIGFDRSMIGAYGHDDRCCSFPALKALTALAHEKSAPEKTVICYLSDKEEIGSAGNTGARSYNFENFISLLCENEADLRLCYQRCSMLSADVNAAFDPTYAGVFDKKNSSFMGKGLVLTKYTGSGGKYGASDANAEFCAKVQSIMNKNKVQWQFGALGKVDKGGGGTIALYAANLGMDVLDCGVPVLSMHSPFEVISKIDLFTTYRGYIAFLITRRIKSYTSYNISYYTTL

SEQ ID NO: 70191 - DNA, 528 bp, Unknown
  Obtained from environmental sample
  misc_feature (1)..(528): n is a, c, g, or t
ttgcctgatttagccttatcgggctttgccttcgcttttatttttgcagactttgcaagttttaccggctttgcttttacctttggtttcgctttttcggctttaacctttatttttgcttttaccggctttgttttttcggcctttgcctttggtttcggcttttccgttttaactttgctgacttttgcttttactgtcttcgccggttttgcaggctttttcgcttttgccggtttagcttttacagccgcgcctgtttttttcgcttcgggctttgttgcaattttcgccttcggtttcgcaatggttttgtccgcttttttcacaacagttttcacaacagacttcgtttttgccggtttctccgcatctttcccgccaatcttttcatctttgctcattgctctttgctctttgctctttgatctcttccctttccccttttccgacaatgccaccaaatattccataagattgtcaaaacgatattcggatttttcttccgcttttatcagcacttcgtaa

SEQ ID NO: 70192 - protein, 175 aa, Unknown
  Obtained from environmental sample
  SIGNAL (1)...(25)
  misc_feature (1)..(175): Xaa is any amino acid
MPDLALSGFAFAFIFADFASFTGFAFTFGFAFSALTFIFAFTGFVFSAFAFGFGFSVLTLLTFAFTVFAGFAGFFAFAGLAFTAAPVFFASGFVAIFAFGFAMVLSAFFTTVFTTDFVFAGFSASFPPIFSSLLIALCSLLFDLFPFPFSDNATKYSIRLSKRYSDFSSAFISTS

SEQ ID NO: 70193 - DNA, 2670 bp, Unknown
  Obtained from environmental sample
  misc_feature (1)..(2670): n is a, c, g, or t
ttgagctttgagggggatgaaccctgccagagccagcaggtctatacaataaccgttgcggctaacgcggcttcaatatatggcgagccgatttcaggcgaacgggtttttacttttttcaccgaaaccctgagcataaaaaaaatatcccccggcgaagaattcaaaagacaaaccaaattcaattttaacaacaacagcgtgccgcccgaagcggctaaacagattggcatggaattcaattaccccgtgcagacggcagccatcaatcagtacctcgaaatatcaaacgggaaaaccccttataattttacccttgcgcaggataacgaatataaaattacagctaacttgagcgatccggtagaatttgaaacgacggtgaccatcaccctcaagaggggggcaagatcccagaacgggagccgtggaaccgaaacggatcagaggtttacctttaaaactccgggcgctttcaaggtggacagattccgccggattgccggctatggcaaataccgcaacctggttgaaattgaatttagttatgccctgaatgaaagcgcggcgcgcgccgcgctcagtaccgaaccttccatgcccattggcaaggataatgttgaagtgtggggggacacgctgcggctttacaatctgcctgtttctttcggcgctaaattcaaggttgtggtcagcggaagtctggaagacgtgtatggcagaacattgggcaagccatggtcgggcgacgttgtagttcccgatgagccgccaccccggggcgaggcgaactttctggattacggacacgccatgctggaagctcaattcccgccgcgctttctttttgagtataaaaacattaccgaaaattcctcgtatctgttggctaaaaaaaacaatccctggaatgaatattttgacgagtccgaccgtataaatctgaccccgggtaaagtgaataataattatttcgaggaaattgatttatcgccgtatcttaatgaacagggcaggggctttgtctcttttcgggcaaatctgcagcttttgaccagtgagagacagcaggatgacacataccgtaccggtaccagagaaagaacaaatgaacttaacatacaggttaccgatctggggctgactgtgcgttacggttttaataaggctactgtattggttaccagcctttctacaggcaagcctgtggaaaatgccacagttatgctgcttcctcccgcgctggtaaaaaatggtgaagatgtttccacttttatgtcgaatcttggcgatgccaagaccgataaaaacggtctcgcggtagtgtatatcagcgcttcggcgctgcggtactttacggaaaataaccaaagttggaggagatacgatccgccctttgtgcttgccgaaaaagacggagaccgggccatatttgatccctattcgcataacaactggcgtttcggcgttcaatctgatataccccagcgagccgaggaaataacgcctcttgcctttatgttttccgaccggggcctctacaagcccggcgaggttcttaccttccggggcgttgaccgttccaaagtgctgggaatgtacaccatttaccagggggattataccgttatccttgaaggggattatcacaacgcggttactattagtactgtatcgggcgcaaccaccgaatcaggaagtttttacggcagcatcaacattcccgatgataccaatccgggatcctaccggctgatatacagacgcggcgacggcaagaccatagccaatgtgcctgtaacggtagcctattttgaacggctgaaatttcaggcgtccctttccgcaccggcggctgcaataataagcggcgatgacattaacctgaaattacaggcgacttacctttccgggggcagtctggcgggcgcttcatgggagagcgcgtggtatgatgaaatgtcggtctttcagtcaaaatcgcctgagaccaaaggctatgtattcgggccccgccgtgtctgggacagcaagcgtaacatcggctccgaaaacggggttctgggcggacagggaaccgcgactctcagccaaaaaaccggcggcggtaaaataaccggagccgcctatctttaccaggcggaagccagagtaaccgacatcagcaatcagatggtcagcgcctatcgttctgtgatggttcatcccgcgcgtttttacataggcctgtaccgggcggtcggcggttttgcgcgcaaagggcaggaattatcctacgattatattaccgttaataccgagggagaaaaaacaacgaataacgggcttttcctgcaaaccggtgaaaacgcgggacggctcaaggttgagcttatccgggaagaatggcgccgcgtccagcagcggggagtgaacggttatatttatgacgaatattcaccggagcaggtaatcgacagcgttcaaaatataccgattagaaacggcggcggctcgattaagataactccaagcggcgcggggtatcacaccctgcgggtttccgcgcaggatcgggaaggcagaacagccctgacggaactgaatttttatgtcaccggttcggggcggctactggaacatgagcaatcccagcgaattaaggcttacgccggatcaggaaatgtataa

SEQ ID NO: 70194 - protein, 889 aa, Unknown
  Obtained from environmental sample
  DOMAIN (373)...(674): Alpha-2-macroglobulin family N-terminal region
  misc_feature (1)..(889): Xaa is any amino acid
MSFEGDEPCQSQQVYTITVAANAASIYGEPISGERVFTFFTETLSIKKISPGEEFKRQTKFNFNNNSVPPEAAKQIGMEFNYPVQTAAINQYLEISNGKTPYNFTLAQDNEYKITANLSDPVEFETTVTITLKRGARSQNGSRGTETDQRFTFKTPGAFKVDRFRRIAGYGKYRNLVEIEFSYALNESAARAALSTEPSMPIGKDNVEVWGDTLRLYNLPVSFGAKFKVVVSGSLEDVYGRTLGKPWSGDVVVPDEPPPRGEANFLDYGHAMLEAQFPPRFLFEYKNITENSSYLLAKKNNPWNEYFDESDRINLTPGKVNNNYFEEIDLSPYLNEQGRGFVSFRANLQLLTSERQQDDTYRTGTRERTNELNIQVTDLGLTVRYGFNKATVLVTSLSTGKPVENATVMLLPPALVKNGEDVSTFMSNLGDAKTDKNGLAVVYISASALRYFTENNQSWRRYDPPFVLAEKDGDRAIFDPYSHNNWRFGVQSDIPQRAEEITPLAFMFSDRGLYKPGEVLTFRGVDRSKVLGMYTIYQGDYTVILEGDYHNAVTISTVSGATTESGSFYGSINIPDDTNPGSYRLIYRRGDGKTIANVPVTVAYFERLKFQASLSAPAAAIISGDDINLKLQATYLSGGSLAGASWESAWYDEMSVFQSKSPETKGYVFGPRRVWDSKRNIGSENGVLGGQGTATLSQKTGGGKITGAAYLYQAEARVTDISNQMVSAYRSVMVHPARFYIGLYRAVGGFARKGQELSYDYITVNTEGEKTTNNGLFLQTGENAGRLKVELIREEWRRVQQRGVNGYIYDEYSPEQVIDSVQNIPIRNGGGSIKITPSGAGYHTLRVSAQDREGRTALTELNFYVTGSGRLLEHEQSQRIKAYAGSGNV

SEQ ID NO: 70195 - DNA, 1746 bp, Unknown
  Obtained from environmental sample
  misc_feature (1)..(1746): n is a, c, g, or t
atggctgatcctaacaacaaattacctgatcgcggaccctctcagcccaggggaccgggtaatttagcgtttattttttttataatagcgtcagttatctttattgcctttttttacaagggcgataaagctccggttatgagcgtatcctactcggattttctccgtcttgtcgaagaaagcaagattgaatcggtcaccgtttatgacgacaaaatcttggatatttatttaaaaggctcgccgacaggcggttctcctcagcttaaaacgcgcgcccctatcctctccgatgctacgtttatcctgcagaataacggagtcaacattacaagttccccggcgaaagtaacatttatgcggataattatagacatacttccttggattatcggttttacaattatcatgattattttcagaaacatacagggcgcgggcatgaagaattttcagtttggaaagagcaaagctaagcgctatcatgacgaagggaaaaaagtaagttttgccgacgtggcggggcagaaggacgcgaaatacgagcttgaggaagtagttgaatttttaaagaacccgcagaagtttaccaagatgggagcgcgtatcccaaagggcgtgcttcttgtcggaatgcccggaacaggtaaaacattgatggcgcggtctgtcgcgggagaggcgggcgtcgcgttctttcacatgtcaggttccgactttgtggaaatgtttgtcggcgtcggagcaagtcgcgtaagagacctttttgatcagggacgcaaaagcgctccttgtataatttttatcgatgaattagacgcggtagggcgcacccgcggcgcgggctacggcggcggtcatgacgaacgcgagcagacattgaaccagctccttgtggaaatggacggctttgattcaaaagacggagttattatccttgccgcgacaaaccgccccgatgttttagaccctgcccttcttcgtcccggtcgctttgaccgccaggtgattgtcgcgatgcccgacataaaggaacgcgaggctattttacaaatccacgccgcaaaaattcctttagataaagaaattgatcttgcgcgcatcgcaagagcaacgccgggaatgagcggcgcggatatagcgaaccttgtaaacgaagcggctttgtttgccgcgcgaaaagacagacccgaagtgattatgcatgactttgaagaagccagagacaaggtgcttatgggcgtcgcgcggacaactcttgtagtttccgacaaagaacggcgtatgaccgctattcacgaggcggggcatgcgatactgcactattttcttaagaacgcagaccctctgcataaggttacgattgttccccacggacgggcgctcggcgctgcgctttctctccccgaagaagacagttacagccgctccaagggctggatagaggatcgcatcgccatctgctacggcggctggttagcggaaaatcttttttataacgagacaaccacaggaacaaagaacgacattcaacaggctaccgaaatggcgcgtaacatggtttgcgaatggggtatggcgaaagagcttggtcccattgcatacggacaggaggacgagcctattttcctcggcaaagaaatagcgcgccacaaagattattctgaggataccgcgcaaaggatagacaagtcagtcaaagaaatacttgatcgcgcaagaaacaacgcgttaaaaaataattga

SEQ ID NO: 70196 - protein, 581 aa, Unknown
  Obtained from environmental sample
  DOMAIN (206)...(340): ATPase family associated with various cellular activities (AAA)
  misc_feature (1)..(581): Xaa is any amino acid
MADPNNKLPDRGPSQPRGPGNLAFIFFIIASVIFIAFFYKGDKAPVMSVSYSDFLRLVEESKIESVTVYDDKILDIYLKGSPTGGSPQLKTRAPILSDATFILQNNGVNITSSPAKVTFMRIIIDILPWIIGFTIIMIIFRNIQGAGMKNFQFGKSKAKRYHDEGKKVSFADVAGQKDAKYELEEVVEFLKNPQKFTKMGARIPKGVLLVGMPGTGKTLMARSVAGEAGVAFFHMSGSDFVEMFVGVGASRVRDLFDQGRKSAPCIIFIDELDAVGRTRGAGYGGGHDEREQTLNQLLVEMDGFDSKDGVIILAATNRPDVLDPALLRPGRFDRQVIVAMPDIKEREAILQIHAAKIPLDKEIDLARIARATPGMSGADIANLVNEAALFAARKDRPEVIMHDFEEARDKVLMGVARTTLVVSDKERRMTAIHEAGHAILHYFLKNADPLHKVTIVPHGRALGAALSLPEEDSYSRSKGWIEDRIAICYGGWLAENLFYNETTTGTKNDIQQATEMARNMVCEWGMAKELGPIAYGQEDEPIFLGKEIARHKDYSEDTAQRIDKSVKEILDRARNNALKNN

SEQ ID NO: 70197 - DNA, 417 bp, Unknown
  Obtained from environmental sample
  misc_feature (1)..(417): n is a, c, g, or t
ttgtcggaaactacaagagttgtccgcgcgacgcccataagcaccttgtctctggcttcttcaaagtcatgcataatcacttcgggtctgtcttttcgcgcggcaaacaaagccgcttcgtttacaaggttcgctatatccgcgccgctcattcccggcgttgctcttgcgatgcgcgcaagatcaatttctttatctaaaggaatttttgcggcgtggatttgtaaaatagcctcgcgttcctttatgtcgggcatcgcgacaatcacctggcggtcaaagcgaccgggacgaagaagggcagggtctaaaacatcggggcggtttgtcgcggcaaggataataactccgtcttttgaatcaaagccgtccatttccacaaggagctggttcaatgtctgctcgcgttcgtcatga

SEQ ID NO: 70198 - protein, 138 aa, Unknown
  Obtained from environmental sample
  misc_feature (1)..(138): Xaa is any amino acid
MSETTRVVRATPISTLSLASSKSCIITSGLSFRAANKAASFTRFAISAPLIPGVALAMRARSISLSKGIFAAWICKIASRSFMSGIATITWRSKRPGRRRAGSKTSGRFVAARIITPSFESKPSISTRSWFNVCSRSS

SEQ ID NO: 70199 - DNA, 588 bp, Unknown
  Obtained from environmental sample
  misc_feature (1)..(588): n is a, c, g, or t
gtgggatatagggtaaattcaaaaaacgcaacgctttttagaatttgggctacgaatgtattaaaaaattatctgttaaaaggttatgccgttcatcaacaaattgaaaatattaaaaagttgtctgtcaatcacgaaaatcgcttaattgaagtggaaaagaaagttgatttttttgttaaatcgtctttaccgccattagaaggcatcttttatgacgggcaaattttcgatgcttacgcttttgtctgcaatttggtaaagaaagcgaaaaagtcaattattctcattgataattatgtagatgaaagcgttttgacactgctttccaagagaaatagcggagtgtcagcaacgatttacacacaccaaatctcaaagcagctacaactagaccttcaaaaacataattcgcaatatccacaaatcatagctaaaacatacacaaaagcacacgatagatttatgctaattgacgaggatacatatcacataggagcatcactgaaagatttgggaaagaaactgtttgccttttcaaaaatgcaaataaaagcgggcaatttacggatgttcgccagcgattaa

SEQ ID NO: 70200 - protein, 195 aa, Unknown
  Obtained from environmental sample
  misc_feature (1)..(195): Xaa is any amino acid
MGYRVNSKNATLFRIWATNVLKNYLLKGYAVHQQIENIKKLSVNHENRLIEVEKKVDFFVKSSLPPLEGIFYDGQIFDAYAFVCNLVKKAKKSIILIDNYVDESVLTLLSKRNSGVSATIYTHQISKQLQLDLQKHNSQYPQIIAKTYTKAHDRFMLIDEDTYHIGASLKDLGKKLFAFSKMQIKAGNLRMFASD

SEQ ID NO: 70201 - DNA, 309 bp, Unknown
  Obtained from environmental sample
  misc_feature (1)..(309): n is a, c, g, or t
atgggcaaaaaagaaaacaaaggcgaactcgtactgtatcagccagatggcacattgaaattagatgtgtatttggaggatgaaactgtttggctcacgcaggcacaaatggggcaattatttgaaaaaagcagaaccactataaccgagcatattcaacatatctttaaagaaggtgaattacaagaaaaagtggtatgtcggaatttccgacataccactcagcacggtgctattgccgaaaaaacgcagaataaggaaacaaatttttcaancttgatgctattattttcgtgggatatagggtaa

SEQ ID NO: 70202 - protein, 102 aa, Unknown
  Obtained from environmental sample
  misc_feature (1)..(102): Xaa is any amino acid
MGKKENKGELVLYQPDGTLKLDVYLEDETVWLTQAQMGQLFEKSRTTITEHIQHIFKEGELQEKVVCRNFRHTTQHGAIAEKTQNKETNFSXLMLLFSWDIG

SEQ ID NO: 70203 - DNA, 303 bp, Unknown
  Obtained from environmental sample
  misc_feature (1)..(303): n is a, c, g, or t
ttgatagaagcggcgtatttctacaataaattggttgaaaatggcgtcggttttttttccggcgtacctgattctcttttaaaagatttttgcgcgtatattaccgatcactgtgattcaaatcactatgaaaagcctaaccacattatcgctgtaaatgaaggcgccgctgtcggccttgcatgcggatatcatcttgccacaggacgcgttccgcttgtatatatgcagaattctggcataggcaacgcggttaatcccctgctctctcttccgacagcgaagtttaccgcatacctttag

SEQ ID NO: 70204 - protein, 100 aa, Unknown
  Obtained from environmental sample
  misc_feature (1)..(100): Xaa is any amino acid
MIEAAYFYNKLVENGVGFFSGVPDSLLKDFCAYITDHCDSNHYEKPNHIIAVNEGAAVGLACGYHLATGRVPLVYMQNSGIGNAVNPLLSLPTAKFTAYL

SEQ ID NO: 70205 - DNA, 813 bp, Unknown
  Obtained from environmental sample
  misc_feature (1)..(813): n is a, c, g, or t
atggaagctcattccgggctgtcagggcttataatagaaaatcttgaaattgaaaaagaagacggcttgcacagttttgacggaatgtggtcgtcaagtttaaccgattcggcaagcaaaggaaaacccgatattgaggcggttgatcttactacccgccttcaggacctggtaaatattcttgaatgtactacaaaaccgataatttatgacggcgacacaggcggattgcattttgcctttaccgtaaaaacccttgagcgtaacggcatatccgcggtaatcatagaagataaaaccgggcttaaaagaaattcgcttttcggcacagatgtaaaccaggaattatgccccattccggatttttgcgataaaataaaagccggcaaacaagcgcaggttacaaaagaatttatgattatagcgcgccttgaaagtttaatcgccggctttcccgttccccacgcgcttgaaagggcgcgcgcctttgtcgaagcgggagccgacggcattatgatacacagcaaggaaaagacaggagaggacattaaagaattttgttcgcttttccgcgccgaatatccccatgtgccgctggtgctggttccgacaacgtataacaagttcacggaaaaagaacttgccggttggggcgcgaatattgttatctacgcgaaccacatgctccgttccgcttatcccgcaatgatgaacaccgcgaaaatgatcttacaaaatgagcgctctcttgaggcggattctgtttgtatgcctattaaagaaatacttgaattaattcccggcggaaaataa

SEQ ID NO: 70206 - protein, 270 aa, Unknown
  Obtained from environmental sample
  misc_feature (1)..(270): Xaa is any amino acid
MEAHSGLSGLIIENLEIEKEDGLHSFDGMWSSSLTDSASKGKPDIEAVDLTTRLQDLVNILECTTKPIIYDGDTGGLHFAFTVKTLERNGISAVIIEDKTGLKRNSLFGTDVNQELCPIPDFCDKIKAGKQAQVTKEFMIIARLESLIAGFPVPHALERARAFVEAGADGIMIHSKEKTGEDIKEFCSLFRAEYPHVPLVLVPTTYNKFTEKELAGWGANIVIYANHMLRSAYPAMMNTAKMILQNERSLEADSVCMPIKEILELIPGGK

SEQ ID NO: 70207 - DNA, 393 bp, Unknown
  Obtained from environmental sample
  misc_feature (1)..(393): n is a, c, g, or t
atggaaaaaacagtataccttggaatgcgcggcgacattgttcatccgggaataatcaacattatccgccatggcgcgatactcggcgaattaacggtcgggttgttgactgacgccgctatagcgtcccataaacgcctgccctatttaacctatgaacagagaaaggacgttatcgaaaatgtcaaaggcgtagccagagtaatcccgcaggaagaatggagttatgtgcccaatttacggaaaataaagcccgactacattattcacggagacgactggaaaagcggccctttgcaaaaagaacgagatgaagtttacgcggttatgagggaactgggcggcgaagttatagagattccctatacacccggaataattcatcttcattaa

SEQ ID NO: 70208 - protein, 130 aa, Unknown
  Obtained from environmental sample
  DOMAIN (6)...(129): Cytidylyltransferase
  misc_feature (1)..(130): Xaa is any amino acid
MEKTVYLGMRGDIVHPGIINIIRHGAILGELTVGLLTDAAIASHKRLPYLTYEQRKDVIENVKGVARVIPQEEWSYVPNLRKIKPDYIIHGDDWKSGPLQKERDEVYAVMRELGGEVIEIPYTPGIIHLH

SEQ ID NO: 70209 - DNA, 1023 bp, Unknown
  Obtained from environmental sample
  misc_feature (1)..(1023): n is a, c, g, or t
atgaaacagaaaggattttttgatgaagccgacaggctaaagaagttaagcgagctgggtgattcattggaaaaactcaatgaacacatagaatggaatgattttcaaaggccgttaagcagagcgtttgaaaaagaagcgaaggggccgggcggacggccgccgtttgattatgtaatgatgttcaagatattaatattacaaaaaatatataacataagcgatgaccagacagaataccagataaacgacaggctgagttttcaacggtttatagggatacaattatacgacactgtacccgacgcaaaaacgatatggcattttaaggaagtattgaaagaaacggacgtactggaaaaaatatttaagatgtttacagaaaagcttgagaaaaaaggggtaataacccaaagcggaagcatagtggacgcgacatttgtagaagcgccgaaacaaaggaatacgaaagaagaaaacaaagaaataaaggaagggaaaataccaaaggaatggcagaccgaagaaaacaagcataaaattgcgcaaaaagatactgacgcgcggtggatgacaaaaaacaaagaacgtcattacgggtataaagatcatataaaaatagacaagaaatcgaaaataataatgaaatacagcgtaaccagcgcggaagtgcatgacagccaagaactgaaaaatctcatagaaaaaatgaaagatcgcagactttacggggacagcgcatatactggaaaagaagtacaaagatgtataccgaaaaaaacaatgaaccggatacacgagaaaggatacaggaaccgaccgttgacaaaaacacaagagaggaataacacggcaaaatcacggataagggcaagggttgaacacgtatttgcggcaatgaatcattttggagggatagcgatacggacgataggaatagccagggcggaaatacaaataggattattaaatttagcgtataacttgaccagatatacttatcttatggaggcaaaagcataa

SEQ ID NO: 70210 - protein, 340 aa, Unknown
  Obtained from environmental sample
  DOMAIN (140)...(329): Transposase DDE domain
  misc_feature (1)..(340): Xaa is any amino acid
MKQKGFFDEADRLKKLSELGDSLEKLNEHIEWNDFQRPLSRAFEKEAKGPGGRPPFDYVMMFKILILQKIYNISDDQTEYQINDRLSFQRFIGIQLYDTVPDAKTIWHFKEVLKETDVLEKIFKMFTEKLEKKGVITQSGSIVDATFVEAPKQRNTKEENKEIKEGKIPKEWQTEENKHKIAQKDTDARWMTKNKERHYGYKDHIKIDKKSKIIMKYSVTSAEVHDSQELKNLIEKMKDRRLYGDSAYTGKEVQRCIPKKTMNRIHEKGYRNRPLTKTQERNNTAKSRIRARVEHVFAAMNHFGGIAIRTIGIARAEIQIGLLNLAYNLTRYTYLMEAKA

SEQ ID NO: 70211 - DNA, 552 bp, Unknown; identical to SEQ ID NO: 68967
  Obtained from environmental sample
  misc_feature (1)..(552): n is a, c, g, or t

SEQ ID NO: 70212 - protein, 183 aa, Unknown; identical to SEQ ID NO: 68968
  Obtained from environmental sample
  misc_feature (1)..(183): Xaa is any amino acid

SEQ ID NO: 70213 - DNA, 387 bp, Unknown
  Obtained from environmental sample
  misc_feature (1)..(387): n is a, c, g, or t
gtgctttacaacctttcggccttcttcgcacacgcggcgtcgctccgtcaggctttcgcccattgcggaatattcttagctgctgcctcccgtaggagtctgggccgtatctcagtcccagtgtggccgttcaccctctcaggccggctacccatcatcgccttggtaggcccttaccttaccaaccagctaatggaacgcgggcccgtcttggggcggggccaaagcccctttctttgcctcgccacagcaaggcaacattattcggtattacccgctatttctagcgactatccccatccccaaggtaggtcacccacgcgttactcaccagtccgccgctctagggcgcattgctgcgccttgccgctcgacttgcatgcttaa

SEQ ID NO: 70214 - protein, 128 aa, Unknown
  Obtained from environmental sample
  misc_feature (1)..(128): Xaa is any amino acid
MLYNLSAFFAHAASLRQAFAHCGIFLAAASRRSLGRISVPVWPFTLSGRLPIIALVGPYLTNQLMERGPVLGRGQSPFLCLATARQHYSVLPAISSDYPHPQGRSPTRYSPVRRSRAHCCALPLDLHA

SEQ ID NO: 70215 - DNA, 429 bp, Unknown
  Obtained from environmental sample
  misc_feature (1)..(429): n is a, c, g, or t
gtgcaccgcctggggagtatgcccgcaagggtgaaactcaaaggaattgacgggggcccgcacaagcggtggagcatgtggtttaattcgatgatacgcgaggaaccttacctgggtttgacatggggggggatggtgcagagatgtaccagccgggcaaccggcccctctgcaggtgctgcatggctgtcgtcagctcgtgccgtgaggtgttgggttaagtcccgcaacgagcgcaacccctactgccagttactagcagataatgctgaggactctggcggaactgccggtgacaaaccggaggaaggtggggatgacgtcaagtcatcatggcccttatgtccagggctacacacgtgctacaatggctggtacagagtgaagcgaagccgcgaggcaagagcgaaacacgaaagccagccgtag

SEQ ID NO: 70216 - protein, 142 aa, Unknown
  Obtained from environmental sample
  misc_feature (1)..(142): Xaa is any amino acid
MHRLGSMPARVKLKGIDGGPHKRWSMWFNSMIREEPYLGLTWGGMVQRCTSRATGPSAGAAWLSSARAVRCWVKSRNERNPYCQLLADNAEDSGGTAGDKPEEGGDDVKSSWPLCPGLHTCYNGWYRVKRSREARAKHESQP

SEQ ID NO: 70217 - DNA, 303 bp, Unknown
  Obtained from environmental sample
  misc_feature (1)..(303): n is a, c, g, or t
gtgccaaaccttcccgtcgatgtggactcttggggaagatcagcctgttatccccggagtaccttttatccgttaagtgacggcgcttccactcgctgccgccagatcactaagacctactttcgtacctgctcggcctgtcagcctcgcagtcaagcctccttgtgcctttacactcatgcgctgatttccaaccagcgcgaggagaccttcgcgcacctccgttactcttttggaggcgaccgccccagtcaaaccgcctgcctatcactgtccccaacccggattcacgggtcgggttag

SEQ ID NO: 70218 - protein, 100 aa, Unknown
  Obtained from environmental sample
  misc_feature (1)..(100): Xaa is any amino acid
MPNLPVDVDSWGRSACYPRSTFYPLSDGASTRCRQITKTYFRTCSACQPRSQASLCLYTHALISNQREETFAHLRYSFGGDRPSQTACLSLSPTRIHGSG

SEQ ID NO: 70219 - DNA, 438 bp, Unknown
  Obtained from environmental sample
  misc_feature (1)..(438): n is a, c, g, or t
atgcttagacctccaacctatcaaccaggtagtcttcctggtacctttaggggggttgaacccccagggatggtttatcttgaggagggcttcccgcttagatgccttcagcggttatcccgtcccgacgtagctacccggcacttgcccctggcgggacaaccggtacaccagcggtcggtccatttcggtcctctcgtactaaaaacagctcctctcaaccatccaacgcccatggcagatagggaccgaactgtctcgcgacgttctgaacccagctcacgtaccgctttaattggcgaacagccaaacccttgggacctgcttcagccccaggatgcgatgagccgacatcgaggtgccaaaccttcccgtcgatgtggactcttggggaagatcagcctgttatccccggagtaccttttatccgttaagtga

SEQ ID NO: 70220 - protein, 145 aa, Unknown
  Obtained from environmental sample
  misc_feature (1)..(145): Xaa is any amino acid
MLRPPTYQPGSLPGTFRGVEPPGMVYLEEGFPLRCLQRLSRPDVATRHLPLAGQPVHQRSVHFGPLVLKTAPLNHPTPMADRDRTVSRRSEPSSRTALIGEQPNPWDLLQPQDAMSRHRGAKPSRRCGLLGKISLLSPEYLLSVK

SEQ ID NO: 70221 - DNA, 1482 bp, Unknown
  Obtained from environmental sample
  misc_feature (1)..(1482): n is a, c, g, or t
atgtttaagccatcgttggaagaagcgaaacgcgcagcctcaatgggacaatacaatgtaataccggtcagtacggaaatgtacgccgatatggtaacgcctgttgacgtaataaaaaaattgaagaaggcaagcgggcattgctttatgcttgaaagcgcggaggataccaagaattggggccgctacactttcctgggctttgatcccacaatggaaatcacctgcctgaacggggagatgagcgtcaattccaataaacctgcagaaacaaaaacgtttaaaacagataaccccaacaaatacattcaggaaattcttgaccgccataaaagcgtaaagttcgactttctgcctcccttcacaggcgggcttgtcggctactttgcctacgattacgcgaaatactgcgaaccctcgctcaaacttgacgccgttgacgaggagcgttttaacgacgtcgatctcatgctctttgacaaggtaatcgcctttgacaattaccggcaaaaagtaattttaatcgccaacataaacgcgcaaaacattgagagcgaatacgagaagggaaaatcgcagttagaaagcctaaaaaaccttatcaaaaacggacagcatgaaaaaactcccaaggccctcgtaaagtctgaattcaaagcgttattttccaaagatgaatactgtaagatggtgaacaaggcgaaggctcacataaaagaaggcgatatttttcaggttgtgttatccaatcggtatgaagcggattttgagggcagtatttttaacacgtaccgagtattacgtacaattaacccttcgccgtatatgttttatttcagcggaagtaatcttgaaatcgcgggcgcatcaccagaaactctagtaaaattgcataatggaagattgtttacttttccgcttgcgggaacgcgacgcaggggcacgaatgaagaagaagacatcgcgcttgaaaaggaacttcttgcggacgaaaaagaacttgctgaacacaatatgttggtagacctcggcagaaatgatttaggcagaatcagtaactttggatcggttgtcgtggaaaagcacatgtctatcctgcgcttttctcatgttatgcacattggttctaccgtaacttcgcaaatccgcgaaggcaaaaccggattggacgcgataaactccgttcttcccgccggaacactttcgggcgctccaaaaattcgcgcgatgcacattatcaacgaacaggaaaaaaacaaacgcggtatttacggcggggcgattggatatcttgacttcacgggaaatatggacacctgcatagcgattagaattgtgtacagaaaaaaaggcaaagtgttcatccgatgcggggcgggaattgtcgcggacagcaatcctgaatccgagtatcaggaatgtgtaaacaaatcgaaggcggcgcaaaacgcgcttatgcaatcgtcgggagggatagactga

SEQ ID NO: 70222 - protein, 493 aa, Unknown
  Obtained from environmental sample
  DOMAIN (23)...(174): Anthranilate synthase component I, N terminal region
  misc_feature (1)..(493): Xaa is any amino acid
MFKPSLEEAKRAASMGQYNVIPVSTEMYADMVTPVDVIKKLKKASGHCFMLESAEDTKNWGRYTFLGFDPTMEITCLNGEMSVNSNKPAETKTFKTDNPNKYIQEILDRHKSVKFDFLPPFTGGLVGYFAYDYAKYCEPSLKLDAVDEERFNDVDLMLFDKVIAFDNYRQKVILIANINAQNIESEYEKGKSQLESLKNLIKNGQHEKTPKALVKSEFKALFSKDEYCKMVNKAKAHIKEGDIFQVVLSNRYEADFEGSIFNTYRVLRTINPSPYMFYFSGSNLEIAGASPETLVKLHNGRLFTFPLAGTRRRGTNEEEDIALEKELLADEKELAEHNMLVDLGRNDLGRISNFGSVVVEKHMSILRFSHVMHIGSTVTSQIREGKTGLDAINSVLPAGTLSGAPKIRAMHIINEQEKNKRGIYGGAIGYLDFTGNMDTCIAIRIVYRKKGKVFIRCGAGIVADSNPESEYQECVNKSKAAQNALMQSSGGID

SEQ ID NO: 70223 - DNA, 714 bp, Unknown
  Obtained from environmental sample
  misc_feature (1)..(714): n is a, c, g, or t
atgtgtaaacaaatcgaaggcggcgcaaaacgcgcttatgcaatcgtcgggagggatagactgatgatactcttaatcgacaattacgacagtttttcctataacctgtaccagtgcataggttcaattgatcccgacattaaagttgtgcgtaacgatgaaatcaccgtggacgaaataaaaaaactctctccttcccgcattgtaatctctcccggtccgggcaaaccgtccgacgcgggcatttgtatcgaagtaataagaaccctttgctccatgtcgccgattatcggcatctgtctcggtcatcaggcaattttcgaagcctttggcggaaccgtctcctacgcaagccgccttatgcacggtaagtcgtcggaagtaacggttgacacaaacaaccccctgttcaaaggattgccgcagaaaatacaggcggcgcggtatcattcactggcgggaattaaatcgacattaccggatgttctgcgtgttatagccgaaacagccgacggtgaaattatgggggtgtgccataaagagtaccccatatatggcgtacaattccaccctgagtcaatccttacgccggaagggaagacgataattaacaattttatgaatggtaaaatttcttcaaaatgcttttttatatccgccgccgtttgctctatattctgtccttgcgctgtaaaatcgctccaactgcggtag

SEQ ID NO: 70224 - protein, 237 aa, Unknown
  Obtained from environmental sample
  DOMAIN (22)...(192): Peptidase C26
  misc_feature (1)..(237): Xaa is any amino acid
MCKQIEGGAKRAYAIVGRDRLMILLIDNYDSFSYNLYQCIGSIDPDIKVVRNDEITVDEIKKLSPSRIVISPGPGKPSDAGICIEVIRTLCSMSPIIGICLGHQAIFEAFGGTVSYASRLMHGKSSEVTVDTNNPLFKGLPQKIQAARYHSLAGIKSTLPDVLRVIAETADGEIMGVCHKEYPIYGVQFHPESILTPEGKTIINNFMNGKISSKCFFISAAVCSIFCPCAVKSLQLR

SEQ ID NO: 70225 - DNA, 1065 bp, Unknown
  Obtained from environmental sample
  misc_feature (1)..(1065): n is a, c, g, or t
atggcgagcttcgtactgtacagccgtgttaaaagccagaactcgcgcgaaattgtcgtcatatccagaacaggcgaaaataattacgaaaaccttgaaaaacattcggacgcgaaattgattattaacactacgcctgtgggaatgtacccgaacaacggcgtttccccgatccccgatcttaaaattttcaataagtgtaaatgtataatcgatcttatttacaaccccgccagaacggaattgctggcgctggcgcaggatgccgggattcccgcttttaacggactgccaatgcttgtagcacaggcaaaaaaagccgcggaatattttacggatacggacatagcgaatgaggaaatcgaaaaaatcaattcaatgattgcccgccaatccctgaacatcgtcctgatcggcatgcccggctgcggcaaaaccagcgtgggaaacgccctcgcaaaaaaaatgaggcgggaatttatcgacaccgacaaacttataacacaagcagccggcaaacctataccggaaatattcgcggataacagcggaagtacaacaggcgaagaaaagttcagaacgctggaaacaagtattttgcgggacatatgcaaacagagcggaaagataatcgccacaggcggcggcgttgtaacgagggaagtgaaccgccatataatcaggcagaacggcattgttgtttttcgggaaagggacatttccctcttatcggttaaaggccgccctgtttcccagcgcgacggtatcgaagcgcttgccgcggcgcgtctgccgctctaccgcagttggagcgattttacagcgcaaggacagaatatagagcaaacggcggcggatataaaaaagcattttgaagaaattttaccattcataaaattgttaattatcgtcttcccttccggcgtaaggattgactcagggtggaattgtacgccatatatggggtactctttatggcacacccccataatttcaccgtcggctgtttcggctataacacgcagaacatccggtaatgtcgatttaattcccgccagtgaatga

SEQ ID NO: 70226 - protein, 354 aa, Unknown
  Obtained from environmental sample
  DOMAIN (141)...(299): Shikimate kinase
  misc_feature (1)..(354): Xaa is any amino acid
MASFVLYSRVKSQNSREIVVISRTGENNYENLEKHSDAKLIINTTPVGMYPNNGVSPIPDLKIFNKCKCIIDLIYNPARTELLALAQDAGIPAFNGLPMLVAQAKKAAEYFTDTDIANEEIEKINSMIARQSLNIVLIGMPGCGKTSVGNALAKKMRREFIDTDKLITQAAGKPIPEIFADNSGSTTGEEKFRTLETSILRDICKQSGKIIATGGGVVTREVNRHIIRQNGIVVFRERDISLLSVKGRPVSQRDGIEALAAARLPLYRSWSDFTAQGQNIEQTAADIKKHFEEILPFIKLLIIVFPSGVRIDSGWNCTPYMGYSLWHTPIISPSAVSAITRRTSGNVDLIPASE

SEQ ID NO: 70227 - DNA, 1065 bp, Unknown
  Obtained from environmental sample
  misc_feature (1)..(1065): n is a, c, g, or t
atgaaagaattacagccacatttaaatcaagaagataaaatactaatggaaaagttgttaatggccggacacattcagcataaatatgcggttcgtttgcaaaccatattgcttagggcaaaaggcaaagggactggagagatagcagagtttctgggaatacatcaatctacagtgggtttatatatcaaccggtataatgattatggcattgattcattattacatgacaaaactcgcaagcctggtaaagaagcaataagccaagaaataaagaatgaaatatgccgcctggtgtgcaatgaaaagccaaaaggcgaaacccattggagttgccgtacattggcaaaacgggtaggaatagggcgaacgtcagtcagccggatattgcaggaacttaatctgcaaccgcatagagtaacaaagcgaaattacagcaatgacccggattttgaagcgaagatgaaagatgtagtaggtttatatctaaaaccgcctcaaaacgcgataatattgtgtgtagatgagaaaacacagatacaagcgctggaaagaagccagccgatactgccaataatccggaatgtgcctgaacggcaaagcgtagattatatccggcacgggacaaccaccctttttgcggcattggatgtactgagtgggaacgtaataggagaatgcaaagcgacgcatagtagcgaggactttgtattgtttttgaagaaagtagacaaggcctgtgctaaaggcaaagtgcttcatattgtagcggataatctgtccgcgcataaaacaaaaactgtttatagttattttgatacggtaccgggaagatttgtactgcattttattccgacacattcatcatggttaaatttagtggaacgttggtttgcagaaataacaaacaaacagatacggaggggaagctttgaatctgttccgcaattaataaaaacaataaaggaatatatcagggtatggaataaatcaggccgttcatttgtatggacaaaaaaacctaacgaaattcttaagaaaataaataaggcccaatcattttga

SEQ ID NO: 70228 - protein, 354 aa, Unknown
  Obtained from environmental sample
  DOMAIN (192)...(346): Integrase core domain
  misc_feature (1)..(354): Xaa is any amino acid
MKELQPHLNQEDKILMEKLLMAGHIQHKYAVRLQTILLRAKGKGTGEIAEFLGIHQSTVGLYINRYNDYGIDSLLHDKTRKPGKEAISQEIKNEICRLVCNEKPKGETHWSCRTLAKRVGIGRTSVSRILQELNLQPHRVTKRNYSNDPDFEAKMKDVVGLYLKPPQNAIILCVDEKTQIQALERSQPILPIIRNVPERQSVDYIRHGTTTLFAALDVLSGNVIGECKATHSSEDFVLFLKKVDKACAKGKVLHIVADNLSAHKTKTVYSYFDTVPGRFVLHFIPTHSSWLNLVERWFAEITNKQIRRGSFESVPQLIKTIKEYIRVWNKSGRSFVWTKKPNEILKKINKAQSF

SEQ ID NO: 70229 - DNA, 807 bp, Unknown
  Obtained from environmental sample
  misc_feature (1)..(807): n is a, c, g, or t
ttgaaatttgttttggacagaacactaggcggaattcctgtaattgaaattaccgcgacagaacagtatacgggaacagtggtatggtcgcctcttgatgatgtatttaagaattcaacggtatattttgcgactattacacttactcccaaaaatggctatactctgcaaggcgtatcaaagaacttcttcacagttccgggcgcaaactcagtaagcaatgacgaaaattccggcgtaataaccgccatattcccaagaacagccggaacagttgataaccccgctgttattgacataaaagccattgaagacatagccccgaaaagcggagaagttccgaaaacggcaatcaccccgacggcgcaatacaccggggctatttcatggtcgcctaatgacaatccctttagagccgatataacttacacggcaactctcactcttacgccaagaaccggttttacatttaacggagtgtcggccgacttctttacggttacgggcgcaaatattattaatgaagcgaattccaatgttctgacagcgactttttatccggtaccggttaccggtgtatccattatccagaatacgcttaccttaaatgtaggcggtacgataaccattaccgctgtgattacgccctctaacgcaagtaacaaaaatctgacttggtcttccggaaataataatgtggcaactgttacaaacggcacagtaacagccgttgccttaggttctgcgactattaccgtaaccacagaagacggcagaaaaacggcggaatgtattgttacngnttaa

SEQ ID NO: 70230 - protein, 268 aa, Unknown
  Obtained from environmental sample
  DOMAIN (189)...(266): Bacterial Ig-like domain (group 2)
  misc_feature (1)..(268): Xaa is any amino acid
MKFVLDRTLGGIPVIEITATEQYTGTVVWSPLDDVFKNSTVYFATITLTPKNGYTLQGVSKNFFTVPGANSVSNDENSGVITAIFPRTAGTVDNPAVIDIKAIEDIAPKSGEVPKTAITPTAQYTGAISWSPNDNPFRADITYTATLTLTPRTGFTFNGVSADFFTVTGANIINEANSNVLTATFYPVPVTGVSIIQNTLTLNVGGTITITAVITPSNASNKNLTWSSGNNNVATVTNGTVTAVALGSATITVTTEDGRKTAECIVTX

SEQ ID NO: 70231 - DNA, 741 bp, Unknown
  Obtained from environmental sample
  misc_feature (1)..(741): n is a, c, g, or t
atggcgagacggaacggctattttaatcggctttctatagacggctcggtttccgtgggagctttggcccgtgatctagggttttctgaggtaacaatccggggagatttgcgggaactagaggagaagggctggatcaaccgaagctggggcggagccgcgccggttcttcaccgggatattcttgaacggcagcgggcgttttcagcgcagaaaaacactattgcaaaagccgcggcagaactagtcaaagaaggggatgtaataatgatcgaggcgggaactacaacagctcttatagcccgctacctgacagggaagcgggaaatacacatagttaccaattccaccctggttttctcatacgcccggatgaacccgaatttgcagatcaccatgatcggcggagaattccgcagacccaccgaatccctggtagggccgattgccctggaaacaatcgggcggctcaatgtgcggctggcctttgtgggaaccgatggtttttcccttgaacatgggatgacaacccatcttatggaaggagcagaaattgtcaaggcaatgaaagctcacgcgcaaacaacgatactggtagcggattccagcaaatacggtaaaattggttttaccagtgtactgcctctttcagaaatgaatctcatccttaccgatgagaatttagatgactcagcggaaacggaactgagggaagcgggaattatagtcagaaagctatag

SEQ ID NO: 70232 - protein, 246 aa, Unknown
  Obtained from environmental sample
  DOMAIN (3)...(59): DeoR-like helix-turn-helix domain
  misc_feature (1)..(246): Xaa is any amino acid
MARRNGYFNRLSIDGSVSVGALARDLGFSEVTIRGDLRELEEKGWINRSWGGAAPVLHRDILERQRAFSAQKNTIAKAAAELVKEGDVIMIEAGTTTALIARYLTGKREIHIVTNSTLVFSYARMNPNLQITMIGGEFRRPTESLVGPIALETIGRLNVRLAFVGTDGFSLEHGMTTHLMEGAEIVKAMKAHAQTTILVADSSKYGKIGFTSVLPLSEMNLILTDENLDDSAETELREAGIIVRKL

SEQ ID NO: 70233 - DNA, 1401 bp, Unknown
  Obtained from environmental sample
  misc_feature (1)..(1401): n is a, c, g, or t
atggcgcatatcctgattatgccccggcaggggaatacggttgagtcctgtattattacggactggaaggtgaaggaaggagacgcggtaaaggcggagaccgcagtctgcgaagtggagaccgacaaggcttcctttgaggttccagccggagctaacggtattgtgttaaaaatcctctataaagcgggggacgatgtgccggtgttgcagcccatcgcggttgtcggcgctgcgggcgaggactggcagtctgccattggcgctacgggcggggcagttcccgatgcagggagcaaggagcagggaacagggaacagggaacagggaacagggactagcttacaaataacacccccagtccccagtccccaaggcggctctaccgctcccatttccccgcgcgcgcgcaatctcgccgaaaaggaagcgttgccggttgccggcttgaatggaagcggcccgggaggcaggatcatcgaacgggatgtcaaagccgctctggaaacacagcccgctttaacggcggcggcaaaagcagcgggaggggcgcttcccgacgcaggttccggcataggcgggaggatcactgccgctgaccgcgcggaagaccacggatctttcggacagccgtcccgactcccattctccaatgaaggcgcgattactgaaacgccgatcaagggtatccgcaaagttatctccgaaaaaatgcataaatccctggcggaaagcgcacagtttacacttaacgcttcagcttcagctgcaaaacttcaggagatccgttccagaatgaaagcgtcagaaggcttttgcggggaaatcggcctgggtaaaataaccgtgaatgatcttgtcctttttgcggtgtccaggctcctgccgcgtttcccctttatgaacgcccacaaaacaggcgataccataaaaacttttgaacgggcgcacctgggacacgcggtggatactcccaagggacttatggttcccgttatacgcaatgcaaaccttctttccctggcgcagatttccgccgaagcaaagcggctggcgtcggcctgccagagcggctctgcgaaaccggatgagctttccggttcctctttcacggtaaccaatctgggcagtctgggcattaccggttttacgccggtgttgaacacgcccgaagtcgccattctcggggtctgcggcatagagatgaaacctgtcgccatccctaaagcagaggcgaataattgcgagtgcgcctgtaattgcggcttccgtcttgaaccgcatataggcttcagcctgaccattaatcaccaggtagtagacggcgctccggcggcgcgtttcctcaaagccctctgcgaggcaattgcggatattgacctgcttttggcggcaggttaa

SEQ ID NO: 70234 - protein, 466 aa, Unknown
  Obtained from environmental sample
  DOMAIN (132)...(168): e3 binding domain
  misc_feature (1)..(466): Xaa is any amino acid
MAHILIMPRQGNTVESCIITDWKVKEGDAVKAETAVCEVETDKASFEVPAGANGIVLKILYKAGDDVPVLQPIAVVGAAGEDWQSAIGATGGAVPDAGSKEQGTGNREQGTGTSLQITPPVPSPQGGSTAPISPRARNLAEKEALPVAGLNGSGPGGRIIERDVKAALETQPALTAAAKAAGGALPDAGSGIGGRITAADRAEDHGSFGQPSRLPFSNEGAITETPIKGIRKVISEKMHKSLAESAQFTLNASASAAKLQEIRSRMKASEGFCGEIGLGKITVNDLVLFAVSRLLPRFPFMNAHKTGDTIKTFERAHLGHAVDTPKGLMVPVIRNANLLSLAQISAEAKRLASACQSGSAKPDELSGSSFTVTNLGSLGITGFTPVLNTPEVAILGVCGIEMKPVAIPKAEANNCECACNCGFRLEPHIGFSLTINHQVVDGAPAARFLKALCEAIADIDLLLAAG

SEQ ID NO: 70235 - DNA, 1452 bp, Unknown
  Obtained from environmental sample
  misc_feature (1)..(1452): n is a, c, g, or t
ttgcggatattgacctgcttttggcggcaggttaaaagggggagcgctatgtacgataccataatcatcggcggaggacctgcgggctatctcgcggcggaacgtcttgggcatgaaaaaaagaaagtcttaataattgaggaacagcatctgggcggaacctgcctgaacaggggctgcattcccactaaaacactgctcaactcggcgaagcagtttgtccatgccaaagaggctgaaaaattcggcgtgaaagtacagggtgtttcctttgactgggcggcgattcaaaactggaaaaccgaagtggtcgccaaattgcgcggcggaatagaaagccagatgaaacgtttcggtgtagaaacggtgaatggcaggggtgaaattatcgcgccgccttcgggtgaaaagccggtaaaagtgaaatcaattatgtctgacggaaagacagcggaacacgagggaaaaaccctgctggtctgcgccggttctgtttcggcgcttccccccataccgggcacgaagaataatcccctggtagtggattctaccgccctgctggatatagaaaatgtccccaaacggcttgccgttatcggcggcggggttatcggggttgaatttgccgggcttttttccgctttgggctgccaggtcacagttatcgaaatgatggacgagatggtaccttttatgaacagggaacaagcccccattctccgccgcgccatgaaagaggttaatttcaagctcggatgcaaagttgaaaaaattgacggcgcaaccgtgcattacacgacaaaagaaagtaaacctgaacaacaggaagctgatttggttctgatggctgttggacggcggcctgttctggatacatggggagcgcaggcggcaggtattgataccagtccccgcggagtggctgtggatgaccgtatgcgtaccaacattccccgcgtttgggccgccggagacgtaaccggcaaaagcctgcttgcccattccgcctaccgtatgggagaagtcgcggtagctgatattctttcaacactggatgccggagccgccaataaaaacaaccgtatgcgttataacgccataccctgggctgtttacggaattaccgaagctgccggtgtcggcatcaacgaacaggaggccgaggcaaaaggaatcgcgatactcaaggcgagcctgccgatgaaattatcgggtcgctttgccgcggaaaacactttttcgggagcgggggcggtcaaagttatcgccggcgcagcagaccgccgcattctgggcatacacgcggtcggcgcgtattcgccggaatttatctggggcggcgccgctcttatcgaacaggaattccgcattgacgaagttaagcagcttatttttccccatcccacggtgagtgaactcatacgtgacgcggtgtggagcattggagaatag

SEQ ID NO: 70236 - protein, 483 aa, Unknown
  Obtained from environmental sample
  DOMAIN (19)...(341): Glucose inhibited division protein A
  misc_feature (1)..(483): Xaa is any amino acid
MRILTCFWRQVKRGSAMYDTIIIGGGPAGYLAAERLGHEKKKVLIIEEQHLGGTCLNRGCIPTKTLLNSAKQFVHAKEAEKFGVKVQGVSFDWAAIQNWKTEVVAKLRGGIESQMKRFGVETVNGRGEIIAPPSGEKPVKVKSIMSDGKTAEHEGKTLLVCAGSVSALPPIPGTKNNPLVVDSTALLDIENVPKRLAVIGGGVIGVEFAGLFSALGCQVTVIEMMDEMVPFMNREQAPILRRAMKEVNFKLGCKVEKIDGATVHYTTKESKPEQQEADLVLMAVGRRPVLDTWGAQAAGIDTSPRGVAVDDRMRTNIPRVWAAGDVTGKSLLAHSAYRMGEVAVADILSTLDAGAANKNNRMRYNAIPWAVYGITEAAGVGINEQEAEAKGIAILKASLPMKLSGRFAAENTFSGAGAVKVIAGAADRRILGIHAVGAYSPEFIWGGAALIEQEFRIDEVKQLIFPHPTVSELIRDAVWSIGE

SEQ ID NO: 70237 - DNA, 1575 bp, Unknown
  Obtained from environmental sample
  misc_feature (1)..(1575): n is a, c, g, or t
atgaaatttaataattttgataaaacaggctcgtataaaaaacttgccgaatacgcgaaaacaggctttgttttaagggacaagcttgatgcaaaaagggtaggggagtgcgtcgttcctatggcggcaggtcttgcatattcatgggcggctaaagccgcggacgctcaaaccgtaaaattattgcaggaactcgccgacgagcaggaacttatcgtaaaatacaaagcccttcttgacggggaaatgatgaacacgggcgaaaaacgcaaagtgcttcaccatctgtcgcgcggtcagcagggacagcccgttgttgaaaacggaaaagatataggcgaattctaccgcaaagaactggacaggttctgcgatttcgcgtccgcagtgcatggcggcaaatacaaaggttccacaggcaaggattttaccactgtagtgcagattggcataggcggctcggacttagggccgcgcgccatgtaccttgcccttgataactgggctttaaaagaaggcaaaaagaagcttaacgcgaaatttatctccaatgtggatccggacgacgcttccgcggtaatagagtcatgcaatcttgaacagtgcctgtttattcttgtatccaagagcggcaccactcaggaaacccttgccaacgaactttttgtaaaagacaaactgaaaaaagcgaatcttgatccgagcaaacagatgatcgccgttacaagcgagacaagccctcttgcgcgtaacagcgcgtatcttgactctttttacatagacgactatgtcggcggccgttattcgtcgtcatcggcggtgggcggctgcgtgctgtccctcgcgttcggcccggaaacattcagggaattcctcgccggagccgccgaagcggacaaactggcgctggagaaagacgttcttaaaaacgccgcccttcttgacgcgctaatcggcgtttgggagcggaactttttacagtttccgtatacggcggttttgccttacagtcaggcgctctcaagatttccggcgcacttacagcagatggacatggaatcaaacggaaagcgcgtaaaccgcgacgggcagcccgtcgattacagcaccggccccattatttttggggagccgggaacaaacggccaacattcgttttaccagcttcttcatcaggggacgggcattgtcccgcttcaatttatagggtttttcgaaagccagaggggggatgacgtaaacgtggacggttccgtaagccatacgaagttaaaggctaatcttgccgcccaaattgtggctttcgcgaaaggacaggacagcgccgacggaaacaaagaattcaaaggggagcgcccctcaagtttaatttacggaaaacgtttaacacccgccgtattgggaagtttgcttgcccattatgaaaataaggttatgtttcagggatttgtctggaaccttaacagctttgatcaggaaggcgtgcagctgggaaaaatcctgacaaagaaagtgctttcaggcagctacggcgacggcgcccttgaggcgtacagcaaactgttaggcgtatag

SEQ ID NO: 70238 - protein, 524 aa, Unknown
  Obtained from environmental sample
  DOMAIN (51)...(522): Phosphoglucose isomerase
  misc_feature (1)..(524): Xaa is any amino acid
MKFNNFDKTGSYKKLAEYAKTGFVLRDKLDAKRVGECVVPMAAGLAYSWAAKAADAQTVKLLQELADEQELIVKYKALLDGEMMNTGEKRKVLHHLSRGQQGQPVVENGKDIGEFYRKELDRFCDFASAVHGGKYKGSTGKDFTTVVQIGIGGSDLGPRAMYLALDNWALKEGKKKLNAKFISNVDPDDASAVIESCNLEQCLFILVSKSGTTQETLANELFVKDKLKKANLDPSKQMIAVTSETSPLARNSAYLDSFYIDDYVGGRYSSSSAVGGCVLSLAFGPETFREFLAGAAEADKLALEKDVLKNAALLDALIGVWERNFLQFPYTAVLPYSQALSRFPAHLQQMDMESNGKRVNRDGQPVDYSTGPIIFGEPGTNGQHSFYQLLHQGTGIVPLQFIGFFESQRGDDVNVDGSVSHTKLKANLAAQIVAFAKGQDSADGNKEFKGERPSSLIYGKRLTPAVLGSLLAHYENKVMFQGFVWNLNSFDQEGVQLGKILTKKVLSGSYGDGALEAYSKLLGV

SEQ ID NO: 70239 - DNA, 1395 bp, Unknown
  Obtained from environmental sample
  misc_feature (1)..(1395): n is a, c, g, or t
atgaataaggataaactaaaaatatgttatatcggaggcggctcaaggaactgggcatgggtattcatgcaggatcttgcatttgagaaagaaatacgcggaaaaatagagttatacgatctagtattcaaggacgcgcattctaacgaaataatcggcaacaggcttatggaaaaatacaacaagggcggatgggaatttcacgcaaaccactcgctgcacgacgcgctggaaggcagcgatatcgtcattatatccatactgcccggcgatttagagaagatgtcagtagatgttcacgccccggaaaaatacggcatttatcaatccgttggggacacggtgggagcgggcggaatcatgcgcgccctcaggactattcctcaatttatttattttgcgcaggagataaaaaaatacgctcccgccgcgtgggtaatcaattacacaaacccaatgagcatttgcacccgtacattgtacaaagagtttccaaaaataaaagctttcggctgctgccacgaggtttttcacactcaaaagcttcttgccacggttttggaagaagcgggtcacgctccgccgaacacaattaaaagggaagaaataaaagtaaatgttttaggcattaatcattttacatggattgacaaagcgtattggaaagacacagacatattccccatatatgaagaatttgtaaaaaaatactccttaacaggttttaaaaaaataaatacttccgattcaaaccttagcggcgacgaacttgaacgtcaaaaatattttggttcaacagaccgcgtaaaaatggatctattccgccgtttcgggcttattgccgccgccggcgacaggcacctcgccgaattctgcccccattcatggtatttgtcttcgccccaggccgctgaacgctgggggtttgcccttactcccgtttcatggcgtattaaagaccgtgagaaattaattcaaaaagcaaaagcttacagcgacggaatagaagaaatgattcctgcggaatcgggagaagaaggcataaaaattatcaaagcgttaattggtttgggagacattaccacaaacgtaaatcttccgaataacggacagatgcccgatcttccaaaaggcgttatagttgaaacaaacgcaggtttcaagctggacaatattgaacctgtcaaaagttttgaactgcccgtagatttaagattgcttataacgaggcacatccttactcaggaagaaattatagaagctgtgtacgaggatgatatggaaaaaacgtttcgcgttttctcgcacgatcatgaaatcaaaaaactgccgcccggcagcgctttttctctttttaaagaaatgctccgcgcgaccggcttaacaggcgaataa

SEQ ID NO: 70240 - protein, 464 aa, Unknown
  Obtained from environmental sample
  DOMAIN (7)...(440): Family 4 glycosyl hydrolase
  misc_feature (1)..(464): Xaa is any amino acid
MNKDKLKICYIGGGSRNWAWVFMQDLAFEKEIRGKIELYDLVFKDAHSNEIIGNRLMEKYNKGGWEFHANHSLHDALEGSDIVIISILPGDLEKMSVDVHAPEKYGIYQSVGDTVGAGGIMRALRTIPQFIYFAQEIKKYAPAAWVINYTNPMSICTRTLYKEFPKIKAFGCCHEVFHTQKLLATVLEEAGHAPPNTIKREEIKVNVLGINHFTWIDKAYWKDTDIFPIYEEFVKKYSLTGFKKINTSDSNLSGDELERQKYFGSTDRVKMDLFRRFGLIAAAGDRHLAEFCPHSWYLSSPQAAERWGFALTPVSWRIKDREKLIQKAKAYSDGIEEMIPAESGEEGIKIIKALIGLGDITTNVNLPNNGQMPDLPKGVIVETNAGFKLDNIEPVKSFELPVDLRLLITRHILTQEEIIEAVYEDDMEKTFRVFSHDHEIKKLPPGSAFSLFKEMLRATGLTGE

SEQ ID NO: 70241 - DNA, 2064 bp, Unknown
  Obtained from environmental sample
  misc_feature (1)..(2064): n is a, c, g, or t
atgataaaccgccggcaagtaatacagcggcataaccctcattacaaattattgaataaatccgctccgctttcaacaggcaacggaactttttgttttacagccgattttacggggttacaaacattttttaacgattactgcgaggctccggacgcgtttccgctatgcaccatggcggaatggggctggcactcgtatcctcacacggaagatgaatcaagtttgcggctgacgccctatgacacttacggcaggactgtttattacgcggcagacgacaaagggcaggaggaactttttaagaaaatcagggttaacgcgcataaatttcaccttgggttaattggttttacgctgtcaaatgaaaaaccttcggtaaattcctgcgaacctgttggccaattgctttctctttgggaaggaattttattttcagagtttaagattaacggaaaccttgtaaaaacagaaacttttgtccacccggaagaagatacattgcatgtccgcgcttcatcgccgttactaaaagaggctgaattgcgtataactatcaactttccctatggcagtcataaaaaaacaggagcggacttctttgccgctgatttacataaaactaaaatagttaataaaaacgggttcgtttatatagaaagagagcttgacggtacaatttataaagttaccgtaacaggcggcggattttctgtttcttttaatgaaaatcagcatacattacaattaattccgcataacgaatgtataaatttcagcgccggatttgaacctgcaaacattccttcttttttaaaagccggaataacattggataaattggaaaaaaagaaaactgattcatttgacgaagcaaaaacaaaatgccttttattctgggagaattattggaattcaggcggttttatagactttacaggctccgccgattcacgagcttttgaattggaaaggcgggtaatactttctcagtacctgacggccattcaaagcagggggaaacttcctcctgccgagacagggcttacatgcaacagctggtacggcaaattccatcttgagatgcatttttggcatcacgcgcattggcctatttggaacaggacgaaggaacttctaaaatctctaacgtactacaaaaaaatactcgcctcggcaaaaaataccgcgtcttcgcagggataccaaggcgcgcgctggcctaaaatgtgcgatccgtccggtaaaaacacgccttcttccgtcgcggtttttttgatctggcagcagccgaatcctataatgcttgccgaattgtgttggcgtacggaaaaaaataccgattttctgcgcgaataccgcgatgttgtaattgaaaccgccgagttcatgaaaagttttatacattttgacaaatcccgttatgtgctggggcctccgtatattccggctcaggaacgccatgagccgttaacagtattaaacgccgcgtttgaacttgaatatttccgcgcaggttttcgcatggctgacgaatggctgcaaaggcttggagaacaaaagcgttacggggaaatcgcggaaaaattaagccttccggctgttaaagacggcgtttacctcgcgcatgaaaattgtcccgacactttcagcaagcttcctttttataccgaccacccttcaatgctaggtatgtacggtgttttaaacagcgacaaaacggacagcggcattatgtcagctactttggacaaagtgctttccgtatgggacaaaaaaactttctacggctgggacttcccggtgttggcaatgaccgcctgccgccttggcagatacaaagacgccattgatctgcttttaatggaaagcccgaaaaatacatggctggaaaacggacacaacaaaatgacgggcgatgacgcgcttcccctgtaccttccgggcaacggtggccttctgattgcctccgctatgctcgccgctggttacggtgagaaaaagggctcgtcctttcctgaaggctttgtggttaataccgaaggcattcttccgtatatttaa

SEQ ID NO: 70242 - protein, 687 aa, Unknown
  Obtained from environmental sample
  misc_feature (1)..(687): Xaa is any amino acid
MINRRQVIQRHNPHYKLLNKSAPLSTGNGTFCFTADFTGLQTFFNDYCEAPDAFPLCTMAEWGWHSYPHTEDESSLRLTPYDTYGRTVYYAADDKGQEELFKKIRVNAHKFHLGLIGFTLSNEKPSVNSCEPVGQLLSLWEGILFSEFKINGNLVKTETFVHPEEDTLHVRASSPLLKEAELRITINFPYGSHKKTGADFFAADLHKTKIVNKNGFVYIERELDGTIYKVTVTGGGFSVSFNENQHTLQLIPHNECINFSAGFEPANIPSFLKAGITLDKLEKKKTDSFDEAKTKCLLFWENYWNSGGFIDFTGSADSRAFELERRVILSQYLTAIQSRGKLPPAETGLTCNSWYGKFHLEMHFWHHAHWPIWNRTKELLKSLTYYKKILASAKNTASSQGYQGARWPKMCDPSGKNTPSSVAVFLIWQQPNPIMLAELCWRTEKNTDFLREYRDVVIETAEFMKSFIHFDKSRYVLGPPYIPAQERHEPLTVLNAAFELEYFRAGFRMADEWLQRLGEQKRYGEIAEKLSLPAVKDGVYLAHENCPDTFSKLPFYTDHPSMLGMYGVLNSDKTDSGIMSATLDKVLSVWDKKTFYGWDFPVLAMTACRLGRYKDAIDLLLMESPKNTWLENGHNKMTGDDALPLYLPGNGGLLIASAMLAAGYGEKKGSSFPEGFVVNTEGILPYI

SEQ ID NO: 70243 - DNA, 483 bp, Unknown
  Obtained from environmental sample
  misc_feature (1)..(483): n is a, c, g, or t
ttgcttcttgaccgtgcggttaattattttataggaatgaagatcgcggctaaaaataacaaagctttccacgactacgaggttatcgagagggtggaggccggggtcatgctgaccggagcggaggtcaagtctatccgcgccggacgcataagccttgccgacagctacgccgtctgcatccacggcgagatgttcgtgaaccacctgcacataagctcctacgaacgcggcggtctgtacacacccgaacccacgcgtcggcgcaaactgctgctgcacaaaaaacaggtcgcatttttcggcacagaggtagaacgcaagcaactcgcccttatcccgctctccgtctactttaaggatcaatgggtcaaaatagagataggcctctgccgcggacggaagaagtacgacaagaggcagaaaatagcggagcaggaagccaagaagaaaatcgcgcagttggtgaaagctaggggttaa

SEQ ID NO: 70244 - protein, 160 aa, Unknown
  Obtained from environmental sample
  DOMAIN (14)...(82): SmpB protein
  misc_feature (1)..(160): Xaa is any amino acid
MLLDRAVNYFIGMKIAAKNNKAFHDYEVIERVEAGVMLTGAEVKSIRAGRISLADSYAVCIHGEMFVNHLHISSYERGGLYTPEPTRRRKLLLHKKQVAFFGTEVERKQLALIPLSVYFKDQWVKIEIGLCRGRKKYDKRQKIAEQEAKKKIAQLVKARG

SEQ ID NO: 70245 - DNA, 804 bp, Unknown
  Obtained from environmental sample
  misc_feature (1)..(804): n is a, c, g, or t
atggcaaagacaacttcaataatcaccgtcatcataaccgccatagccgcggtcagcctaaacgcgcagtggcggacgctcgagcccggcttggaattcgcgtcattcccatctccgacgacccataccgcgaaccaaatcaacatcttacgcatcgacctcaagcgctacgagctgcgcctgctgaacgcctcgcatccggcgaacggctcgctgctcaccgcgcgcgggtgggcggcaaaggaggggatggtcgccgtcaccaacgccgccatgtaccaggccgactaccgcaccagcgtctcccacatgaaaacctcagcgcacgtcaacaacccgcacatctccaaggacaagacgatcctcgttttcgaaccgctcaaaaagggcatccctccggcgcgcatagttgacctgcagtgcgacaacttcgaggagatccgcccgctatacggctccgccgttcagtcgatacgcatgctctcgtgcgccggcaagaacgtttggcaggagagcgaaaggcgctggagcatcgcggcggcggccaccgacacgtcgggaaatatcctgctcatccagtgcaccgccccccactcggtctacgaatttatcaatattttgcgtgaactgccaatatccatagacagggcgatgtacatggagggcggcggtccatcgcagctgttcatcggaactgtaaaggacacgatggagttcataggcgatttttcgttgggcggaagaccggcgggagcggcgcagttgcccaacgtgctgggagtaaggaggatagggaaacaatga

SEQ ID NO: 70246 - protein, 267 aa, Unknown
  Obtained from environmental sample
  SIGNAL (1)...(22)
  misc_feature (1)..(267): Xaa is any amino acid
MAKTTSIITVIITAIAAVSLNAQWRTLEPGLEFASFPSPTTHTANQINILRIDLKRYELRLLNASHPANGSLLTARGWAAKEGMVAVTNAAMYQADYRTSVSHMKTSAHVNNPHISKDKTILVFEPLKKGIPPARIVDLQCDNFEEIRPLYGSAVQSIRMLSCAGKNVWQESERRWSIAAAATDTSGNILLIQCTAPHSVYEFINILRELPISIDRAMYMEGGGPSQLFIGTVKDTMEFIGDFSLGGRPAGAAQLPNVLGVRRIGKQ

SEQ ID NO: 70247 - DNA, 723 bp, Unknown
  Obtained from environmental sample
  misc_feature (1)..(723): n is a, c, g, or t
atgaataagctccttacccacctcaaagaagaaaaagagtccaagctaaaaggcggcttgtaccacaagacgcaggtcagccttgcttacaattcaaataggatagagggcagcaaactgaccgaagagcagactcggtatatctttgagacccgaaccatcgggttcaaagaacaagaagccgtgccggtcgacgatattatcgaaacatccaaccactttgttgcctttgattacatgcttgatactattgatacggcgctctcaaacgtcctgatcaaagagttccatcgtatcttaaagacaagcacctccgacgccgcgaaaaaagggtttatggtcggcgattggaaaaaacaacccaacgaggtaggcgggacggaaacatccttgccgcaaaatgtcgataccgatatgaccaatctcaactcatggtataactctttatccgagtcagatataacgtttgaatccatcatagaatatcactaccgtttcgaaaaaatccatcctttccaagacggcaacggcagagtcggtcgtttgattctattccgcgagtgtctgagaaacggcattgtcccgtttattattaacgacgaccataaacaattttactatcgcggactgaaagaattcacaaatctaaaaggctaccttatcgatacctgcctatcggcacaagatacgtataaggagtgggttaagtatttctacccttga

SEQ ID NO: 70248 - protein, 240 aa, Unknown
  Obtained from environmental sample
  DOMAIN (93)...(216): Fic protein family
  misc_feature (1)..(240): Xaa is any amino acid
MNKLLTHLKEEKESKLKGGLYHKTQVSLAYNSNRIEGSKLTEEQTRYIFETRTIGFKEQEAVPVDDIIETSNHFVAFDYMLDTIDTALSNVLIKEFHRILKTSTSDAAKKGFMVGDWKKQPNEVGGTETSLPQNVDTDMTNLNSWYNSLSESDITFESIIEYHYRFEKIHPFQDGNGRVGRLILFRECLRNGIVPFIINDDHKQFYYRGLKEFTNLKGYLIDTCLSAQDTYKEWVKYFYP

SEQ ID NO: 70249 - DNA, 324 bp, Unknown
  Obtained from environmental sample
  misc_feature (1)..(324): n is a, c, g, or t
gtggcatatgcccaaatacattgcgttggaaaagccgggaacggtaatcctcgaagaatttttgaaccttacggcgtgagcgtagacgacgccgcgaacgccacttctatccccagttgggacttgtcggcgatattgtacggcgataagcagatatcggcggaggtcgatttgcttctgacaagatatttcggtctgtcgcaggggtattttttgcggatgcaggatatgtataatatgcgtttggcaaaacaaaggctacgcaaacaggtaaaaaacatcattccagtatttaatccggttgaaaaggttgcggcgctatga

SEQ ID NO: 70250 - protein, 107 aa, Unknown
  Obtained from environmental sample
  misc_feature (1)..(107): Xaa is any amino acid
MAYAQIHCVGKAGNGNPRRIFEPYGVSVDDAANATSIPSWDLSAILYGDKQISAEVDLLLTRYFGLSQGYFLRMQDMYNMRLAKQRLRKQVKNIIPVFNPVEKVAAL

SEQ ID NO: 70251 - DNA, 1389 bp, Unknown
  Obtained from environmental sample
  misc_feature (1)..(1389): n is a, c, g, or t
ttgcaagacagccatgcttacaatgacgacaatcccatcgccgctttcgccaccattccgggaagcggcgctctcacattaatccgctgctcgggcaagggctctatagaggcggcatcttccgtctttgccccggacaaattaaaaggcgcgtccggcaattccgtcattcacggctggatagttaaagacggcgaaaaaattgacgaggcgcttgtctcggtcttccgcgccccgaaaagttacacgggcgaagacagcctggacataagctgccacggcggcgcaagcgcgggaaaagccgtaatggcagcgctaatttccgcgggttttcgggacgcgcttcccggcgaatttactttccgcgcttttgtaaacggcaaactcgatcttacaaaagccgaatccgtcatggaactggtttccgcaaagaccgacataagcagacgtcacgccgtgtcgcgcctttccggctccctgcaaacggaaatcgaggagataaaaaaatcgctggtgcaggttctttccggcgcggagatttaccttgactattcggaagacgaagtaggcgcggatgttaacgaggacgaaggaaaactcccctatcagaacattgcgcttgaggcgttatcacgtcttaaaaaactgtccgcatcgtggcggatggagcgcatttatcaggagggggtaacggtagtgatagcgggacgccccaacgcgggcaagtccagtctttttaacgccctgttgaaagaggaccgttcaatagtaacggaaattcccggcactacccgcgactggatagaagcgtgggtttccgttgacggaatccccgtccgccttgttgataccgcggggcttagggaatcctccgaagctgtagaaaaaatcggcgtggaccgcagcgcaaaacttttacaggaagcggatcttgttctgtatttgatagacggcgctcagggtgttacggacgaagacagagattttattgacggcgacgacagacaacttcttatttggaacaaagctgatattactcctccgcctgcatcatcttccaatctaacctttatcagcgtcagcgcgaaaacaggcgaagggctgtcgcagatttacgccgcaatttcatcggcaattaaggaacagacaacggtgcatcaagacgcgcctattaccgccgccgtcggaacggagaggcagaaaaaacttacggacgccgccgtctgcgcgctggaagaggcgctcgcccttgcgcggcgggaagagccgctggatttaatcgccccgctgctgagggaagctgtcaactcgttaggtgaaattacgggggaagtatcaacagccgatatactggaagaaatgttcagccggttctgcgtagggaagtaa

SEQ ID NO: 70252 - protein, 462 aa, Unknown
  Obtained from environmental sample
  DOMAIN (230)...(344): GTPase of unknown function
  misc_feature (1)..(462): Xaa is any amino acid
MQDSHAYNDDNPIAAFATIPGSGALTLIRCSGKGSIEAASSVFAPDKLKGASGNSVIHGWIVKDGEKIDEALVSVFRAPKSYTGEDSLDISCHGGASAGKAVMAALISAGFRDALPGEFTFRAFVNGKLDLTKAESVMELVSAKTDISRRHAVSRLSGSLQTEIEEIKKSLVQVLSGAEIYLDYSEDEVGADVNEDEGKLPYQNIALEALSRLKKLSASWRMERIYQEGVTVVIAGRPNAGKSSLFNALLKEDRSIVTEIPGTTRDWIEAWVSVDGIPVRLVDTAGLRESSEAVEKIGVDRSAKLLQEADLVLYLIDGAQGVTDEDRDFIDGDDRQLLIWNKADITPPPASSSNLTFISVSAKTGEGLSQIYAAISSAIKEQTTVHQDAPITAAVGTERQKKLTDAAVCALEEALALARREEPLDLIAPLLREAVNSLGEITGEVSTADILEEMFSRFCVGK

SEQ ID NO: 70253 - DNA, 456 bp, Unknown
  Obtained from environmental sample
  misc_feature (1)..(456): n is a, c, g, or t
atggattacgatacaattgtcatcggcggcggacatgcgggaatagaggcatccctcgctgtcagccgccttggattttcaactctcctcatcacgcaaaaccccgacaggatagggacgctctcctgcaaccccgcgattggcggcctttcaaaaggcaaccttgtaagggaagtggacgctctcggcggagagatgggaaagctgacggacgcgacaatgattcagtaccgggtgcttaaccgttcgcgagggcccgcggtacaggctccgagagcgcaggcggacaaacacgcgtatcctgcggcggcgcgctccgttcttgagaagcagaaaaatctgacgattttcatggacacggttacggacttaatgttngatgtaaaagacgcttccatttcgaaaattgcgggagtaattcaaagcgcggacaccgcatcacggcgcgcaccgtga

SEQ ID NO: 70254 - protein, 151 aa, Unknown
  Obtained from environmental sample
  DOMAIN (4)...(144): Glucose inhibited division protein A
  misc_feature (1)..(151): Xaa is any amino acid
MDYDTIVIGGGHAGIEASLAVSRLGFSTLLITQNPDRIGTLSCNPAIGGLSKGNLVREVDALGGEMGKLTDATMIQYRVLNRSRGPAVQAPRAQADKHAYPAAARSVLEKQKNLTIFMDTVTDLMXDVKDASISKIAGVIQSADTASRRAP

SEQ ID NO: 70255 - DNA, 1320 bp, Unknown
  Obtained from environmental sample
  misc_feature (1)..(1320): n is a, c, g, or t
gtgattcttgccgcaggtacttttatggaagggaaaatatttatcggggagtatgacgcgccgaacgggcggcttggggaagaggcggcgttgggacttggcgcgtctttgcgccggttagggtttccgacaggaagacttaaaaccggaaccccggcgcggttggcgggaaacacgatagattattccgctatggaaaaacaagacagcgaagaaatgcgcccgttctcatttttcgccgccgccgattctgttatcaacagacccgccatgccttgctgggtcacgtacacaaacacaaggacgcatgaaatcatcagagcgaatatcaatcgctctccgttgtacggcggaaaaataattgggacgggggcgcgttactgcccttcaatcgaggacaaggttatgcgtttttcgcacagggagcgtcatcatgtttttatcgagcctgaagggcttgcaaccaacgagatgtacatgaacggcgcgtccagttccctgcccgaagacgtgcagagcgattttattcacagcatcaaaggattagaaaaggcgcacatagtccgccccggctacgcggtggagtacgattacattgatcccctcgatctttttccctcgctggagtcaaagcgcctgtccggttttttcactgcgggtcagaccaacggctcttcaggttacgaagaagccgccgcccagggaataatcgcgggaatcaatgccgcgatgaaaatgcagggaaagccgccctttatcctcggccgcgccgaagcctacatcggagtacttgttgacgatcttaccactctcggaacaaaggaaccgtaccgcatgttcacaagccgagccgaacaccgtttaatgctccgccacgacacagccgacacaaggcttactcccaaagggcgcgaagccggccttgtagacgacgcccgctgggagcattttttggaaaagacaaaaaagctggacgaaatcaaagaactgctcgcccggcgaaaatctgatgaagtttcagctaacgcgcttacgggcaagtcccttgccaactatcccgcggaactggtggaaagagcgcttttggacaaaaagtacgccggctacatcgaaaaggaaatccgttttgccgcgaaagccgccaaaatggacgccatcaaacttaatcccaacacagactattcggctatcagcggactctcgtccgaagcaaaagagaaactccaatccgtgaaacccctcaacgtaggacaagccgcccgaatccccggcgtaaggcagggagacatagctatgttgattattctcgcaaggaaatga

SEQ ID NO: 70256 - protein, 439 aa, Unknown
  Obtained from environmental sample
  DOMAIN (1)...(250): Glucose inhibited division protein A
  misc_feature (1)..(439): Xaa is any amino acid
MILAAGTFMEGKIFIGEYDAPNGRLGEEAALGLGASLRRLGFPTGRLKTGTPARLAGNTIDYSAMEKQDSEEMRPFSFFAAADSVINRPAMPCWVTYTNTRTHEIIRANINRSPLYGGKIIGTGARYCPSIEDKVMRFSHRERHHVFIEPEGLATNEMYMNGASSSLPEDVQSDFIHSIKGLEKAHIVRPGYAVEYDYIDPLDLFPSLESKRLSGFFTAGQTNGSSGYEEAAAQGIIAGINAAMKMQGKPPFILGRAEAYIGVLVDDLTTLGTKEPYRMFTSRAEHRLMLRHDTADTRLTPKGREAGLVDDARWEHFLEKTKKLDEIKELLARRKSDEVSANALTGKSLANYPAELVERALLDKKYAGYIEKEIRFAAKAAKMDAIKLNPNTDYSAISGLSSEAKEKLQSVKPLNVGQAARIPGVRQGDIAMLIILARK

SEQ ID NO: 70257 - DNA, 717 bp, Unknown
  Obtained from environmental sample
  misc_feature (1)..(717): n is a, c, g, or t
gtgttcttttcttctgtaatgttgcttcttttctgttttttttgtatgattagtttaaggaatataatggctttggattattctaaaacacttttattgataattgacgcgcagaatgatttttgcccgggcggagcgctcgctgtaaatgagggcgatggggtagtggcgcctcttaatgttctgtcgtccttccttgtagaaaagggcggacgcgccgcggctacgcaggactggcatccgaaagggcatgtttctttcgcttcatcacattccggtaaaaaaattggcgacagcgttgacaccgcgcttgtgaaaggacaggcgctttggcctgatcattgcgttcaggggacggacggcgcggcttttcacaaagaccttaatttaacccccatttctttgattatccgaaaaggtttccgcaaagaacttgattcctattcggcgttttttgaaaacgacaggaaaactcccacaggtcttgaaggctggattaagtctcttggaatccggacggttatcatgggcgggcttgctaccgattactgcgttttttacagcgcgatggattgcagaaaagcaggctttaaaaccattatcgcaaacgacgccgtgcggggcgtgggttttccctcaggttcgatagaggcggcggtaagcgaaatgaaatccaacgggatagaatttatttcttccgccgaacttgtgaaataa

SEQ ID NO: 70258 - protein, 238 aa, Unknown
  Obtained from environmental sample
  SIGNAL (1)...(24)
  DOMAIN (25)...(237): Isochorismatase family
  misc_feature (1)..(238): Xaa is any amino acid
MFFSSVMLLLFCFFCMISLRNIMALDYSKTLLLIIDAQNDFCPGGALAVNEGDGVVAPLNVLSSFLVEKGGRAAATQDWHPKGHVSFASSHSGKKIGDSVDTALVKGQALWPDHCVQGTDGAAFHKDLNLTPISLIIRKGFRKELDSYSAFFENDRKTPTGLEGWIKSLGIRTVIMGGLATDYCVFYSAMDCRKAGFKTIIANDAVRGVGFPSGSIEAAVSEMKSNGIEFISSAELVK

SEQ ID NO: 70259 - DNA, 675 bp, Unknown
  Obtained from environmental sample
  misc_feature (1)..(675): n is a, c, g, or t
atggaaaactccgccctctttacggatttttattcccttacgatggctcaaggctactggaaaaataaccgcgacgaaaatgtcgtattcgagatgtttttccgtcaacagccgttttcaggcggttactccatttttgcgggactcggcgttttgcttgagaagctggtcaattttaaattttcagaagatgacattgcctttcttaaaggtttgggtatttttgaaaacggttttaccgattatcttaaaacttttagttttaacggctctctttgggcaatggacgagggaacggttatttttccgcaggaacctttaatacgagcggaaggcagtcttattgaatgtcagataatcgaagggcttatcttaaacattattaattttcaaagtttaatcgctacaaagacacgccgaatatggcttgcttcgggtaaagggcagataatggagttcggtcttcgcagagcgcagggacctgacggggctatttccgcttcccgcgcggcgtacattggaggcgttcaaggaacaagcaacacgttggcgggaaaaatttacggtatccccgtaatgggaacaatggctcattcatggataatgtcattcgataacgaagaagacgcatttgacgcctacgccgcgctgaccccgacagatcaatttttttaa

SEQ ID NO: 70260 - protein, 224 aa, Unknown
  Obtained from environmental sample
  misc_feature (1)..(224): Xaa is any amino acid
MENSALFTDFYSLTMAQGYWKNNRDENVVFEMFFRQQPFSGGYSIFAGLGVLLEKLVNFKFSEDDIAFLKGLGIFENGFTDYLKTFSFNGSLWAMDEGTVIFPQEPLIRAEGSLIECQIIEGLILNIINFQSLIATKTRRIWLASGKGQIMEFGLRRAQGPDGAISASRAAYIGGVQGTSNTLAGKIYGIPVMGTMAHSWIMSFDNEEDAFDAYAALTPTDQFF

SEQ ID NO: 70261 - DNA, 858 bp, Unknown
  Obtained from environmental sample
  misc_feature (1)..(858): n is a, c, g, or t
ttgccgccgctgttaaagtccggtcttagcagagacggtgtttttatcgccgcaggcggcggagtattcggcgacttggccggttttgccgcttctgtttatatgcgcggctgccgttttgcgcttgtgtccactaccctgctgggaatggttgacgcttccgtaggcggcaaaacaggttttgatttttcaggcataaaaaatcttgcaggcagtttttatccggcgcaaaacgtttatatgccgttaaacgccttatccacattgccgcaggcggaaataaaaagcggcatggcggaacttataaaaaccgctattctaagcggagatgattttcttgatgaattaacgcctttagcggaaaactttaacaatgttaaaaatttttcggaaaacggcatattgcaaaaatgcgtggaaaaagcggtctcttacaagggcggtatagtaagcgaggattttcgagagtccggcaaaagaatgttattaaatttagggcataccttcggtcatgcccttgaaagctcaagcggcttgggaaatatttcccacggagaagccgtagcgtggggaattatacgcgcttgcgaactgggaattgcgctgaatataacgccgcgcgaaagagcggaaaaaattaaaaaacttattttatcatacggttatgaatgcgcctgcccccatccggccgccggcagcaaagaatcgctgttgaacgccatgaagagcgataaaaagaaaaaaagcggaaacttgacgtttatagtcccggacgcccaaagcgcccgcgccgtaacgattgaaccggaaaaaacgcaaattatagaaaaaatattacaaggtgggcttacatattga

SEQ ID NO: 70262 - protein, 285 aa, Unknown
  Obtained from environmental sample
  DOMAIN (4)...(248): 3-dehydroquinate synthase
  misc_feature (1)..(285): Xaa is any amino acid
MPPLLKSGLSRDGVFIAAGGGVFGDLAGFAASVYMRGCRFALVSTTLLGMVDASVGGKTGFDFSGIKNLAGSFYPAQNVYMPLNALSTLPQAEIKSGMAELIKTAILSGDDFLDELTPLAENFNNVKNFSENGILQKCVEKAVSYKGGIVSEDFRESGKRMLLNLGHTFGHALESSSGLGNISHGEAVAWGIIRACELGIALNITPRERAEKIKKLILSYGYECACPHPAAGSKESLLNAMKSDKKKKSGNLTFIVPDAQSARAVTIEPEKTQIIEKILQGGLTY

SEQ ID NO: 70263 - DNA, 723 bp, Unknown
  Obtained from environmental sample
  misc_feature (1)..(723): n is a, c, g, or t
atgaaagcgccacttaatcaggttattattccgaattcttttcaggaattgtttgcggcatggaaccgttttcctgacgcggttttgtttgccggaggcactaaccttgtcagcaaacaggatagaaatatactgtaccttccccctgtatttctctcccttgataaaattgaggaactgcaaaaaataacaagaacggaacagtatcttgaaataggctctatggtaaaactaaacagactgataaaactaggtaaaatagtgcctgaagtcctatgcttatgcttaaaaaaaatcgccggcgttcaattaagaaacatagcgacaatcggggggaatatatgcggcgcttcaaactggcatgatttatccgctcccctcaccgcccttgacgctcaatatgaattccgaagcgcgtctaacgctactcgatgggtttccgccgcgcgtttccattcggaagaaaatacaacaatggaaaaacaggaattacttacaagaataaggcttccgctgcatcaatgggattacacggtatacaaaaaattccattgcgaggattattttaacagtaattcgctcgtttttctggctataacgcaaaaaaatatcctgtctgatataagagtgatttataaagagaacgcaatttatcgtaataagaacggcgaagacattctaaaagggaaatatttgccccctaaaccggaaaacatcccatga

SEQ ID NO: 70264 - protein, 240 aa, Unknown
  Obtained from environmental sample
  DOMAIN (4)...(173): FAD binding domain in molybdopterin dehydrogenase
  misc_feature (1)..(240): Xaa is any amino acid
MKAPLNQVIIPNSFQELFAAWNRFPDAVLFAGGTNLVSKQDRNILYLPPVFLSLDKIEELQKITRTEQYLEIGSMVKLNRLIKLGKIVPEVLCLCLKKIAGVQLRNIATIGGNICGASNWHDLSAPLTALDAQYEFRSASNATRWVSAARFHSEENTTMEKQELLTRIRLPLHQWDYTVYKKFHCEDYFNSNSLVFLAITQKNILSDIRVIYKENAIYRNKNGEDILKGKYLPPKPENIP

SEQ ID NO: 70265 - DNA, 411 bp, Unknown
  Obtained from environmental sample
  misc_feature (1)..(411): n is a, c, g, or t
atgcgcggtactttcgggttattcagagcaaaacccggctgtctttcgggacaatgcggagcttgtacagttattattaacggacaagtaagcccatcctgcttaattccggcttttaaaatacaaggatcggaggtaataaccatcgaaggcttttcacaaacggttgagtatcaggaaattacggacgcgtttgtgcaggagcatttggggaactgcggttattgcgaagccggaaaagtattatgcacggaagcccttcttgagcatatacccaaccccaccaaagaagaaattttagccggattttccggaataaaatgcagatgcaccaatgcggaaagacttgtaaaagttgtaaataatatcgccgtagttcggcagcagaggttgtatgaaagcgccacttaa

SEQ ID NO: 70266 - protein, 136 aa, Unknown
  Obtained from environmental sample
  DOMAIN (48)...(122): [2Fe-2S] binding domain
  misc_feature (1)..(136): Xaa is any amino acid
MRGTFGLFRAKPGCLSGQCGACTVIINGQVSPSCLIPAFKIQGSEVITIEGFSQTVEYQEITDAFVQEHLGNCGYCEAGKVLCTEALLEHIPNPTKEEILAGFSGIKCRCTNAERLVKVVNNIAVVRQQRLYESAT

SEQ ID NO: 70267 - DNA, 2139 bp, Unknown
  Obtained from environmental sample
  misc_feature (1)..(2139): n is a, c, g, or t
atggaatctcttcctttccttgaagatatataccccccaaatctgttgtacgcggtaacaatcaggtcgcatatagcaaaaggtactttaagaaacatatacgttccggaacttccagaaaactacactcttattaccgcaaaagatattcccggcgagaacaggcttgaaggctctaatatccccattcttgctgataaaacattgaactatatcggagagccggtcgcaataatactgggtcccaataaagcaaaattggaagaaatctccacaaggtgcgaaatacttgcagacgaagaagaggctgtctttatttacggtaatgaaactacacccgttttgacgcgggaaattaacataggggactcgcctgaatcatttcaggagacaggtaagatagtaaccggaagttataagacgggtattcaagaacattggtacgctgaacctataggcgcaatttcatggataaacaaagaaaaagatataaagaaccttaagggcggaaaatatgattctgtcattatcagaactgccacacaatggccataccatgtaaaaagagcggcagcgcgcgcgttaaaaattgacccgtcctatgtcgcggtagagcctaccgcccttaacattcacatggacgggaaattgtggtatccttcgcttatagcctgccatgccgcgattggaacatatatcacaaaaaaacccgtccgccttattttaaccagagaagaagattttctttataccccaaaacgtttcggcgcaaacatcaatatcgcatctgaaattaacgaaaacggcagtataaacgccgcaaatatcgatatttccgttaaccttggagcctatgaggttaacggaaatgaaattctcgatcaagtctgtctcggcgctataggtttgtacaattttcccaatttgtcgctgaaagcgaaggcttattgcacaaatatcccgcctcagggaccatttaccggctttggtctcgcgcagggacattttgccatggaacgccatatttccctcatagccgatattgccaaccaagaccctgcggaaataagagaaaacaatatcgacccccaaataatgctctcccacgcaaaacaaaaacacattactcacggcaaaaaccttattaaatcgacaatcaaaatgggcgattataaccacaaatgggcttcctatgaattactgcgaaaaagccgcaaaggcaaaaaacctgaaaggggcgaaaatcccagagggataggaattgcggtcgggttccagggcagcgggcttctctaccccggcgaagataacggctcatacagcgtggaagttacattgacaaaggacagccgtttggaaataaaaacaagcattacaagctctgaagattttaccagaatttgggcgaaggtcgtcaaggaaactatgtccatagaaccggatatggttcgtattatcgcttccaacgcgcccgactgcggtccctcatgcgcgtcaagaaatattactgcggttacaaaacttgtggaaaagtgctgtcttacaatccgcaaacagcgcttccacgacccgcttcccattacagtccgccgctcgataaaaccgcaaaacggaactctttggggcggacgatttaccccgccggaaggaaaaaatatcgacataaacagcttttcaagattagggcttgcctgcgccgttgtcgaagtttctatcgaccttattgagtgtattcccgttatacgcggaatctggcttggaattgacggcggaaaaattatatcggcgcacagggcgaaaagaagccttacccgcacggcggttcaagcgttaggttgggcatatacggaacatattaattatatcgacggcgttattccgacagaccaatacaacaactttacgattttttctcccgcggaaattccgcccattcatatcgatttcttttccgaggatttaactgagactaaggggataagcgaactgccctttgctagtattcccaccgagttttggcaggcggtttcacaggcaatggatcacacttttaagacaattccgttaaaaagaaaagacatttgggaaattttacgcataagaaatattcataccgccgccgcgcagggggtaaaatga

SEQ ID NO: 70268 - protein, 712 aa, Unknown
  Obtained from environmental sample
  DOMAIN (98)...(643): Aldehyde oxidase and xanthine dehydrogenase, molybdopterin binding domain
  misc_feature (1)..(712): Xaa is any amino acid
MESLPFLEDIYPPNLLYAVTIRSHIAKGTLRNIYVPELPENYTLITAKDIPGENRLEGSNIPILADKTLNYIGEPVAIILGPNKAKLEEISTRCEILADEEEAVFIYGNETTPVLTREINIGDSPESFQETGKIVTGSYKTGIQEHWYAEPIGAISWINKEKDIKNLKGGKYDSVIIRTATQWPYHVKRAAARALKIDPSYVAVEPTALNIHMDGKLWYPSLIACHAAIGTYITKKPVRLILTREEDFLYTPKRFGANINIASEINENGSINAANIDISVNLGAYEVNGNEILDQVCLGAIGLYNFPNLSLKAKAYCTNIPPQGPFTGFGLAQGHFAMERHISLIADIANQDPAEIRENNIDPQIMLSHAKQKHITHGKNLIKSTIKMGDYNHKWASYELLRKSRKGKKPERGENPRGIGIAVGFQGSGLLYPGEDNGSYSVEVTLTKDSRLEIKTSITSSEDFTRIWAKVVKETMSIEPDMVRIIASNAPDCGPSCASRNITAVTKLVEKCCLTIRKQRFHDPLPITVRRSIKPQNGTLWGGRFTPPEGKNIDINSFSRLGLACAVVEVSIDLIECIPVIRGIWLGIDGGKIISAHRAKRSLTRTAVQALGWAYTEHINYIDGVIPTDQYNNFTIFSPAEIPPIHIDFFSEDLTETKGISELPFASIPTEFWQAVSQAMDHTFKTIPLKRKDIWEILRIRNIHTAAAQGVK

SEQ ID NO: 70269 - DNA, 1542 bp, Unknown
  Obtained from environmental sample
  misc_feature (1)..(1542): n is a, c, g, or t
atggaaaaatcaaaacgtctgtacattatcggagcgggatttgccggacgtacccttgcgaacgaaataacatcaaaggcgatttttggcgaagtagtcgcgttcttggacgacgacccggaaaaaataggcaagaaaatcgacggtatccccgtacttggtccaatccgcgatgtcgctcttttattaaaaacaaacccggctgacgaagcgataatagccattccaagcgcaagcaaagagtacttaaaagaactctactctatccttaaacaagccaactttcagaaaataagaattctccccggaatctctcaaattgtagaaggggacgcgcactttatccagacgcgctccatagatttacaggacttactcgggcgcaaccccgtaacgataaaacttaaacagagcctttcctatgtgcgcggaaaacgcgttttagtaacgggcgcgggcggctctatcggcagtgaattatgccgccagttactgtcgggcggagtatcaaggctgtacctgctgggacacggcgagaactccatctacctgatcgacaaagaactgcggcttttacaggacgaaggggtcggagaaaaagcggcaatagtgcctgtaatcggggacttaaaggacacggattttgttgattatattttaagccacttaaaagccgacgcaattttccacacagcggcatataagcatgtccccatgatggaagaaaaccccgtagccgcaattgaaaataatgttcttggaaccgagaacctgattaattccgccatgaaacacggcgtgaaacattttgtacatatttcgacagacaaggcggttgatcccgtatccgtttacggggcgtcaaaacgcatctgcgaacagttggttctttccgcaagcgagcagtctgccagcaagcaggctgcgaaaagcggcactaattttgtagtcgtccgctttggaaacgtactcggctctcgcggctcgattgttccgcttttccagcagcaaatcgaaaaaggcggacctgtaaccgtaacccaccccgacgcaagacgctttttcatgaccatcagcgaagcgtgctcgcttgttttaaaaaccggcggcgtcggcgagaacggttgtttgtacctgttagacatgggagagcctgtgcgcatccgcgatttagccgaacaattaatccgcttccacggttatgagccggaaactgaaataaagattgaatacatcggtctgcgccccggagaaagacttgacgaagcgttaatcagcaaagaagaggaacaaacggaaacagaatacgaccgcattttaaaagtaaccaaaaaaatccagcttgtcatagacacaaaaaaactggttgaagatttacgccccatttgcaagtttgatcccgctaaccctaatgtttaccgcagtatagaaaccttacgcgctgtgcttgatgactacggtatgctggacatcaataaatcaattaagaattatcaccaaaagttaaatgaaccggcgcgaatggcgaaagaaacggcgtaa

SEQ ID NO: 70270 - protein, 513 aa, Unknown
  Obtained from environmental sample
  SIGNAL (1)...(20)
  DOMAIN (145)...(304): short chain dehydrogenase
  misc_feature (1)..(513): Xaa is any amino acid
MEKSKRLYIIGAGFAGRTLANEITSKAIFGEVVAFLDDDPEKIGKKIDGIPVLGPIRDVALLLKTNPADEAIIAIPSASKEYLKELYSILKQANFQKIRILPGISQIVEGDAHFIQTRSIDLQDLLGRNPVTIKLKQSLSYVRGKRVLVTGAGGSIGSELCRQLLSGGVSRLYLLGHGENSIYLIDKELRLLQDEGVGEKAAIVPVIGDLKDTDFVDYILSHLKADAIFHTAAYKHVPMMEENPVAAIENNVLGTENLINSAMKHGVKHFVHISTDKAVDPVSVYGASKRICEQLVLSASEQSASKQAAKSGTNFVVVRFGNVLGSRGSIVPLFQQQIEKGGPVTVTHPDARRFFMTISEACSLVLKTGGVGENGCLYLLDMGEPVRIRDLAEQLIRFHGYEPETEIKIEYIGLRPGERLDEALISKEEEQTETEYDRILKVTKKIQLVIDTKKLVEDLRPICKFDPANPNVYRSIETLRAVLDDYGMLDINKSIKNYHQKLNEPARMAKETA

SEQ ID NO: 70271 - DNA, 612 bp, Unknown
  Obtained from environmental sample
  misc_feature (1)..(612): n is a, c, g, or t
atgaaagatttggatgattataacaaactggaagaaagagcgtgggaattaacaggacaactggaagaaagagcgaagaaatcgggacaagccattaacggcattgacgagcgaagcgaaaaaaaagcgtatgagatgacagaggaatattacgcaaaccaggcaagcaacgaacaaataataataaccaaagaaagaataaaattcactgacggcgatgtatacgaaggcgatgtagtaaacggcaaacctaacggcaaaggcaaatatacattaacggcatcaggcgatttatacgaaggcgatttcattgacggcaagcccaacggtaaagggaaatatacatgggcggaaggagccgtatacgaaggcgattgggcaaacggcaaacccaacggcaaaggaaaaatgaaactaattgacggaacagaatacgaaggcggtttcgttgacggaattgaaaacggcaaaggaaaaataacttatgcggacggcaactcttacgaaggcgatttcgtcaaccgcaaatgccacggtaaaggaaaaatgacttatgcagacggcactgttgaagaaggaagatttgagaataacaaatttttgggagaataa

SEQ ID NO: 70272 - protein, 203 aa, Unknown
  Obtained from environmental sample
  DOMAIN (75)...(97): MORN repeat
  misc_feature (1)..(203): Xaa is any amino acid
MKDLDDYNKLEERAWELTGQLEERAKKSGQAINGIDERSEKKAYEMTEEYYANQASNEQIIITKERIKFTDGDVYEGDVVNGKPNGKGKYTLTASGDLYEGDFIDGKPNGKGKYTWAEGAVYEGDWANGKPNGKGKMKLIDGTEYEGGFVDGIENGKGKITYADGNSYEGDFVNRKCHGKGKMTYADGTVEEGRFENNKFLGE

SEQ ID NO: 70273 - DNA, 1017 bp, Unknown
  Obtained from environmental sample
  misc_feature (1)..(1017): n is a, c, g, or t
atgcagacggcactgttgaagaaggaagatttgagaataacaaatttttgggagaataaaatggcaaaagcgcagtatttgaaagtttcgtatgactttattgacgatgaaaagggcgaattaatgctgataatcgaagcgcctcctaagggcagggcggacgataataacgcgaaactcgtctatgacagtggggcaagtgaagctctgctgtacagaaacagcgaacaaattatccaactgcccattgtgagtgacgaagctcacaaaatgctgttggacggacgcaaaatattgcttgttacggaaatgaacggcgaagatataaacgacgtttatgaagcgaagatcgaattttcgaaaatttccgcggcggataaaaaaatagaattcgaaaactcttacgacattttacagaacaaaaccggcgacattatgttcagcgttttggaacgggagggcgagccggacaatcccaaacttgtctatgacggcggcggccacgcgcttctgcaccgcaacggcggacatgtcgtcatccttgactacattaaccctgacgttcgccaaccgctgacaaagacaaaggaagtgttgataggggaacatcccaaaaaagataaaaaaaactttgtccgcgaatatgtggcagccgtaaaagttgtaaaacgcctgcccgaagaatacgatttgcttatcagtaaacatgaagaagaaacggaagaaggcaaaatcaattctcctgatattgatgaatacggagacgacaatacacccgaaaaatccggcgagcgcgtccgccttatgttaaagcaagatcccaaagaagcgaaacgagtcgcgcaattctacaccgacatggcagaagacggcaaccccgccgcccaatacgaactggcaaacttctatctgaaaggcatcggcgttgaaaagagcaaggcgaaagcaaaagaatggcttgaaaaagccgccaaacagggacacgaggaggcaatcaaattactaagtacaatatag

SEQ ID NO: 70274 - protein, 338 aa, Unknown
  Obtained from environmental sample
  DOMAIN (293)...(328): Sel1 repeat
  misc_feature (1)..(338): Xaa is any amino acid
MQTALLKKEDLRITNFWENKMAKAQYLKVSYDFIDDEKGELMLIIEAPPKGRADDNNAKLVYDSGASEALLYRNSEQIIQLPIVSDEAHKMLLDGRKILLVTEMNGEDINDVYEAKIEFSKISAADKKIEFENSYDILQNKTGDIMFSVLEREGEPDNPKLVYDGGGHALLHRNGGHVVILDYINPDVRQPLTKTKEVLIGEHPKKDKKNFVREYVAAVKVVKRLPEEYDLLISKHEEETEEGKINSPDIDEYGDDNTPEKSGERVRLMLKQDPKEAKRVAQFYTDMAEDGNPAAQYELANFYLKGIGVEKSKAKAKEWLEKAAKQGHEEAIKLLSTI

SEQ ID NO: 70275 - DNA, 711 bp, Unknown
  Obtained from environmental sample
  misc_feature (1)..(711): n is a, c, g, or t
atggcggattattatgttgtatgttaccagtgtgaaggtacaggttataacaggtttgaacaaaagggcaaatggattggttatgacggaactcgtgaaggaatatgtcataattgctggggtgaaggaaaagtcttaactaacgatgaaaaagaagaccttcataagtctgttatgaaggattataccacgcctccaagaataacaacaggaaaatatacattgcccgacaaaacagtttacacaggcgatttagtcaatggactgccacatggtcaaggaaaagtaaaatggcccgagggagacagttacgagggaacatggataaaaggcaaacggcacggacatggaaaatacacctacgaagacgggacagtttacaaaggcgaattcactaacgaaaaaaagacaggctacgccaaagaaacatatccaaacggtgacgaatacgaaggcgattgggttgacggcaaacaaaccggcaaaggaaaaatgacattccatgacggcaatgtatgcgaaggtgatttcgattttggcgattttcttggcaaaggaaaatacacctttgcaaacggcgatgtctacgaaggtggtttttacggcgttgcatcccccggtaggatgagcttcaaaggtaaagggaaaatgacctacgcagacggcaaagttgagaaaggcgaatggaaagacggaaagtttgtgggatag

SEQ ID NO: 70276 - protein, 236 aa, Unknown
  Obtained from environmental sample
  DOMAIN (173)...(195): MORN repeat
  misc_feature (1)..(236): Xaa is any amino acid
MADYYVVCYQCEGTGYNRFEQKGKWIGYDGTREGICHNCWGEGKVLTNDEKEDLHKSVMKDYTTPPRITTGKYTLPDKTVYTGDLVNGLPHGQGKVKWPEGDSYEGTWIKGKRHGHGKYTYEDGTVYKGEFTNEKKTGYAKETYPNGDEYEGDWVDGKQTGKGKMTFHDGNVCEGDFDFGDFLGKGKYTFANGDVYEGGFYGVASPGRMSFKGKGKMTYADGKVEKGEWKDGKFVG

SEQ ID NO: 70277 - DNA, 327 bp, Unknown
  Obtained from environmental sample
  misc_feature (1)..(327): n is a, c, g, or t
atgatggccgagtgtagacatattaaagaaaaattttcatccgttactccggatattgaatggataaataaattggcaaaagaaggcgattggtttgttataaccgaggatactcaaataagaaaaaagccgcatgaaagaaaagcatggcaagaatcccatattcccattgtttttcttcacaagtcatgggtaaagcagaatttttgggatattgcatggaggtttgtaaggtattggccgcatttaaaagaaagtgtcagtcataatagcaaagctaaatcttttgaattaaccataaacggaaaaataaatattggaaaataa

SEQ ID NO: 70278 - protein, 108 aa, Unknown
  Obtained from environmental sample
  misc_feature (1)..(108): Xaa is any amino acid
MMAECRHIKEKFSSVTPDIEWINKLAKEGDWFVITEDTQIRKKPHERKAWQESHIPIVFLHKSWVKQNFWDIAWRFVRYWPHLKESVSHNSKAKSFELTINGKINIGK

SEQ ID NO: 70279 - DNA, 300 bp, Unknown
  Obtained from environmental sample
  misc_feature (1)..(300): n is a, c, g, or t
atgaatatagaacaggagaggattggcaagtcggcagtggtgttgacgcttaacgggcgccttgacacggtaaacgccccactgcttgagagcaggataaaggagcaggaaaacataacggaactgacgcttgattttaagggggttaattatatttccagtatgggccttagggttctgcttgcggcaaaaaaggcgatgaaagcggaaggcgtaagaatgacaataagtaatttgcaggattccgtccgtgaaatttttgagatgaccggtttcttaaatttgatgggacaggaataa

SEQ ID NO: 70280 - protein, 99 aa, Unknown
  Obtained from environmental sample
  DOMAIN (2)...(97): STAS domain
  misc_feature (1)..(99): Xaa is any amino acid
MNIEQERIGKSAVVLTLNGRLDTVNAPLLESRIKEQENITELTLDFKGVNYISSMGLRVLLAAKKAMKAEGVRMTISNLQDSVREIFEMTGFLNLMGQE

SEQ ID NO: 70281 - DNA, 768 bp, Unknown
  Obtained from environmental sample
  misc_feature (1)..(768): n is a, c, g, or t
gtgaatttggacagcatattccagaagcccgcgcgaattcccgctgatgttattgatacgcttctggttttcggcggcttccccgagccgtttctcaaggctaataaaaggttttacaataattggcagttaacccgcagggttcagattttcagggaggatctgcgcgacctgagccgcgtacaggacgtacggcaaattgaagttcttggcgaattgctggcggcgcgcgcgggatctcaaacagtatttgcaaacctcgccaatgagctgcgcgtgaaagacgacaccgtaaagacatggattacgcttctggaatcactgtacgtttgctttcaaatccagccctggtcaacgaatgtcgccaattccctgcgtaaacagcctaaaatttacctttgggactggagtaccgtagctgacatgggtgcaaggagggaaaattttaccgcgtcacatttactcaaagcggtccattggtggaagacttgcggacttggcgatttcgggctttattatctgcgcgacaaacaaaaacatgaagtggattttcttatcgtccgcgataaaaaaccgttcatgatggtagaggtaaaaacatcatcgcgccggagcataagcccgaatatagagtattttcaaaaaacgcttaaagcgccttatgcctttcagattgcgtttgacatgccggcttccggcatcgacccgtcggaactgggcagaccggtcatcattgccgccgccgaccttttcaaagcgcttgtatag

SEQ ID NO: 70282 - protein, 255 aa, Unknown
  Obtained from environmental sample
  misc_feature (1)..(255): Xaa is any amino acid
MNLDSIFQKPARIPADVIDTLLVFGGFPEPFLKANKRFYNNWQLTRRVQIFREDLRDLSRVQDVRQIEVLGELLAARAGSQTVFANLANELRVKDDTVKTWITLLESLYVCFQIQPWSTNVANSLRKQPKIYLWDWSTVADMGARRENFTASHLLKAVHWWKTCGLGDFGLYYLRDKQKHEVDFLIVRDKKPFMMVEVKTSSRRSISPNIEYFQKTLKAPYAFQIAFDMPASGIDPSELGRPVIIAAADLFKALV

SEQ ID NO: 70283 - DNA, 339 bp, Unknown
  Obtained from environmental sample
  misc_feature (1)..(339): n is a, c, g, or t
ttgactgaatatttgcgcgacgtccgtccgaaactcgcgggcaagacaaacaaaacacaggccctttttatcggaaaaaacggaaaaaggctttcaagaaagggcatttggaaaaattacgcgaaatcggcggcccttgcgggagtgtcgtcgcatttgcacacgcttaggcacagtttcgcgaccgcgcttttaaaaggcggggccgatttaaggactgtgcaggaacttttagggcatgcggatctttccacgacgcaaatttatacgcatgtggacgtgggaactcttcgtgaaaaccaccggcgctatttgccccggttgacaacgtcggaataa

SEQ ID NO: 70284 - protein, 112 aa, Unknown
  Obtained from environmental sample
  DOMAIN (1)...(99): Phage integrase family
  misc_feature (1)..(112): Xaa is any amino acid
MTEYLRDVRPKLAGKTNKTQALFIGKNGKRLSRKGIWKNYAKSAALAGVSSHLHTLRHSFATALLKGGADLRTVQELLGHADLSTTQIYTHVDVGTLRENHRRYLPRLTTSE

SEQ ID NO: 70285 - DNA, 750 bp, Unknown
  Obtained from environmental sample
  misc_feature (1)..(750): n is a, c, g, or t
atgagacagtttaaggaaatagtaattgccatattcgttgtagccgcggtaagcttcctgctttactctttgctgcaaagcgacgctaaaaggagaaacagggaacttgcgaagcgcatagcggaattaagcccgaaaggcgggccgccagaaaccattgagggcttacggaaggcaatcgcgttatacgaagatcaaattgaaagaaatgtaaaagagggcgcgcagacaggaacgtactggaaaattctcgccataaggcttgccgacaagggaatgcacaatgacgcgcttaaagcttttgaaagagccatttattttatttccgaagatccggttgtttattaccttacgggggtcagcgccggaattgtggcaaaatcggttgtaggtttttccgcttccgcggataaagaaagggatcaatattttaaactttcggagaattcttacaaacgggctttggaactggacgcggcttatacaaagcctatgtacggacttgcggtattgtatgtctttgagcttaaccgtccggcggatgctataccgctccttgaccgctatctgtcggcaaacacttcggattttcaggccatgtttattcttgcgagggcgcacgctgtaaccggaaattacaagcaggcgatagaaatttacgaaaaaataatttcaaaatcaaaaaagaaggaaatacaggcggaagcgtcgaataatatagaaattgtccagaggatgatgtatgaatag

SEQ ID NO: 70286 - protein, 249 aa, Unknown
  Obtained from environmental sample
  SIGNAL (1)...(23)
  misc_feature (1)..(249): Xaa is any amino acid
MRQFKEIVIAIFVVAAVSFLLYSLLQSDAKRRNRELAKRIAELSPKGGPPETIEGLRKAIALYEDQIERNVKEGAQTGTYWKILAIRLADKGMHNDALKAFERAIYFISEDPVVYYLTGVSAGIVAKSVVGFSASADKERDQYFKLSENSYKRALELDAAYTKPMYGLAVLYVFELNRPADAIPLLDRYLSANTSDFQAMFILARAHAVTGNYKQAIEIYEKIISKSKKKEIQAEASNNIEIVQRMMYE

SEQ ID NO: 70287 - DNA, 987 bp, Unknown
  Obtained from environmental sample
  misc_feature (1)..(987): n is a, c, g, or t
atgaatagccgcggaatgctggatttatatatttctcttttaccccggttaatgcccgcggaaaaagtaagcatgctggaagcttttgaatgtgaagacgaccttgttcttcaaacaagggaagacatggaacattttttgggccgaaaaataaataatttttgggatattgacaagattcgcgagcaggccgaacaaattgagactgttcacagaaaaagatcaataaattgggtgtcgtggaacaatgccgcgtatccgccgctgttaagagaaatgtacgatccgccggcggttatttattacagaggctgtcttcccgatcctgataaatccctgcttggcatggtaggcacccgaaggccaagcccggaagcggcaaatcaggcttatactctcgcttacggcgtcggaaaggcgggtctttcggtagtttccggtctcgccatcggcattgacgcgatgtcgcacaggggaaacctttcaggcggcgttcccggatacgcggtcctgggttccggggtggacgaaatttacccgacttcaaacaggtctttggcgaagaagatactggacacaggcggcgcgattctttccgagtatccccctggaacgcctcccagcaaatggaactttcccgccagaaacagaattatcgccgccctttcgcgcggcgtgattatcgtggaagcgccaaaaaaatcgggcgcgctgataacagcggctttcgcgcttgatcagggaaaagacctttgggtcgcttcaagcgggcttcaggagcggcagtacggctctttgcacgataagataggaacgatcaaacttgcaagcgacggagcggaaataatttatacggccggcgacgtgctggaaaaatggaatattgaatttatggataaaattgacaccgcaggcagacaggaatgggattcggcgggaatggaacttgcggcctctatggccgattatttggaaattaaaatataa

SEQ ID NO: 70288 - protein, 328 aa, Unknown
  Obtained from environmental sample
  DOMAIN (70)...(284): SMF family
  misc_feature (1)..(328): Xaa is any amino acid
MNSRGMLDLYISLLPRLMPAEKVSMLEAFECEDDLVLQTREDMEHFLGRKINNFWDIDKIREQAEQIETVHRKRSINWVSWNNAAYPPLLREMYDPPAVIYYRGCLPDPDKSLLGMVGTRRPSPEAANQAYTLAYGVGKAGLSVVSGLAIGIDAMSHRGNLSGGVPGYAVLGSGVDEIYPTSNRSLAKKILDTGGAILSEYPPGTPPSKWNFPARNRIIAALSRGVIIVEAPKKSGALITAAFALDQGKDLWVASSGLQERQYGSLHDKIGTIKLASDGAEIIYTAGDVLEKWNIEFMDKIDTAGRQEWDSAGMELAASMADYLEIKI

SEQ ID NO: 70289 - DNA, 2022 bp, Unknown
  Obtained from environmental sample
  misc_feature (1)..(2022): n is a, c, g, or t
atggcggcggaaacaaaggcaaaaaaacctaagggtacaaaaaaagaaaaaccggaaaaacaaactcttgtgattgtggaatctcccggcaaggtaaaaacaatagagaaatatctcggcgcttcctataacgtaaaagcgtctatgggacatttgattgatttgcccaagtcccgtaccggcattgatattgaaaacaactttgaacctgaatacattacggtgcgcggcagggcgaaaatccttaaagaattaaagacagacgcgaaaaaatccggcaaggttctgctggcctgtgataatgaccgcgagggtgaagctatcgcatggcacctgcgtaacgccattaccgcgaaaacggacatggttccaatagagcgcataagttttaacgagataacgccgcaggcggtaaaagacgctgtccgcaacccgcgtacaatcgatgaatataaagtcgccgcgcaaaaagcgcgccgcgtattggacaggcttgtaggttacaatctttctccactgctctggaaaaaagtaaagaacggcctttccgccgggcgcgtccagtctgtggcgctaaggctgatttgcgagcgcgagaaagaagtggaaagttttattcccgaagaatactggactttggaagcggaatttaaatcgggcaagtctgtttatgacgcccagcttacactttggaataacaacaagcccgttttgaaaagcgaagccgaagtaaaagatataatcgataaaattaaggataaggattttatcgtgtccgacgtgcgcgagactgaaaaaaccatccgccccaaagcgccgtttaccacgtcccagcttcagcagacggcggcaaacaagcttggtttcacctcacgcaagacaatgcaggtagcacagcagctttacgaaggcgtagccataggagcttcaagggtaggtttaattacctacatgcgcacggacagcgtccgtatctcgcaaaccgcgcttgaagatgttcgtacatggtttgaaaaaaattatcccaaagaaatgcctgaaaaacccgtggagtataccgtaggcaagaacgcgcaggacgcgcacgaggcaatcaggcccacatataccgaatatacgcccgactcgataaaagaacatttaacaaaggatcagctccgcctgtattcgattatctgggaaaggtttgtttccagccagatgaccaacgcgaaaagcaggacggtaagcctagatataaaggttatcgcgggtaacgaagaagggcttttccgcgtaagcggtacaaaacttgtcgaaaaaggcttttacaaagcgataaaactcctgtcctcaaaggaagaaaacacgggctcctgtccgtctcttcaggcaaacgataaaataaaagttgaaaaattcaaaaatgaacagcattttacgcaggggccgtcccgttattcggacgcttccattgtgcgcactctggaagaaaaaggaatcggaaggccttcgacttacgcttcaattatttcggttttgctggaccgttactatgttacgcgatctaacaaacagctggttccgacggttcttggaaaacttataagcgacgtgttaaccgagcatttcccgttatatgtcgacgccgattttacggcttccatggaatcaaaacttgacgatgtggaagaaaacaaggtcagttggcccgaaatgataaaggaattctggtatccgtttaagacgacggtggacgacgtaacaaaaaatattgaatcgttcaaaggaatactggacgaacctacggatcatgtttgcgaaaaatgcggcaagcccatgttaaaaaaactcggccgcttcggatttttcctcgcgtgttccggatttcccgagtgccgcaacaccaaatccataccgcttgccaagtgccccaaatgcggcggcgatatagtagcgcgcaagacaaagggtaaaaacaaagagttctacggctgtacaaattatccgcagtgcgattttatcagccatttaagccgctaa

SEQ ID NO: 70290 - protein, 673 aa, Unknown
  Obtained from environmental sample
  DOMAIN (21)...(131): Toprim domain
  misc_feature (1)..(673): Xaa is any amino acid
MAAETKAKKPKGTKKEKPEKQTLVIVESPGKVKTIEKYLGASYNVKASMGHLIDLPKSRTGIDIENNFEPEYITVRGRAKILKELKTDAKKSGKVLLACDNDREGEAIAWHLRNAITAKTDMVPIERISFNEITPQAVKDAVRNPRTIDEYKVAAQKARRVLDRLVGYNLSPLLWKKVKNGLSAGRVQSVALRLICEREKEVESFIPEEYWTLEAEFKSGKSVYDAQLTLWNNNKPVLKSEAEVKDIIDKIKDKDFIVSDVRETEKTIRPKAPFTTSQLQQTAANKLGFTSRKTMQVAQQLYEGVAIGASRVGLITYMRTDSVRISQTALEDVRTWFEKNYPKEMPEKPVEYTVGKNAQDAHEAIRPTYTEYTPDSIKEHLTKDQLRLYSIIWERFVSSQMTNAKSRTVSLDIKVIAGNEEGLFRVSGTKLVEKGFYKAIKLLSSKEENTGSCPSLQANDKIKVEKFKNEQHFTQGPSRYSDASIVRTLEEKGIGRPSTYASIISVLLDRYYVTRSNKQLVPTVLGKLISDVLTEHFPLYVDADFTASMESKLDDVEENKVSWPEMIKEFWYPFKTTVDDVTKNIESFKGILDEPTDHVCEKCGKPMLKKLGRFGFFLACSGFPECRNTKSIPLAKCPKCGGDIVARKTKGKNKEFYGCTNYPQCDFISHLSR

SEQ ID NO: 70291 - DNA, 438 bp, Unknown
  Obtained from environmental sample
  misc_feature (1)..(438): n is a, c, g, or t
atggagggggaagcctcgaaattcgctcgttacggggggatcaactccgatagagtgattcttcagtcattgtttatcggtggaacgcttgccggcctggcggggagtcttgagatactcggaaactatcaccggatcatgaccggcttttcttcggggcttggctttgacgggctcagcgtcgcccttctcggcggctcacatccgcttggcgtggtgatcgtcgccatcctgctcgcgggaatacgccagggggcgcagctcggcctgcagatcggcctgcaaattccccgcgaactcggcggcgtgctcatagccttgatcatcctgttcatcgcggctgaaaacatataccggcccctgcttgaacggctctatgaccggatcgccggacagattgccatgcttaaaaaggccgcgcgtaaaaaaagggaataa

SEQ ID NO: 70292 - protein, 145 aa, Unknown
  Obtained from environmental sample
  misc_feature (1)..(145): Xaa is any amino acid
MEGEASKFARYGGINSDRVILQSLFIGGTLAGLAGSLEILGNYHRIMTGFSSGLGFDGLSVALLGGSHPLGVVIVAILLAGIRQGAQLGLQIGLQIPRELGGVLIALIILFIAAENIYRPLLERLYDRIAGQIAMLKKAARKKRE

SEQ ID NO: 70293 - DNA, 429 bp, Unknown
  Obtained from environmental sample
  misc_feature (1)..(429): n is a, c, g, or t
ttgaacggctctatgaccggatcgccggacagattgccatgcttaaaaaggccgcgcgtaaaaaaagggaataacatggaattcttttttagtttttttaccataaatcttataagcagcgcgatacggctggcgactccgatcatccttgccgccctgggggccgccatctgtaacaaggcgggggtgctgaacctggccatcgacggaaagatcacggtaggcgcgtttgtggcgattgtcactacttactacttcaggaattactccgcttttggagcggcccatcccgcgggatccactcttttgggcgtgttaagcgccatgtttgcgtgcgccttattggggctttttttcgcgtgggtccatgtttcgttcagggttaacctgggggatccttgctattgcccacaacatccctttccctga

SEQ ID NO: 70294 - protein, 142 aa, Unknown
  Obtained from environmental sample
  misc_feature (1)..(142): Xaa is any amino acid
MNGSMTGSPDRLPCLKRPRVKKGNNMEFFFSFFTINLISSAIRLATPIILAALGAAICNKAGVLNLAIDGKITVGAFVAIVTTYYFRNYSAFGAAHPAGSTLLGVLSAMFACALLGLFFAWVHVSFRVNLGDPCYCPQHPFP

SEQ ID NO: 70295 - DNA, 1428 bp, Unknown
  Obtained from environmental sample
  misc_feature (1)..(1428): n is a, c, g, or t
atgatcacacatggaacgcgtatcagtggctttattacatttatatggtcgcgcgccgcgtcgcttatctactgcgggcagcgcaacggttacggttatcgcgatacagtgcaggacattcagggcatcattcaccttgatcctgaaatggctcttgataaaatcaagttcatgatttccgcacaggttaatcacggcggagcgcttcctcttgtaaaatatgaccacaatcccggacacgaagataaaccggaagatgaatcctacagaaaaaatacaggacatccgtcctaccgcgcggatgatgcgttatggttgtttcccacagtctggaaatatgtagcggaaaccggcaattcaaaaattcttgatgaagttatcccatacgctgataaaggacaggatacgctttttgatcatcttaaaaaggcaatcggattttcgttgaacaatttggggattcacggacttcccgcggggcttcatgccgactggaacgactgtctgcggctgggagcaaaaggcgtttcggtatttgtcgcgttgcagttgtactacgcgtttgaaataatgatccgttttgcaaagtacaaaaaagattctgcagcggaaaaagaaatgacagaattaaaagaaaagttcggcaaaataattgaagaaaaatgctgggataaggatcgttttgtacgcggcattactgaaaatgacgtaacggtaggtaaacccggcgatcctgaggcaaacatctggcttaacccgcaaagctgggcagtcataagcggtttcgcggatgaaaaacgcggcaaggcaatacttgatttagttcacaaagaattaaacacaaagtacggcgcgcgtattatgtctccatcttaccgtaaacacgcatttgacggagcgcttgctttattgttcaacccgtccacaaaagagaacggcggtatttttctgcaaactcagggctggataattcttgcggaagctctgcttggacgcggaggacgcgcagttgagtattatcttgaaagctgccccgccgcgcagaacggcatcgcggatacacgccttgtggaaccctatgtttactcgcaatttaccgaaagcgttgacagcccgtttgaaggacgcagtcatgtacattggcttacaggtactgcaagcacctgtatggtcggcagcgtagaaggaattttgggattaagaccggatattgaaggcttgcgccttgcgcccgccgttccgtcatcatggaaatcatttacaatagaaaaaactttcagggggagcaagcttaacataaaagtaaataaccctgacggacatgaaagcggatgtaaaaaactgacagttaacggagcaacagttgaaggaaactacattcccgcttcaatattgaaggcggaaaatgagattattctggatatgtag

SEQ ID NO: 70296 - protein, 475 aa, Unknown
  Obtained from environmental sample
  misc_feature (1)..(475): Xaa is any amino acid
MITHGTRISGFITFIWSRAASLIYCGQRNGYGYRDTVQDIQGIIHLDPEMALDKIKFMISAQVNHGGALPLVKYDHNPGHEDKPEDESYRKNTGHPSYRADDALWLFPTVWKYVAETGNSKILDEVIPYADKGQDTLFDHLKKAIGFSLNNLGIHGLPAGLHADWNDCLRLGAKGVSVFVALQLYYAFEIMIRFAKYKKDSAAEKEMTELKEKFGKIIEEKCWDKDRFVRGITENDVTVGKPGDPEANIWLNPQSWAVISGFADEKRGKAILDLVHKELNTKYGARIMSPSYRKHAFDGALALLFNPSTKENGGIFLQTQGWIILAEALLGRGGRAVEYYLESCPAAQNGIADTRLVEPYVYSQFTESVDSPFEGRSHVHWLTGTASTCMVGSVEGILGLRPDIEGLRLAPAVPSSWKSFTIEKTFRGSKLNIKVNNPDGHESGCKKLTVNGATVEGNYIPASILKAENEIILDM

SEQ ID NO: 70297 - DNA, 1128 bp, Unknown
  Obtained from environmental sample
  misc_feature (1)..(1128): n is a, c, g, or t
atgatttataaaccgtttggaaaaacagggataaaagtttcggctcttggcttcggcgcaatgcgcttacccatgaaagaggttgacggcaaaaaaatagtagacgaagaccttgccgtccccctcatgcaaaaagcgtttgacatgggcgttaactacgttgataccgcgccgctttactgcgaaacattaagcgaaatagccgtaggcaaagcgttgaaaggctaccgtgacaaagtgtatctgtccacaaagaatcccatcgaagacgccgacggcgatcactggatggaacggctggaaaaatcgcttaaaaaactggacacggactacatcgacttttatcatttttggggtatctcgttaaaaagtttcgagtcatggcagggattaaaattcggtcctattgaagcggcgtacaaagcgaaggaacaggggcttataaagcacatttcattctcataccacgacgcggcggaaaattataaaaagatagtagactcaggtcactttgaaacaactcttgttcagtacaatatgctcgatcgctccaatgaggaaaatatagcctacgctaagtccaagggtttaggcatcgtggtaatgggacccgtaggcggcggacgtctcggcgcgccaagcgaaaaaatacaaagcctgcttaaaaacaaatcgacaagcaccgcggaaatggctctgcgttttgttctttcaaatgaaaatatagacatggctctttccggcatgggcaatcttgacatgttaaaagaaaattttgaaatcgcctcgcgtacaggacatttaacggaagaagaactgcgtcaggtgaaatccatgatggaagaaaacaaaaaccttgccaaactttactgcacaggctgtaattactgcaaaccttgcccgcagggaatagacattccatatctttttgaaataatgaaccgctatcgcgtctacgatttaaaagaacacgcaaaaagcgcatacaaggaaatgatggacggcttaagctggataaaaagcgcggacgcgtcaaagtgcgttgcctgcggcgcgtgcgaagaaaaatgcccgcaaaagctgccgattatcaaacagctgcaagagacgcataagacattggtttag

SEQ ID NO: 70298 - protein, 375 aa, Unknown
  Obtained from environmental sample
  DOMAIN (340)...(363): 4Fe-4S binding domain
  misc_feature (1)..(375): Xaa is any amino acid
MIYKPFGKTGIKVSALGFGAMRLPMKEVDGKKIVDEDLAVPLMQKAFDMGVNYVDTAPLYCETLSEIAVGKALKGYRDKVYLSTKNPIEDADGDHWMERLEKSLKKLDTDYIDFYHFWGISLKSFESWQGLKFGPIEAAYKAKEQGLIKHISFSYHDAAENYKKIVDSGHFETTLVQYNMLDRSNEENIAYAKSKGLGIVVMGPVGGGRLGAPSEKIQSLLKNKSTSTAEMALRFVLSNENIDMALSGMGNLDMLKENFEIASRTGHLTEEELRQVKSMMEENKNLAKLYCTGCNYCKPCPQGIDIPYLFEIMNRYRVYDLKEHAKSAYKEMMDGLSWIKSADASKCVACGACEEKCPQKLPIIKQLQETHKTLV

SEQ ID NO: 70299 - DNA, 1011 bp, Unknown
  Obtained from environmental sample
  misc_feature (1)..(1011): n is a, c, g, or t
ttgcctgcggcgcgtgcgaagaaaaatgcccgcaaaagctgccgattatcaaacagctgcaagagacgcataagacattggtttagccggaaaaatatgaaagtaataaccgctaatcaaataacaaaaatatacccgaacgggaaaaaagcgttaaactgcgttgatttaaatattgaagaaggtgaaatatttggattcttgggtccgaatggggcgggaaaaactacggctgttaaattgcttaacggaatgttgcagataacggaaggttcctgcagtgttttcggcatagagccggcgaagtcacctgaaaaaatacatgcgctgtccggcgtagtaactgaacacgcccaaatgtacaacaatcttacaggacttcaaaacttaatgtttttcggagaagtctttgacataggcgcggatgaaacaaaacgcagggctttggaaattcttgaatgtctggagttatcggatgcaaaggacagaaaactttcggagtactccaccggtatgcgtcagcggttgtcgctggcgcgcgccatgcttcatcagccgaaaatactttttttggatgaaccgacttccggattggatcctgagagcgcgcaaaatgtaaataatttaataaagagccttgcccgcgataaaggaacaacaattttcctttgtactcatcagttaagatacgccgaggaaatttgtacaaaatacggtttaataagcgaagggagtatgcttgccgccggtacattagatgaacttcattcgccggtattttcgggaatgacggtaaaattaaaaagcgacaaatatccgcagggacttaaaacgcggcaggacggcgaatatatgttagtcgatgtaaattcgcagtatgaaataccgctgttggtaaaacaaattgtcgattcgggcggtaatgtgtatcatgtgtcggcgcaaaaacattcgctggaagaaatttattttgcgttaatcgaaaaacgcaaggatagtgaaaatgattaa

SEQ ID NO: 70300 - protein, 336 aa, Unknown
  Obtained from environmental sample
  DOMAIN (62)...(244): ABC transporter
  misc_feature (1)..(336): Xaa is any amino acid
MPAARAKKNARKSCRLSNSCKRRIRHWFSRKNMKVITANQITKIYPNGKKALNCVDLNIEEGEIFGFLGPNGAGKTTAVKLLNGMLQITEGSCSVFGIEPAKSPEKIHALSGVVTEHAQMYNNLTGLQNLMFFGEVFDIGADETKRRALEILECLELSDAKDRKLSEYSTGMRQRLSLARAMLHQPKILFLDEPTSGLDPESAQNVNNLIKSLARDKGTTIFLCTHQLRYAEEICTKYGLISEGSMLAAGTLDELHSPVFSGMTVKLKSDKYPQGLKTRQDGEYMLVDVNSQYEIPLLVKQIVDSGGNVYHVSAQKHSLEEIYFALIEKRKDSEND

SEQ ID NO: 70301 - DNA, 1125 bp, Unknown
  Obtained from environmental sample
  misc_feature (1)..(1125): n is a, c, g, or t
ttgactttgattttgactttgacttccatctctaaacataaaaaacaaagaaaggcaagtaaaatgaaatcgtacaacatagctttaatgggcggcgacggaacaggtcccgaagtgcttagtgaaggtgttaaagttttggacgcggcggcttccaagcacggcctcaagctcaattataccgactacgatttcggcggcgagcgctatctgcgcaccggcgagacgctctcacagtccaacatcgacgaactcgccaagcaagacgcgatcttcctaggcgccatcgggcatcccgacgtcaagcccggcatcctcgaggtggggattctgctgaagctccgcttcgcccttgaccagtatatcaatctgcgccccgtcaaactctaccccaacgtggagacgccgctaaaggataagggcccggagcaaatcgacttcgtggtgataagggagaacagcggcggcatatacaccggtatgggcggcgcgacgatgataggcacgcaaaacgaaatcgccacgcaggtcatgtgttactcgcgtcccgttgtggagcgttgcatacgctacgcctacgacctcacgcgtaagcgcaacaagaataagacgctgacgctggttcacaagtgcaacgtcttgacccacgccggtgatttatgggttaggacgcataaagaagtcggcgacgccgattataaagatatcaagcaggattacaaccacgtcgacgcttgcacgatgtggatggtgaaaagccctgagtattatgatgtgatagtgaccgagaatctcttcggcgacataatcaccgacttgggcgcgatgatccaaggcggcatgggtatagctgccggcggcaacatcaacccgcacggcgtctcgatgttcgaacccatcggcggcagcgcccccaaatacaccggcaaaaacgtgatcaacccgttcgccgcgatctgcgccggagcgatgatgctggaaacgcttggcgaagacaaagccgccgccgcgattgacaaggccgtttacgacgccctcgcttccggtaaaataaagagcatgtccgccggaaagatgggcatgggaacgaaagaagtcggagaccttgtggcgtcgttggtgtaa

SEQ ID NO: 70302 - protein, 374 aa, Unknown
  Obtained from environmental sample
  DOMAIN (26)...(370): Isocitrate/isopropylmalate dehydrogenase
  misc_feature (1)..(374): Xaa is any amino acid
MTLILTLTSISKHKKQRKASKMKSYNIALMGGDGTGPEVLSEGVKVLDAAASKHGLKLNYTDYDFGGERYLRTGETLSQSNIDELAKQDAIFLGAIGHPDVKPGILEVGILLKLRFALDQYINLRPVKLYPNVETPLKDKGPEQIDFVVIRENSGGIYTGMGGATMIGTQNEIATQVMCYSRPVVERCIRYAYDLTRKRNKNKTLTLVHKCNVLTHAGDLWVRTHKEVGDADYKDIKQDYNHVDACTMWMVKSPEYYDVIVTENLFGDIITDLGAMIQGGMGIAAGGNINPHGVSMFEPIGGSAPKYTGKNVINPFAAICAGAMMLETLGEDKAAAAIDKAVYDALASGKIKSMSAGKMGMGTKEVGDLVASLV

SEQ ID NO: 70303 - DNA, 1587 bp, Unknown
  Obtained from environmental sample
  misc_feature (1)..(1587): n is a, c, g, or t
atgtcaaccgactccaacgtcaaaccgcactgcgtcgacctatacgacaccacccttcgcgacggcaaccaagccctaggcatctctttgtccctaaaggataaactgatgatcgccgagaaactcaacgacttaggattgcactacatagagggcggttggcctaaccctaccaataccgttgatacggagttctacgctaaagtcaagaaaatgaagttgaaggccaagatagcggctttcgggtcaacgaaacgtcccggcaacaaagtttccgaagacccgtttatgcaggcgctgataactaccggcgcccccgtcgcgaccatcttcgggaagtcttgggacctccacgtcaaaaaggtcatcaacacaacgcttgatgagaatttgtcgatgatcaacgattccatccgcttcctcaagaaacattttgacgaggtcgtatacgacgccgagcacttcttcgacggctacaaggcgaatcgcgaatacgctataaagacgctcttagccgccaaagacgccggggcggactgtcttgtcttgtgcgataccaacggtggattattgccggacgaggcgacggagattttccgtattgtcaagtcgaaaattaatgacgcgaaattcggaacgcacatgcacaacgactccggctgcgccgaggcgtcctcctgcctctgcgtgatagagggcgcctctcacgttcaggggacgatgaacgggctgggggagaggtgcggcaacgctaatctctgcacgataattcccaatctgcagctcaagcgaggatttaacctggtgacgcccgagcagctgaaaatgctgacgcccgcctctctctacgtggccgagcttgccaacacgacgccgaacatccgccacccgtacgtcggcgaggcggcgttctcccacaaggccggcgcccacgccgacggggtgcgcaaggtgcggcagtcgtttgagcatgttgatcccgaaacggtcggaaacagccgccggttcgtggtaagcgatcaggccggggcgagcacgatactggagaaactgtcaaagatcaagagcggcctcgacaagaaagatccgatcgtcaaaaaagtattggcgaagataaaggagatggaggccgccggttaccaattcgaggccgccgacgcctcgtttgaacttatagttcgcaaggttctgggcgagttcaaagagccgtttaccgtcaaagccttcagggtgatcgaggagaaaagagagagcggcgagacctattccgaagcgacgatacaagtgatcgaggacggagtgctggagcacaccgccgccgagggcgacggcccggtaaacgcccttgacaacgcgttacgcaaagcgttagtgaagttcttcccgtcgctgaaaggcgtgaagctggacgattacaaagtgagggtgctggacggcaaagacggcaccgcggccaaggtaagggtattgatagagtcgtccgacaaattgaaccgatggggaaccgtaggagtcagcgagaacataatagaggcgtcctggatcgcgttgattgacagtttaatgtataaattgatgaaaggatga

SEQ ID NO: 70304 - protein, 528 aa, Unknown
  Obtained from environmental sample
  DOMAIN (20)...(290): HMGL-like
  misc_feature (1)..(528): Xaa is any amino acid
MSTDSNVKPHCVDLYDTTLRDGNQALGISLSLKDKLMIAEKLNDLGLHYIEGGWPNPTNTVDTEFYAKVKKMKLKAKIAAFGSTKRPGNKVSEDPFMQALITTGAPVATIFGKSWDLHVKKVINTTLDENLSMINDSIRFLKKHFDEVVYDAEHFFDGYKANREYAIKTLLAAKDAGADCLVLCDTNGGLLPDEATEIFRIVKSKINDAKFGTHMHNDSGCAEASSCLCVIEGASHVQGTMNGLGERCGNANLCTIIPNLQLKRGFNLVTPEQLKMLTPASLYVAELANTTPNIRHPYVGEAAFSHKAGAHADGVRKVRQSFEHVDPETVGNSRRFVVSDQAGASTILEKLSKIKSGLDKKDPIVKKVLAKIKEMEAAGYQFEAADASFELIVRKVLGEFKEPFTVKAFRVIEEKRESGETYSEATIQVIEDGVLEHTAAEGDGPVNALDNALRKALVKFFPSLKGVKLDDYKVRVLDGKDGTAAKVRVLIESSDKLNRWGTVGVSENIIEASWIALIDSLMYKLMKG

SEQ ID NO: 70305 - DNA, 549 bp, Unknown
  Obtained from environmental sample
  misc_feature (1)..(549): n is a, c, g, or t
atgacaataatgccgccacaacagttagactggtctaacctaggcttcgagtacatgcagaccgactcctacatccgcgccgacttcaaggacggccgctggggcgaggtcgcggtttgcaccgacccgatgttctccatccatgtcgccgccgtctgtctgcactacggccaggcctgcttcgaagggctgaaagcctttcgccgcaaggacggttccgtggcgttattcaggccgcaagataacgcggagaggatgatcggcaccgcgaagcgcaccatgatggaaccgccgccgcttgagatgtttatagaggcggtcaagaagaccgtcgcgttgaacatcgattgggtgccgccctacggcaccggggcgagcttctacgtccgcccgctactgataggcgcttccccccgcatcggcgtcggcccgtccgacggctacgtgtttttctctctcggcatgcccgtagggccgtattacaagaancggatttttttcggtaaaagcctacatccaagagtcctacgaccgcggccgccccgctag

SEQ ID NO: 70306 - protein, 182 aa, Unknown
  Obtained from environmental sample
  DOMAIN (36)...(182): Aminotransferase class IV
  misc_feature (1)..(182): Xaa is any amino acid
MTIMPPQQLDWSNLGFEYMQTDSYIRADFKDGRWGEVAVCTDPMFSIHVAAVCLHYGQACFEGLKAFRRKDGSVALFRPQDNAERMIGTAKRTMMEPPPLEMFIEAVKKTVALNIDWVPPYGTGASFYVRPLLIGASPRIGVGPSDGYVFFSLGMPVGPYYKXRIFFGKSLHPRVLRPRPPR

SEQ ID NO: 70307 - DNA, 444 bp, Unknown
  Obtained from environmental sample
  misc_feature (1)..(444): n is a, c, g, or t
ttgtacggcgactacgagggcaagcataaggggtatcctatctgcttgtatttagactcggcccatcatcgttatatcgacgagttcggtacgtcgaattttttggggataacaaaagacggccgctacgtaacccccgagtcgtcgtctatactgccgtccattacaaacaagagtctgcaaaagatagcggagggcatgggcttaaaagtggagcgcaggaagattgacatagaggaattacccgatttcaaagaggtgggagcctgcgggacggcggccgtaataacgccggtctactccattactcgcggcgataaggtgtatacgttcggcaaggaacacgaggcgggggagacccttacccgtttgttcaaagagatacaggggatccagtacggggagatggaggataggtacgggtggatgttggcggttagttga

SEQ ID NO: 70308 - protein, 147 aa, Unknown
  Obtained from environmental sample
  misc_feature (1)..(147): Xaa is any amino acid
MYGDYEGKHKGYPICLYLDSAHHRYIDEFGTSNFLGITKDGRYVTPESSSILPSITNKSLQKIAEGMGLKVERRKIDIEELPDFKEVGACGTAAVITPVYSITRGDKVYTFGKEHEAGETLTRLFKEIQGIQYGEMEDRYGWMLAVS

SEQ ID NO: 70309 - DNA, 804 bp, Unknown
  Obtained from environmental sample
  misc_feature (1)..(804): n is a, c, g, or t
ttgaaggaaatcaacagcatccctctcttaagcagggaagaggaagacgctattgcgcgcgctgccgcgggaggcagtcttacggcccgcaacaaattggtcaaaagcaatctccgctttgtcgtcaatgtggcaaagaagtaccaggggcacgggatgcctctgccggatctaatcagcgaaggcaatatcggattgataaaggctgtagagaaatacgatgccaacaggggtttccattttatttcctatgcggtgtggtggatacgacaaaccatactcaaggcgcttgccgatcagtcaaggctcatccggctgcccgtcaaccgggcaaatgacattatccagattgaaaaagcaaaaaaattgcttgccggcagttcaaactgtgaaactgatgtacgtgaactggcccagctgctcagtatggacgaagaccatattgaggacatgttgaccatttccaaagatactctctcgctggaaaaatcggttgaagccggcaggagcgcctcaccgcttggaaactttgtaatcgacacccgctatgacacgcccgaccaggcgatattcaagaaatcccttaagaacgacattgaggaagtgttaagcactttgagccagaaggaagcggaaataatacgctgccgtttcgggcttggccagcagaaaccgatgaacttccaggaaatcggcgactactttaatctttccaaggaacgcatccggcagattgaggaaaaagctttaaggatgctgcaacagcccagccggaaagccaaattggaagcgtacgtggcgtaa

SEQ ID NO: 70310 - protein, 267 aa, Unknown
  Obtained from environmental sample
  DOMAIN (202)...(255): Sigma-70, region 4
  misc_feature (1)..(267): Xaa is any amino acid
MKEINSIPLLSREEEDAIARAAAGGSLTARNKLVKSNLRFVVNVAKKYQGHGMPLPDLISEGNIGLIKAVEKYDANRGFHFISYAVWWIRQTILKALADQSRLIRLPVNRANDIIQIEKAKKLLAGSSNCETDVRELAQLLSMDEDHIEDMLTISKDTLSLEKSVEAGRSASPLGNFVIDTRYDTPDQAIFKKSLKNDIEEVLSTLSQKEAEIIRCRFGLGQQKPMNFQEIGDYFNLSKERIRQIEEKALRMLQQPSRKAKLEAYVA

SEQ ID NO: 70311 - DNA, 615 bp, Unknown
  Obtained from environmental sample
  misc_feature (1)..(615): n is a, c, g, or t
atggacagcgacattaaagacttgaaccttgattacactatatgcgctgtacattacctgacgccgcctcacggcgacttgtttacaattgacggtcatctgaagaaactggagaacggtatattgaacggttttgacggcgacggagaatcaatgttaagcgcctacttacacaatgttatagaaatggtcaccctgggtggatttgacattgtagcccatcttgatctggtaagaaaaaatcacagtttacagggaagccccgcttttcgtgagaggcagggccgctggtttgaattgaagaacgcggattacatgcataaaatggaagaaattgtccgcgccatttcttccgccggccttgttgttgaagccaacaccggcgggtataaccgcggctatattacagacacctaccccccgcttgcgattctacgcctgcttcacagatacaatgttccgattataatcagcgccgatgcccatcgcgccgttgatcttgacggccattaccgggaagcccggcaaattttgctcgatgcgggctataccagccatgttctatttgaaggcagaaaaaacggaaagcctatctggattgaacgtccactttaa

SEQ ID NO: 70312 - protein, 204 aa, Unknown
  Obtained from environmental sample
  misc_feature (1)..(204): Xaa is any amino acid
MDSDIKDLNLDYTICAVHYLTPPHGDLFTIDGHLKKLENGILNGFDGDGESMLSAYLHNVIEMVTLGGFDIVAHLDLVRKNHSLQGSPAFRERQGRWFELKNADYMHKMEEIVRAISSAGLVVEANTGGYNRGYITDTYPPLAILRLLHRYNVPIIISADAHRAVDLDGHYREARQILLDAGYTSHVLFEGRKNGKPIWIERPL

SEQ ID NO: 70313 - DNA, 309 bp, Unknown
  Obtained from environmental sample
  misc_feature (1)..(309): n is a, c, g, or t
atggataaaaaattttcttcgcttcatacacataccgtattctgcgacggcaaagacaatgtggaaacaatgtgtcggacggcttatgaaaaagggctagcgtccattgggtttagttcccatgctcctgtcggaagtaccgggctaaaaacacactggcacataaaagacgataagcttggggaatatattaacgaggttaaggccgcccagcttcgctgggagggtaagctccccgtctaccttgggcttgaggtagattacatcaagggattgcgctcgccatggacagcgacattaaagacttga

SEQ ID NO: 70314 - protein, 102 aa, Unknown
  Obtained from environmental sample
  misc_feature (1)..(102): Xaa is any amino acid
MDKKFSSLHTHTVFCDGKDNVETMCRTAYEKGLASIGFSSHAPVGSTGLKTHWHIKDDKLGEYINEVKAAQLRWEGKLPVYLGLEVDYIKGLRSPWTATLKT

SEQ ID NO: 70315 - DNA, 471 bp, Unknown
  Obtained from environmental sample
  misc_feature (1)..(471): n is a, c, g, or t
atgagaaaacagcttgtacgttgtaccattaacggcaaggccacggaaaccacggttgacatccgcgcgtcgctgacggatatgctgcgtaatgaatatcgcctgaccagcgtcaaaaaaggctgcgaggtgggcgaatgcggtgcatgcaacgtgatcatcaacggggaatgttttaattcctgcatttacctcgcaatctggaccgaaggcaaggagattaccaccaccgaggggctattaagcgcggacggggaactctccgcgatccagcaggcgttcatcgacgagggtgcggtgcagtgcggtttttgcacgccgggctttttgatgagcgccactgaaattatacgctccggaaaaacctacagcgacgcggaactgcggaaactgctgtccgggcacttatgccgttgcacgggctatgagaacatattccgcgccgtaagaaaacttgttggtcagaaataa

SEQ ID NO: 70316 - protein, 156 aa, Unknown
  Obtained from environmental sample
  DOMAIN (76)...(151): [2Fe-2S] binding domain
  misc_feature (1)..(156): Xaa is any amino acid
MRKQLVRCTINGKATETTVDIRASLTDMLRNEYRLTSVKKGCEVGECGACNVIINGECFNSCIYLAIWTEGKEITTTEGLLSADGELSAIQQAFIDEGAVQCGFCTPGFLMSATEIIRSGKTYSDAELRKLLSGHLCRCTGYENIFRAVRKLVGQK

SEQ ID NO: 70317 - DNA, 882 bp, Unknown
  Obtained from environmental sample
  misc_feature (1)..(882): n is a, c, g, or t
atgtatgatattgaagatattttagaagctgaaagtcctgctcacgcggttgagttgctgcaacagcatcctgacgcgaaaattatcgcgggggggagcgacgtgttaatcgaaatccgcgagggcaggcttgcgggccgcacattgatgagtattcagaaacttgactgtttgcggggagtaaagattgatccggacggcgctatccgcattggcgcgttgacgagcttttcccatgtcgcgcaagacccggtcatacagaaaaacatccccgtgcttgcggaggcggtgttgactatcggcgggccgcagttgcgcaacatcggcactataggcggtaatgtctgcaatggggttacatccgcagacagcgcctcgaccctgctggcctatgacgtggtgatggaatacctcggccccaacggactgcggctggttcctatttccgaacattataagggcgccggcaaaaccgcccttgcccataacgaaatcttgcaggctattcttgttccaaaggaaagttatgaaaattgttttggcaattatataaaatacgccatgagggaagccctggacatcgcgaccctggggtgttcggcaaatgtccggctttcaaaagatcgtaaaactattgacaggctccgtttggcttatggcgtcgccgggcccgtccccatgcgcgttcccacagcggaacaggccgcggccggaaaacccccaaacgccgaaaccgcggccgcaattgccagactggtgttaaacgacattaatccccgctcaagctggcgggccagcaaagaatttagattgcacctggcggaagagcttgccaaacgggcgattaccgaatcgcttaaacgcgcgggggtatcgttatga

SEQ ID NO: 70318 - protein, 293 aa, Unknown
  Obtained from environmental sample
  DOMAIN (182)...(290): CO dehydrogenase flavoprotein C-terminal domain
  misc_feature (1)..(293): Xaa is any amino acid
MYDIEDILEAESPAHAVELLQQHPDAKIIAGGSDVLIEIREGRLAGRTLMSIQKLDCLRGVKIDPDGAIRIGALTSFSHVAQDPVIQKNIPVLAEAVLTIGGPQLRNIGTIGGNVCNGVTSADSASTLLAYDVVMEYLGPNGLRLVPISEHYKGAGKTALAHNEILQAILVPKESYENCFGNYIKYAMREALDIATLGCSANVRLSKDRKTIDRLRLAYGVAGPVPMRVPTAEQAAAGKPPNAETAAAIARLVLNDINPRSSWRASKEFRLHLAEELAKRAITESLKRAGVSL

SEQ ID NO: 70319 - DNA, 1866 bp, Unknown
  Obtained from environmental sample
  misc_feature (1)..(1866): n is a, c, g, or t
atgggggaaaacgcctctctgcttcatgaagaatgtccgcgtaatatcctgaagcagactaacattattgacggtaattttgacgaagctattaaagaagaagggctgctctgttatgcggaggtgttcgagaccccgattgtgcagcactgccatattgaaacggcgacatcctgggcgtatatggaaaaaggcaggatcgttattgtttcttcaacacagattccccatattctcagacgaattaccgggcaggcgctgggtattccatggggcaaggtgcgtatcatcaagccttatatcggcgggggctttggcaacaagcaggacagcctttttgaaccgctgaacgcgtttttatgcacaaaagtcggggggcggctcgtgaaacttgagctttcgcgggaggaagtattcgccgccaccagggtgcggcacagcgaaaaaatataccttaaaagctgggtgcggcccaacggcaggattgtggctcgttcctataccgcgtattcaaaccagggggcttacggctcccacggacatggaatcgccgccaaaggaaccaacgtattccgccagctctacaacgatgaaaaggcccgcaaggctgatatttacacggtttacacgaataccgccgcggcgggggcaatgcgcggttacgggacgccccaggcggtgttcgcgatagagtcccacatcgaagacatcgcgaaaagccttaaacttgacccgctggaattccgtttcctcaacgtgatgcccgttggttttgttgataattttaccaaaaacgtcaatcgctttgattcattccgccaatgcgtggaggcggggaaaaaacggatcaaatgggacgaaaaacggacgcgttatgcgaatcaaagcggcccggtcaggcgcggcatcgggatgtccctgttctggtataacacagccgtctggcccatttcgatagaaatttcatcctgccgcatggtgatgaaccaggacggcagcgtgcagatacagcttggcgaaaccgaaatagggcaaggtgcggacactgccttttcccagatggccgcccagaccctggggataccctggcagatggttcatatcatcagcacgcaggacacggacattacgccttttggattaggctcttacggttcgcggcaaacctacgttggaggcgcgggcgtgcataaggccgcccttctgctaaaggaaaaaattctaaaggccgcgtccctgtacacaaaattacccgtcggcgaacttgatatcgttgacggttatattgttaatacttcgcttaaccagcagaggatttgcagccttgaagaacttgtcattgataccctgtaccacaccgagcattccgaacattttaccgccgagactaccgcccaggtaaaaagcaacgcctttagtctgggctgcgcctttgccgaagtagaagtcgacatcccgttctgcaaaatcaagctgctggaaatggttaattgccatgactgcggcactttgatcaacccaaaaaccgccgaagcgcaggttcacggcggcatgagcatggcgattggctatggattgtacgagaagatgttatacgattccaaaacaggaaagctacttaacggcaatctgcttgattacaaactgccgacgattatggaccacccgaggcttgaagctgaattcatcgaaaaccacgagccgaccagcccctacgggacaaaggccctcggcgagccgccgaccgtgccgggcgcttcggctattcgtaatgccgtgcttcacgccaccggcgttggcatcaataccattccgcttacgccccatgtgctttttgcggaattcagcaaagcggggttgatataa

SEQ ID NO: 70320 - protein, 621 aa, Unknown
  Obtained from environmental sample
  DOMAIN (1)...(556): Aldehyde oxidase and xanthine dehydrogenase, molybdopterin binding domain
  misc_feature (1)..(621): Xaa is any amino acid
MGENASLLHEECPRNILKQTNIIDGNFDEAIKEEGLLCYAEVFETPIVQHCHIETATSWAYMEKGRIVIVSSTQIPHILRRITGQALGIPWGKVRIIKPYIGGGFGNKQDSLFEPLNAFLCTKVGGRLVKLELSREEVFAATRVRHSEKIYLKSWVRPNGRIVARSYTAYSNQGAYGSHGHGIAAKGTNVFRQLYNDEKARKADIYTVYTNTAAAGAMRGYGTPQAVFAIESHIEDIAKSLKLDPLEFRFLNVMPVGFVDNFTKNVNRFDSFRQCVEAGKKRIKWDEKRTRYANQSGPVRRGIGMSLFWYNTAVWPISIEISSCRMVMNQDGSVQIQLGETEIGQGADTAFSQMAAQTLGIPWQMVHIISTQDTDITPFGLGSYGSRQTYVGGAGVHKAALLLKEKILKAASLYTKLPVGELDIVDGYIVNTSLNQQRICSLEELVIDTLYHTEHSEHFTAETTAQVKSNAFSLGCAFAEVEVDIPFCKIKLLEMVNCHDCGTLINPKTAEAQVHGGMSMAIGYGLYEKMLYDSKTGKLLNGNLLDYKLPTIMDHPRLEAEFIENHEPTSPYGTKALGEPPTVPGASAIRNAVLHATGVGINTIPLTPHVLFAEFSKAGLI

SEQ ID NO: 70321 - DNA, 828 bp, Unknown
  Obtained from environmental sample
  misc_feature (1)..(828): n is a, c, g, or t
atgtctgatatgatgagccagttggaaaagaaagcgcaagagatcgcgggggtgacaataaagttggcctcccccgagaccatcaggagttggtctttcggcgaagtcaccaaaccggagaccataaactaccgctcgttcaagcccgaaaaggacggactcttctgcgagaagatattcggccctgtccgcaattgggagtgcaactgcggcaagtacaagcgcatccgttaccgcggcgtcgtctgcgaccgttgcggcgtggaggttatgcactccaaggtgcggcgcgagcgtatggggcacatagagcttgccgagcctgtcgtacatatctggttcctgaagagcgttccctcccacatcagttatctgctcggtatctcaaacagcaatctcgagaggatcatctactacgaatcttacgtggtgattgatccgggcgacactaatctgcgtaaggatcagcttctctccgaggagcagtacttcgagctcatggagcagaataagaaatttgacgctaagatgggcgggcaggctgtgttggagcttttggccaaggttgaggtggaaaagctggtgatagagttgcgccatttggttaagcgtgagacgtcggagcagcgccgcttggagcatttgaagcgtttgcgtgtcgccgaggctttcaatagatccaagaacgatccgcagaacatggtgcttaaagttcttccggtgttgccgcccgatttgcggccgctcgtacctcttgagggcgggcgtttcgcgacctcggatttgaacgacctttaccgccgcgtgataaatgggaacaaccgttga

SEQ ID NO: 70322 - protein, 275 aa, Unknown
  Obtained from environmental sample
  DOMAIN (12)...(275): RNA polymerase Rpb1, domain 1
  misc_feature (1)..(275): Xaa is any amino acid
MSDMMSQLEKKAQEIAGVTIKLASPETIRSWSFGEVTKPETINYRSFKPEKDGLFCEKIFGPVRNWECNCGKYKRIRYRGVVCDRCGVEVMHSKVRRERMGHIELAEPVVHIWFLKSVPSHISYLLGISNSNLERIIYYESYVVIDPGDTNLRKDQLLSEEQYFELMEQNKKFDAKMGGQAVLELLAKVEVEKLVIELRHLVKRETSEQRRLEHLKRLRVAEAFNRSKNDPQNMVLKVLPVLPPDLRPLVPLEGGRFATSDLNDLYRRVINGNNR

SEQ ID NO: 70323 - DNA, 1995 bp, Unknown
  Obtained from environmental sample
  misc_feature (1)..(1995): n is a, c, g, or t
atggacgtttcgccgatgcagctggtcagcatcgcggcggggcttatccccttcttggagcatgacgacgccaaccgcgcgcttatgggttcgaacatgcagcgtcaggccgtcccccttctgcggacgcaggcgccgttcgtggggacggggctggagggccgggccgcggtcgactccgggtgcatggtgatcgcgaagaaccccggcgtggtcgagaaggtcgacgcggtcaaggtcgtcgtcaggaagaccgggcgggacgcgaacgatatactggggttgacggagttcgacacttacgagcttacgaagttcgagaggtcgaatcaggacacggcgataaatcagaaggtctgcatcagggagggccagcaggtggaggccggaacggtgctggccgacggccacgccacgagtttgggcgaattggcgctgggcaggaacgtgatggtcgcctttatgccgtggcgcgggtacaacttcgaggacgccatcatcatctccgagaagcttgtggccgaggatgtgttcacgtccgtgcatatcgaggtttttgagacggaggttcgcgacaccaagcgcggcccggaggagctgacccgggagattcccaacgtcagcgacgacgccgtgaagaatttggacgagaacggcgtgataaggatagggacggaggtcgagccgggcgatattctcgtcggcaaagtgactcccaagggggagacggagctgtctccggaggagaggcttttgagggcgatcttcggcgagaaggccggagacgtgcgcgactcttctctcaaggcgccgcccgggctcaaaggcgtggttatagatacgcgcgtctacttccgcaaggagcgtgacaagcgttcgaagaagaaggatacgaagcgcatagaggagctcaaaaaggagtcggagaaggagatactcgagatcaaaaaagtgagggccgagcgtctgaccgagattttgaccgacacgctcacaaatgagattataaacaccgatacgggcgagatcatcgtcggggccggtaagaagtggaccaaacaactccttgccaaggtggatttttcggcgatatcgttcaaagacggtctatgtcaagacgcggagaagtcggctaaggccgaggaggtatactacaaggccggcgatctcatcaccaagaaggaagacaaactggagaaggagattgacaaggtgctccgcggcgacgaactcaaacccggcgtgttgcagcttgtcaaggtctacgtcgccaagaagcgcaagctctcggtcggcgacaagatggccggtcgtcacgggaacaagggcgtcatatcaaagatacttcccgtggaagaactcccgttcctgccggacggcacgccggtcgatatcattctaaacccgctgggcgtcccttcgcgtatgaacgtgggccagatactggagacgcacatgggttgggcggcggcgaagttaggtttcaatgtggccaccccggtttttgacggcgccagctacgaagatgtccttacgttgttaaaggaggccaagctgcccacgagcggaaagatacggcttcgcgacggcaggaccggcgctcccttcgaccacgaggtgacggtgggcccgatatacatgatgaagctgtgccaccttgtggacgacaagatacacgcccgttccataggcccgtactcgttagtaacgcagcagcctttaggcggtaaatcgcagttcggcggccagcgcttcggcgaaatggaagtctgggcgctggaagcctacggcgcggcctatactttacagcagatactgactgtaaagagcgacgatctagccggccgctccaagatttacgagtcgatagtaaaaggcgaaaacgcccctcccgcgggagtacccgagtcgttcaaagtattagtgagagaggtaaaagccttagccttcgatttccatactattgacgacgagggtaatgagattaagatgtaa

SEQ ID NO: 70324 - protein, 664 aa, Unknown
  Obtained from environmental sample
  DOMAIN (581)...(657): RNA polymerase Rpb2, domain 7
  misc_feature (1)..(664): Xaa is any amino acid
MDVSPMQLVSIAAGLIPFLEHDDANRALMGSNMQRQAVPLLRTQAPFVGTGLEGRAAVDSGCMVIAKNPGVVEKVDAVKVVVRKTGRDANDILGLTEFDTYELTKFERSNQDTAINQKVCIREGQQVEAGTVLADGHATSLGELALGRNVMVAFMPWRGYNFEDAIIISEKLVAEDVFTSVHIEVFETEVRDTKRGPEELTREIPNVSDDAVKNLDENGVIRIGTEVEPGDILVGKVTPKGETELSPEERLLRAIFGEKAGDVRDSSLKAPPGLKGVVIDTRVYFRKERDKRSKKKDTKRIEELKKESEKEILEIKKVRAERLTEILTDTLTNEIINTDTGEIIVGAGKKWTKQLLAKVDFSAISFKDGLCQDAEKSAKAEEVYYKAGDLITKKEDKLEKEIDKVLRGDELKPGVLQLVKVYVAKKRKLSVGDKMAGRHGNKGVISKILPVEELPFLPDGTPVDIILNPLGVPSRMNVGQILETHMGWAAAKLGFNVATPVFDGASYEDVLTLLKEAKLPTSGKIRLRDGRTGAPFDHEVTVGPIYMMKLCHLVDDKIHARSIGPYSLVTQQPLGGKSQFGGQRFGEMEVWALEAYGAAYTLQQILTVKSDDLAGRSKIYESIVKGENAPPAGVPESFKVLVREVKALAFDFHTIDDEGNEIKM

SEQ ID NO: 70325 - DNA, 477 bp, Unknown
  Obtained from environmental sample
  misc_feature (1)..(477): n is a, c, g, or t
ttgagcccgggcggcgccttgagagaagagtcgcgcacgtctccggccttctcgccgaagatcgccctcaaaagcctctcctccggagacagctccgtctcccccttgggagtcactttgccgacgagaatatcgcccggctcgacctccgtccctatccttatcacgccgttctcgtccaaattcttcacggcgtcgtcgctgacgttgggaatctcccgggtcagctcctccgggccgcgcttggtgtcgcgaacctccgtctcaaaaacctcgatatgcacggacgtgaacacatcctcggccacaagcttctcggagatgatgatggcgtcctcgaagttgtacccgcgccacggcataaaggcgaccatcacgttcctgcccagcgccaattcgcccaaactcgtggcgtggccgtcggccagcaccgttccggcctccacctgctggccctccctgatgcagaccttctga

SEQ ID NO: 70326 - protein, 158 aa, Unknown
  Obtained from environmental sample
  misc_feature (1)..(158): Xaa is any amino acid
MSPGGALREESRTSPAFSPKIALKSLSSGDSSVSPLGVTLPTRISPGSTSVPILITPFSSKFFTASSLTLGISRVSSSGPRLVSRTSVSKTSICTDVNTSSATSFSEMMMASSKLYPRHGIKATITFLPSANSPKLVAWPSASTVPASTCWPSLMQTF

SEQ ID NO: 70327 - DNA, 894 bp, Unknown
  Obtained from environmental sample
  misc_feature (1)..(894): n is a, c, g, or t
gtgccgggtatgctgatggcctcagcccggcttgaccttccctctgtttttatttccggcgggtctatgcttgccgggcgcaaagacggaaaaccccttacgcttacaaccatgtttgaagcggtaggcgccgtcgccgccggaaagatcagcgaacaggagcttgaggagcttgaaaaccttgcctgccctggctgcggctcctgcgcgggaatgtttacggcgaactcgatgaactgcgtaaccgaagcattgggaatggctctgccgggaaacggcactattcccgccgtaatggcggagcgtatccgtctggcaaaaaaaacaggaatgttgatcatggacgttctgaaaaaagatctgcgtccaaaaaacatacttacccaagcggcgtttatgaacgccctcgccatcgacatggcgctcggctgttccacaaataccgcgcttcatcttcccgccgtcgcggcggaggcgggcattaaactcgatctggaacttcttaacaaggtaagcgcggttacgcctaacctgtgccgccttgcccccgccggaaaggacgcaatcgaagacctgcacgcggcggggggaatttcagcggtctttaaggaactttccaaaaagaaccttgtcgatcttaaagcccttacagtatacggctgtcttggcgacgcgctgggcaaggctgttaaccgcaatcccgatgtcatcaggccgcttgaaaacccctggtccgcgacaggcggccttgccgcgttaaaggggaacatcgcgcaggacggctgtgttgttaagcgaagcgctgtcgccgcctctatgctgagcacgaaggaccggccagggtcttcgattcagaggaagccgcatttgacgccatcatgggaaagaagataa

SEQ ID NO: 70328 - protein, 297 aa, Unknown
  Obtained from environmental sample
  DOMAIN (1)...(297): Dehydratase family
  misc_feature (1)..(297): Xaa is any amino acid
MPGMLMASARLDLPSVFISGGSMLAGRKDGKPLTLTTMFEAVGAVAAGKISEQELEELENLACPGCGSCAGMFTANSMNCVTEALGMALPGNGTIPAVMAERIRLAKKTGMLIMDVLKKDLRPKNILTQAAFMNALAIDMALGCSTNTALHLPAVAAEAGIKLDLELLNKVSAVTPNLCRLAPAGKDAIEDLHAAGGISAVFKELSKKNLVDLKALTVYGCLGDALGKAVNRNPDVIRPLENPWSATGGLAALKGNIAQDGCVVKRSAVAASMLSTKDRPGSSIQRKPHLTPSWERR

SEQ ID NO: 70329 - DNA, 429 bp, Unknown
  Obtained from environmental sample
  misc_feature (1)..(429): n is a, c, g, or t
atgggaaagaagataaacgcgggagatgttgtcgttatccgttacgaaggaccgaagggcggtcccggcatgaaggagatgctcgctcccacagcgtctcttgccggcatgggtcttgacgacaaagtcgccttgattacggacgggcgtttttcaggcgcttccaagggcgcgtctataggacacgtttctccggaagccgcgatgggcgggaacataggaatcattaacgaaggggacatcatagcgatagacattgacgggctttcgataaacgtgaagattagcgaggaagaaatcgcgcggcggcggaaagattggcagcctgtttccaagactcacacgggttatcttgcccgttatgccgcgcaggtcggctccgccgcgcaaggtgcggtttttaattcacagccaattagaggagattga

SEQ ID NO: 70330 - protein, 142 aa, Unknown
  Obtained from environmental sample
  DOMAIN (1)...(135): Dehydratase family
  misc_feature (1)..(142): Xaa is any amino acid
MGKKINAGDVVVIRYEGPKGGPGMKEMLAPTASLAGMGLDDKVALITDGRFSGASKGASIGHVSPEAAMGGNIGIINEGDIIAIDIDGLSINVKISEEEIARRRKDWQPVSKTHTGYLARYAAQVGSAAQGAVFNSQPIRGD

SEQ ID NO: 70331 - DNA, 1809 bp, Unknown
  Obtained from environmental sample
  misc_feature (1)..(1809): n is a, c, g, or t
ttgcccgttatgccgcgcaggtcggctccgccgcgcaaggtgcggtttttaattcacagccaattagaggagattgagatgaagtacacgggcgcgcaaatattagttatgtctctgattgaacagggagtggatacaattttcggctatccgggcggcgcagtcttaaacatttacgacgagctttacaaacacagcgacaaaatccgccacatccttgtcagtcacgaacagcacgccgcccacgccgcggacggttacgcgcgttcaacgggaaagacaggagtgtgcctcgcgacttcgggaccgggcgcgacaaatcttattacgggaattgctacggcgtacatggattcggttccattggttgcgattaccggcaacgttcccacggggattttgggcaaggacagttttcaggaagtggacatcaggggcatctccatgcctatagtgaagcacaactggatagtaaaacatgtagagaaccttggagaagtgatccgcgaggcgtttgagcttgcgtcttccggccgtcaggggcctgtgctgattgacataccgaaagatattaccatgcttacagccgaatggagtccgtctaaaaagaaaggcgagataaaagacaaagctctttccgcccgcgcgaagcggcttgacgagcgtacggcgagagtcagtttcacggacgaagatattgaggaagcagcggaaatgctcagtgaagcaaaacggcctctgctttacgccggcgggggagtcatcagttcgggcgcggaagaggaacttgtcgcgcttgccgaaagactgaacgctcccgttgcgctgagcctgatgggaataggcgcgatacccaaagatcaccgcctgtgcacgggacttatcggaatgcacggatcagtggcgagcaacaaggcgacgcagaaagcggacctgctcctcgcgattggcgcgcgcttttccgaccgcgttatcagcaaggcggatatgttcgcgaataccgcgaaagtgattcactttgacattgatcccgcggaagtgggaaaaaatattgaaacccacgcgtgggtgataggaaacttaaagaacacattagccgctttattggcaaaacttcccgtgcgccttgaaaccgaatggcacggcgagattgacaaatggaaaacccatctgcctcaaacttacactcacgaggtcacgtttgccaagaacgctctccacccccgctttattattgaagagacagcgaaggcgctcggtcccgagacaatcgccgttaccgacgtaggccagcatcagatgtgggcggcgcagttctttcccgctgagaagccgagatcatttatcagctctggcggacttggaacaatgggcttcggtcttggcgcggcttgcggcgcgaaagtagccaaccccaaaaaaccagtggcgctttttacgggagacggcagtttcagaatgaactgcgcggagatggcgaccctcaccaataataaaatccctattttaataattatctttaacaacggggtacttggcatggtaagacagtggcagagtttcttttatgaaagccgctactcgcaaacaactctgggagccgctcctgactttttaaaactctgcgacgcctacggcattaacggtttcagagccggagacagagagtcttttaagaaggcacttcataccgctacagaagaattgtccgcaggaagagcagtactcatcgaagctgacattgaccgcgatgagaacgtactgccaatggttccttcgggcaaaccgattgacgagcagattttgtag

SEQ ID NO: 70332 - protein, 602 aa, Unknown
  Obtained from environmental sample
  DOMAIN (232)...(391): Thiamine pyrophosphate enzyme, central domain
  misc_feature (1)..(602): Xaa is any amino acid
MPVMPRRSAPPRKVRFLIHSQLEEIEMKYTGAQILVMSLIEQGVDTIFGYPGGAVLNIYDELYKHSDKIRHILVSHEQHAAHAADGYARSTGKTGVCLATSGPGATNLITGIATAYMDSVPLVAITGNVPTGILGKDSFQEVDIRGISMPIVKHNWIVKHVENLGEVIREAFELASSGRQGPVLIDIPKDITMLTAEWSPSKKKGEIKDKALSARAKRLDERTARVSFTDEDIEEAAEMLSEAKRPLLYAGGGVISSGAEEELVALAERLNAPVALSLMGIGAIPKDHRLCTGLIGMHGSVASNKATQKADLLLAIGARFSDRVISKADMFANTAKVIHFDIDPAEVGKNIETHAWVIGNLKNTLAALLAKLPVRLETEWHGEIDKWKTHLPQTYTHEVTFAKNALHPRFIIEETAKALGPETIAVTDVGQHQMWAAQFFPAEKPRSFISSGGLGTMGFGLGAACGAKVANPKKPVALFTGDGSFRMNCAEMATLTNNKIPILIIIFNNGVLGMVRQWQSFFYESRYSQTTLGAAPDFLKLCDAYGINGFRAGDRESFKKALHTATEELSAGRAVLIEADIDRDENVLPMVPSGKPIDEQIL

SEQ ID NO: 70333 - DNA, 1542 bp, Unknown
  Obtained from environmental sample
  misc_feature (1)..(1542): n is a, c, g, or t
atggcaaacaatgaaaaacggcgaataaaattttttgataccacactgagggacggagagcaagctcccggctgcagcatgaatttatccgaaaagcttgaagtcgcaaaacggcttgaaaaacttggagtcgatataatggaagcgggttttccaatttcaagccccggcgatcttgaatcagtaaaagcaattgcgggtatcattaccaactgttccgtggcgggactctgccgcagccgtgatattgatattgatgccgcgaaagaagcgctggcaaaagctgtaagtccgaggattcacgtatttctggcaacctcgccagtacacatggaatttaagctcaagatgacgccggaacaggtactggaacaggcggtttattccgtaaagtacgcaaaaaaattctgcaatgatattgagttttccgctgaagacgctttccgaagcgatcccgattttgtctgcaaagttttcggcgcggtaatcgaagcaggcgctcttactgtaaatttccccgacactgtcggctacgcaatgcccgccgaattcggcgagcgtgttcgctacataaaagaacatactccgcacatggaaaaagcagctctgtctgtgcattgccacaacgatttaggtctggcggtggcgaacagtatcgccgccatagcaaacggcgcagatcaggttgagtgtacgattaacggaatcggcgagcgggcgggaaacgcctctttggaagaagtggtcatgggcctgcgtgtccgtagtgatttcttttccgctgacacaaggatagacagtacgcaaatatactcggcaagccgccttgtgtctcaggtgaccggcgtgaaagtacagccgaataaagcgatagttggcgacaacgcgtttgcacatgaagcgggaatacatcagcacggagtattggcaaaaagagaaacctacgagattatgactccgcaatcaatcggtattccgcaaaaccgcatggttctcggcaaacactcaggccgccacgcttttgaggagcgtcttaaagatttaggtttgtccgttgacgcggaagcgttagaaaaaatatttgccgacttcaaggacctcgccgacaagaagaaagtggtcagcgaccgggatattgaagcgttggtaatggacaggactatttctgttccggaaacatggaaactggatcattgggcggtgaacacaggttcggctttaggcgcggcgggtgttatacgcttacagcacaaagacggcaggtttgaaaaattggtgtgcttaggcgatggtcccatcgattcaatttttaaagcgattaatcaaattataggaaaagagcctgagcttgagctttatgaaatcggcgctattacaggcggttcttcttcgcagggcgagacgatggtaaaaatagcgatggacggacggcgctggaacgggcgcggcgtttccactgatgtaattgaatcctcaataatggcttacctttcggctgtcaacgcaatggaatgggacttagagcaaagtaaggaagagtaa

SEQ ID NO: 70334 - protein, 513 aa, Unknown
  Obtained from environmental sample
  DOMAIN (373)...(504): LeuA allosteric (dimerisation) domain
  misc_feature (1)..(513): Xaa is any amino acid
MANNEKRRIKFFDTTLRDGEQAPGCSMNLSEKLEVAKRLEKLGVDIMEAGFPISSPGDLESVKAIAGIITNCSVAGLCRSRDIDIDAAKEALAKAVSPRIHVFLATSPVHMEFKLKMTPEQVLEQAVYSVKYAKKFCNDIEFSAEDAFRSDPDFVCKVFGAVIEAGALTVNFPDTVGYAMPAEFGERVRYIKEHTPHMEKAALSVHCHNDLGLAVANSIAAIANGADQVECTINGIGERAGNASLEEVVMGLRVRSDFFSADTRIDSTQIYSASRLVSQVTGVKVQPNKAIVGDNAFAHEAGIHQHGVLAKRETYEIMTPQSIGIPQNRMVLGKHSGRHAFEERLKDLGLSVDAEALEKIFADFKDLADKKKVVSDRDIEALVMDRTISVPETWKLDHWAVNTGSALGAAGVIRLQHKDGRFEKLVCLGDGPIDSIFKAINQIIGKEPELELYEIGAITGGSSSQGETMVKIAMDGRRWNGRGVSTDVIESSIMAYLSAVNAMEWDLEQSKEE

SEQ ID NO: 70335 - DNA, 525 bp, Unknown
  Obtained from environmental sample
  misc_feature (1)..(525): n is a, c, g, or t
atgaaattattcggcggagaagttttatttcttgatcgcggcgatattaacaccgatgaaattattccggcgaaatatttaaccgaggacacaagaatagcgttaaaaccgcatcttctggaagatttaaaattaaagggctttgatcccgctaaagacattgcgggaaagggagcggtgctgacgagagcaaacttcggctgcggctcgtctcgtgaacacgctccgtgggcgtttgaagtgaacggcatcaacattgtaattgcggaaagttttgcccgtatcttcaggcagaatatgtacaactgcggcatgatcgcctgcgaagttccggcagcgactttggaagaactgtttaaggaattctcaaacgaaaaaacaatattgacggttgatacagacaagggcagtttgaattttaaagcgggcggaaaagaaaaaacagtttctttcattctaaaagattttgaaaaagctttggtagaagcaggcggctgggtcgagtacgcggcaaaacactattag

SEQ ID NO: 70336 - protein, 174 aa, Unknown
  Obtained from environmental sample
  DOMAIN (1)...(113): Aconitase C-terminal domain
  misc_feature (1)..(174): Xaa is any amino acid
MKLFGGEVLFLDRGDINTDEIIPAKYLTEDTRIALKPHLLEDLKLKGFDPAKDIAGKGAVLTRANFGCGSSREHAPWAFEVNGINIVIAESFARIFRQNMYNCGMIACEVPAATLEELFKEFSNEKTILTVDTDKGSLNFKAGGKEKTVSFILKDFEKALVEAGGWVEYAAKHY

SEQ ID NO: 70337 - DNA, 711 bp, Unknown
  Obtained from environmental sample
  misc_feature (1)..(711): n is a, c, g, or t
atgagcatggaaggaagaatgacaatctgcaacatggcagtcgaggcgggagcaacctgcggcgtatgtatgcccgacatgacaactgtaaattatttgtggccgtttatcggtcccggtgcttgcaccgaagacggcgataaaacttattcaagcaaagaagaagcgttaaaagatttttcaaaatggataagcgatgacgatgctgaatattcgggcgttgtcgatattgactgctcaaaactggaaccgcttgctactgtcggttacaaacccgacgaagtaaaaactgtgcgggaactcgccggaactaaaatcgatcaggtgtatatcggctcttgcaccaacggcagaatagaagatttgcgcgccgccgccgatgtgttgagaggcaagaaagttgccgactctgtacgcgcaatcattgcgcccgccactacggacatttacgctcaagctcttaaagaggggcttattcaaattttccttgacgcaggctgttgtgtaacaaacgccacttgcggcgcgtgtcttggaatgtccaacggtgtacttgccgaaggggaagtttgcgcttccaccacgaaccgcaatttttacggacgcatgggaaagggaggcatggttcaccttgtcagtcccgctgtcgctgcggcttccgccgttgcgggagtaattgccgcgccgggtaatattgggggacagtcatga

SEQ ID NO: 70338 - protein, 236 aa, Unknown
  Obtained from environmental sample
  DOMAIN (1)...(224): Aconitase family (aconitate hydratase)
  misc_feature (1)..(236): Xaa is any amino acid
MSMEGRMTICNMAVEAGATCGVCMPDMTTVNYLWPFIGPGACTEDGDKTYSSKEEALKDFSKWISDDDAEYSGVVDIDCSKLEPLATVGYKPDEVKTVRELAGTKIDQVYIGSCTNGRIEDLRAAADVLRGKKVADSVRAIIAPATTDIYAQALKEGLIQIFLDAGCCVTNATCGACLGMSNGVLAEGEVCASTTNRNFYGRMGKGGMVHLVSPAVAAASAVAGVIAAPGNIGGQS

SEQ ID NO: 70339 - DNA, 534 bp, Unknown
  Obtained from environmental sample
  misc_feature (1)..(534): n is a, c, g, or t
gtgggtgtgcggcccaacaccgcgcttctgaacggcattgcgaaggtcgataagggcatcgccatcaacgataaatcggaaacatcagctcccgacatttacgccgctggcgactgcacgcaaacgaatgacatttcaagcgggcagagcaaaatcatggcactcttgcctaacgcttatatgcagggcgagtgtgctggaatcaacatggcggggggcgaaaagatcttcgacaaggcaatccccatgaacgcaattgggttttttggcctgcacattatcacagccggcaactacgcgggagacgtacacgccgagacaggcaacggcaattacaggcgcttgttttacggcgacaacaaacttaacgggtatatccttatcggcaacgtggaaaaagcaggaatttatacaagccttatccgcgaacgtacgccgcttgacacaatcgacttcgccctcgtttgcgaaaaaccggggctgatggcattcagaaaagaggaaagaatggtaaaacttggaggagcttcataa

SEQ ID NO: 70340 - protein, 177 aa, Unknown
  Obtained from environmental sample
  misc_feature (1)..(177): Xaa is any amino acid
MGVRPNTALLNGIAKVDKGIAINDKSETSAPDIYAAGDCTQTNDISSGQSKIMALLPNAYMQGECAGINMAGGEKIFDKAIPMNAIGFFGLHIITAGNYAGDVHAETGNGNYRRLFYGDNKLNGYILIGNVEKAGIYTSLIRERTPLDTIDFALVCEKPGLMAFRKEERMVKLGGAS

SEQ ID NO: 70341 - DNA, 786 bp, Unknown
  Obtained from environmental sample
  misc_feature (1)..(786): n is a, c, g, or t
ttgcgaaaaaccggggctgatggcattcagaaaagaggaaagaatggtaaaacttggaggagcttcataatgaacatatcggcgcaaaatttgggccataaagagctgaacaaactaataagaacctcaacggaagccgtctgcgtagaaaattgttttggtcaaaggtttatcggaagcggcatgagcaataaaaacataacgattaacggaaccccgggaaacgcgatgggcgcttattttaacggcgaaaaaattgtagtaaacggcaacgcacaggacgctgtcggcgatacgatgaacgatggcaaaataatcatccacggtaacgccggcgatgcgcttggctacgccatgcggggcggcagtatttttgtaaaaggtaatgccgggtacagaacgggcatccacatgaaggaatacaaggagaagaaaccagtaatcgtcatcggcggcaaagtgggtagtttcttgggtgaatatctggccggcggggtgattgtcgtacttggcattgattcggaggaagcccctgtctttaattttacgggaaccggtatgcatggcggacacatttttatccggacgaccaaagacctcctgagcctgccggcacaggttgccttgtcaaacgctacggaggaagacttaagcgagattaagccatacctttccgaatttacgagttatttcggaatagatacagattcgcttttaaaagacaatttttatttgttaaagcccaatacgaaaaacccgtacaaacagctatatacagcaaattga

SEQ ID NO: 70342 - protein, 261 aa, Unknown
  Obtained from environmental sample
  DOMAIN (11)...(233): GXGXG motif
  misc_feature (1)..(261): Xaa is any amino acid
MRKTGADGIQKRGKNGKTWRSFIMNISAQNLGHKELNKLIRTSTEAVCVENCFGQRFIGSGMSNKNITINGTPGNAMGAYFNGEKIVVNGNAQDAVGDTMNDGKIIIHGNAGDALGYAMRGGSIFVKGNAGYRTGIHMKEYKEKKPVIVIGGKVGSFLGEYLAGGVIVVLGIDSEEAPVFNFTGTGMHGGHIFIRTTKDLLSLPAQVALSNATEEDLSEIKPYLSEFTSYFGIDTDSLLKDNFYLLKPNTKNPYKQLYTAN

SEQ ID NO: 70343 - DNA, 426 bp, Unknown
  Obtained from environmental sample
  misc_feature (1)..(426): n is a, c, g, or t
gtgattgtcaacgcgcctttgcgtgacgaaagcggcgagagttttgcccggtacatcgcttccaggggcatagcgcaagttatcctcctggtaaaaaacgagagcgttgattctgtttccgccgcatatgagggcgacggagtgttcgttatttctaaaccggtggacaaaacgttttttttggccgcgctgtctctggctaaatcgactcaaaacaggataaagcggatacttaatgaaaatgtgcagttaaaacaaaaaattgaagacatacgcattattgaccgcgcaaaatgcatattaatatccattatgaaaatgactgaacaggaagcccacaagtatatagaaaaacaggcgatggacattcgttcaacaaaaagaattgttgctgaaggaatattaaaactttatgaaaactactag

SEQ ID NO: 70344 - protein, 141 aa, Unknown
  Obtained from environmental sample
  DOMAIN (80)...(135): ANTAR domain
  misc_feature (1)..(141): Xaa is any amino acid
MIVNAPLRDESGESFARYIASRGIAQVILLVKNESVDSVSAAYEGDGVFVISKPVDKTFFLAALSLAKSTQNRIKRILNENVQLKQKIEDIRIIDRAKCILISIMKMTEQEAHKYIEKQAMDIRSTKRIVAEGILKLYENY

SEQ ID NO: 70345 - DNA, 1410 bp, Unknown
  Obtained from environmental sample
  misc_feature (1)..(1410): n is a, c, g, or t
atgaaaactactagaaaattgaacgaggaatgcgccgtttttgccgtaagcctggcgattgacgaggccgccgggcttacctacaacggcctgttgtcgcttcagcaccgcggccaggaaggcgcgggtatcgctgttgtaaacgacggccatatcttttgccacaaggatacagggcttgtcagcgaggttttttccactgccgagcttgaaagactgcccaaggggaaaatcgccgtcggacatacgcggtactcaacgaccggcgtcaataaaagggaaaacgtggggcctttcgtaacggactacctaaccggaaggatcgcagtagcccacaacggcaacgtaacaaacgcttttgaaatacgggaagacttaaaacgccagggcttgcgcttcggcgcaaccagcgacagcgaggttatttcatcgctcatggcatattgcatgatgaaggaagccgatcctttgtcaggcatcataaaagcggcggatatgctgaggggtgcgttttcgcttgcgatagtctgcaacgacgacaagctgattgccatacgcgacccaaacggtttccgccccctttgcatcgggaaaaacgaactcgggttcgccgtagtttccgagagttgcgcccttgatgcctgcgattttaagttcgtcagggatgtactgcccggcgaggtagttgtgatagaaaacggagaaataaagactgagggcattaggctcaataacagagaaaacgatcgggggctttgtatttttgaatacgtttatttcgcaaggccggactcggtaattgacgggctttccgtatatttaacccggcacaacatggggctaatacttgcggaagagcatccggtagacgccgacctggtctgcggcgtgccggattcaggtctggacgccgctgtcggatacagcgaaaaaagcggaataccgattgctgccgggtttgtaaaaaacaggtacattggcagaagttttatctatccaacgcagacccagcgggacaacgcagtcaagctcaagctcaatcccctcgcggctggcattcgcggaaagaagatcgtgcttgtggatgactccatcgtacgcggcacgacaagcgaaaaaatcgtcaggagccttaaaaactcaggagcaaaagaggtacacatgagggtctcttcgccgcctttccgccacacctgccattacggaaccgacattgacagcgaggataacctgatagcgaacaagatgagcccggatggcataagggcaaaaattggcgcagacagcctgggctatatcagcatagagggactaaagcgggcctgcgatggatgcgccctggccttttgtacggcttgctttacgggcaacggcgaatccgagcgggcaaagaaagatgtgtttgaatag

SEQ ID NO: 70346 - protein, 469 aa, Unknown
  Obtained from environmental sample
  DOMAIN (261)...(406): Phosphoribosyl transferase domain
  misc_feature (1)..(469): Xaa is any amino acid
MKTTRKLNEECAVFAVSLAIDEAAGLTYNGLLSLQHRGQEGAGIAVVNDGHIFCHKDTGLVSEVFSTAELERLPKGKIAVGHTRYSTTGVNKRENVGPFVTDYLTGRIAVAHNGNVTNAFEIREDLKRQGLRFGATSDSEVISSLMAYCMMKEADPLSGIIKAADMLRGAFSLAIVCNDDKLIAIRDPNGFRPLCIGKNELGFAVVSESCALDACDFKFVRDVLPGEVVVIENGEIKTEGIRLNNRENDRGLCIFEYVYFARPDSVIDGLSVYLTRHNMGLILAEEHPVDADLVCGVPDSGLDAAVGYSEKSGIPIAAGFVKNRYIGRSFIYPTQTQRDNAVKLKLNPLAAGIRGKKIVLVDDSIVRGTTSEKIVRSLKNSGAKEVHMRVSSPPFRHTCHYGTDIDSEDNLIANKMSPDGIRAKIGADSLGYISIEGLKRACDGCALAFCTACFTGNGESERAKKDVFE

SEQ ID NO: 70347 - DNA, 1575 bp, Unknown
  Obtained from environmental sample
  misc_feature (1)..(1575): n is a, c, g, or t
atgactaaatatgtttttgtgacaggcggggttgtatccgggcttggaaaaggcatcacagccgcgtctttgggcagactgctcaagcaacgagggctaaaggtcgcggcgcaaaagctcgatccgtatatgaacgtcgatccgggaaccatgagcccgttccagcacggcgaggtctttgttaccgacgacggtgccgaaaccgatcttgacctggggcattacgagcgcttcattgacgaaaacctgacaaaacatagcaacctgacatcgggccaggtgtactggaacgtgcttggacgcgaacgtgcgggcggctatcttggcggcacagtgcaggttataccccatgttacagaagaaataaaaaggtttatttatgccggagcagaaaacaaccatgtcgacgtgatcatcaccgagattggcggcacaacgggcgatatcgaaagccagccgttcctggaggctatccggcagatttctcttgaaagaggccgtgaaaactgcctgtttatccatgttactttaattccgtttttaaaatgttctggcgagcataaatcaaaaccaacccagcactcggtcaaagagttgcgatccatgggcatttcaccaaatgtcataatcgcgagggccgacgaacctttaagcggcggcatcaaggaaaaaatatcgctcttttgcaatgtaaagatcgactgcgtcatagagaatatctctattcagtctctgtacgaagtgccactcatgctccatcaaaatggccttgataaagtcgtttgccgggagctggcccttgacaccgccgaacctgatttaggcgaatggcagaagatggttcacaatatcggggagagaaagcaggaagtaaacatttcgatagtcggaaaatacattcaactgcatgacgcttatttgtccatcatcgaaagcttgaatcacgccggttttgaagccggggtaaaaataaacattttatggattgacagcgccgaggtaaccgctgaaagcgcgacagggctgttaggcgggtcagacggcatgatcattcccggcggttttggcgacaggggaatcgaggggaagatcaacgcctgccgtttcgcgagggaaaacaacataccttacctgggaatttgccttggaatgcagattgccgttattgaattcgcgcgcaacgtctgcggcctggagcgggcgcattcaagcgagtttgacgaaacttcaccctatcgcgtaatcgacattatgccggaccaaaccggccttcttggctctggcggcaccatgcggcttggcgcctatccctgcgtaatctcaaaaggcacgctgttaagctccctttacgacacggataacataagcgaaaggcaccgccaccgcttcgaatttaacaacgaatatctgaatattttgacaggcaaggggcttgttatcgcaggcacttcccctgacggcagccttgtcgaggcaatagagctgccgaatcatcgcttttttaccggcgttcaatttcatcccgaattcaagagccgccccaataaacctcatccgctttttctggggctgtaa

SEQ ID NO: 70348 - protein, 524 aa, Unknown
  Obtained from environmental sample
  DOMAIN (293)...(509): Peptidase C26
  misc_feature (1)..(524): Xaa is any amino acid
MTKYVFVTGGVVSGLGKGITAASLGRLLKQRGLKVAAQKLDPYMNVDPGTMSPFQHGEVFVTDDGAETDLDLGHYERFIDENLTKHSNLTSGQVYWNVLGRERAGGYLGGTVQVIPHVTEEIKRFIYAGAENNHVDVIITEIGGTTGDIESQPFLEAIRQISLERGRENCLFIHVTLIPFLKCSGEHKSKPTQHSVKELRSMGISPNVIIARADEPLSGGIKEKISLFCNVKIDCVIENISIQSLYEVPLMLHQNGLDKVVCRELALDTAEPDLGEWQKMVHNIGERKQEVNISIVGKYIQLHDAYLSIIESLNHAGFEAGVKINILWIDSAEVTAESATGLLGGSDGMIIPGGFGDRGIEGKINACRFARENNIPYLGICLGMQIAVIEFARNVCGLERAHSSEFDETSPYRVIDIMPDQTGLLGSGGTMRLGAYPCVISKGTLLSSLYDTDNISERHRHRFEFNNEYLNILTGKGLVIAGTSPDGSLVEAIELPNHRFFTGVQFHPEFKSRPNKPHPLFLGL

SEQ ID NO: 70349 - DNA, 426 bp, Unknown
  Obtained from environmental sample
  misc_feature (1)..(426): n is a, c, g, or t
atggataaacaggcagttttcacggcctctttcaagagaaatctgccggatagcctccaggaacggctggctttcgatatcgcccgttgtgccgccaatctcggtgatgatcacgtcgacatggttgttttctgctccggcataaataaacctttttatttcttctgtaacatggggtataacctgcactgtgccgccaagatagccgcccgcacgttcgcgtccaagcacgttccagtacacctggcccgatgtcaggttgctatgttttgtcaggttttcgtcaatgaagcgctcgtaatgccccaggtcaagatcggtttcggcaccgtcgtcggtaacaaagacctcgccgtgctggaacgggctcatggttcccggatcgacgttcatatacggatcgagcttttgcgccgcgacctttag

SEQ ID NO: 70350 - protein, 141 aa, Unknown
  Obtained from environmental sample
  misc_feature (1)..(141): Xaa is any amino acid
MDKQAVFTASFKRNLPDSLQERLAFDIARCAANLGDDHVDMVVFCSGINKPFYFFCNMGYNLHCAAKIAARTFASKHVPVHLARCQVAMFCQVFVNEALVMPQVKIGFGTVVGNKDLAVLERAHGSRIDVHIRIELLRRDL

SEQ ID NO: 70351 - DNA, 1407 bp, Unknown
  Obtained from environmental sample
  misc_feature (1)..(1407): n is a, c, g, or t
atgggcggcgggcagtggacgtttcctttcccggaggagatgcctttcaggctcgcccttcacgctcacgtaatatacggccttagaaagagcgacgatgtgatggataagtatcaggttacctacaaccctttctttgcgaacgagggtatgacctacgcgggttacgattttgatgatgttcaggaggatggcaagattaccctcgtcggcaagatacccatgtcgattgttcacggtaacctcaggcgctctttcaaaattcacgccaatccggggatggccttaatccagaacgcccctccgatattccttttgtccggcggttttgagatcaatccggatgaaaactggactgtggggcttgaaggcaatttccgtacgccctataaaaacggccatagcttgggcgacccgctatggattacgcctaccgtcacatatcgctcgccctactatgccgacggtctcttcggttggagcatagtcggcggggcggatatacgcctttcatcggaagtgaaaatggaatctgaaataaatgcagacaccagaaaggttgtaggcacaggttactcgattgagacgttccgtatattcggcggctttgtcttttccttcgacctcttagcctccaagcgcgccgagatgatccgtaaagcccgcgctaacgccgccgaanaggcgcgtttgcgtaagcttgccgccctaaccgaagctcaaagggacagcgtagcgcagaaggcgcggcaggattcgttggaattggccgccgcgttggccgccaaagcggagaaggcgcggcaggactccatagctatggccgagggttcagccgagcgtgaggcgcagcttagagccgaggccgaggccagagaggcgcagctcacggcggacgcctccgctagagaggcgcatctcaccgctgagtccgagcgtaagcgtgccgccgactccgtagcgcttgcggaactcaacaagaggctggctgaggaaaaggcaaagcgctcggcggtggagcagcagatgctgtctacgggtatgatcgtgcttgacggggtattcttcgaaaccggcaaagccgtgattaagagaaactcggaggggtatctgagaatccttgccaagatgcttgtcaagtatcccaagctcaggatagagatcggcggccacaccgacaataccggcaggttagagaccaatatggccctcagccagagccgtgcggacgcggtcttcatgttcatgcacaacgtggaaccggggctcgcccagatgctgactacaaagggctacggccccacggtgccgaaggccgacaacgccaccaaagatgggcaagagatcaacaggcgtgtggaacttaaggtgctcaaccccgaggtgcttaaagagtacaacccttaa

SEQ ID NO: 70352 - protein, 468 aa, Unknown
  Obtained from environmental sample
  DOMAIN (355)...(451): OmpA family
  misc_feature (1)..(468): Xaa is any amino acid
MGGGQWTFPFPEEMPFRLALHAHVIYGLRKSDDVMDKYQVTYNPFFANEGMTYAGYDFDDVQEDGKITLVGKIPMSIVHGNLRRSFKIHANPGMALIQNAPPIFLLSGGFEINPDENWTVGLEGNFRTPYKNGHSLGDPLWITPTVTYRSPYYADGLFGWSIVGGADIRLSSEVKMESEINADTRKVVGTGYSIETFRIFGGFVFSFDLLASKRAEMIRKARANAAEXARLRKLAALTEAQRDSVAQKARQDSLELAAALAAKAEKARQDSIAMAEGSAEREAQLRAEAEAREAQLTADASAREAHLTAESERKRAADSVALAELNKRLAEEKAKRSAVEQQMLSTGMIVLDGVFFETGKAVIKRNSEGYLRILAKMLVKYPKLRIEIGGHTDNTGRLETNMALSQSRADAVFMFMHNVEPGLAQMLTTKGYGPTVPKADNATKDGQEINRRVELKVLNPEVLKEYNP

SEQ ID NO: 70353 - DNA, 1209 bp, Unknown
  Obtained from environmental sample
  misc_feature (1)..(1209): n is a, c, g, or t
atgtccaaattcaacggcaaggcgcttctgccggcaagtttcgtttggcactggatgctccctgccgccattacagacccgcttacgcctgcgatgtttgtgcagcaggtgcgcaagtatttctttccgcgagacccgcgccgcgacgttcccgtgggtcaaatatcgttgcgtgtaaacgaggtatgcaacctgcgttgcggatcgtgcggtcagtggggcgaaaacgggcacctgcgcgacaaactcgggcgcggggagaaattggcgcagttggacttcgataccgtgaagcgtgttgtttttgaaactcggcgcgacaagccgttttactacgtctggggcggcgagcccaccatgtggaagccgttgctgccgctctttcaggagcttgccaagcacaaattacgcggttcgatagtcacaaacgctcaggatttggacaaaataatcgagggcttgatcgataccggcgcgctgtctatactctttctgagcctcgacggttgggacagcgcctcgcaaaacatcatgcgggcgcccgccggcggcggagtttccgacaactttgaaaagactatggcggtaatggagaaggtaaaggagatcaaagcgaaaaagaatctgaagtacccgatggtaatacccatcaccgtcatatccaacgccaattactcccgcctgaccgacatacaccgtttggtgctggacaaggcgcagctccaccctttctacttcggctggttcataaccgaggaccgcgccgccgcccacgaaaaggtcttcgaggcgcgctttagccacaaacccaagaatcacttaggctaccttaaaagctgcttcaacgacgtagaccccaaggttaccgccgatcagatcctgcggctgaaagcgatgtccaaaggcaaagtctgcgtcccgcagttcctgccggacatagagaaagagcgccagatcaaacgatattacaacgaccactcatggcactgcggctacccgaaatgcgagagcatctactacacagccgaagtctcgccggacggtcgagttaccccgtgccgcgattaccaagattttacagccggcaatatcaatgaaaagggcttttatgatatatggaacggaccggaattcaaaaaattcagaacggaaatgaagaaggggctaatgcccgtttgcactaggtgttgcgggttacagggtttttga

SEQ ID NO: 70354 - protein, 402 aa, Unknown
  Obtained from environmental sample
  SIGNAL (1)...(25)
  DOMAIN (57)...(235): Radical SAM superfamily
  misc_feature (1)..(402): Xaa is any amino acid
MSKFNGKALLPASFVWHWMLPAAITDPLTPAMFVQQVRKYFFPRDPRRDVPVGQISLRVNEVCNLRCGSCGQWGENGHLRDKLGRGEKLAQLDFDTVKRVVFETRRDKPFYYVWGGEPTMWKPLLPLFQELAKHKLRGSIVTNAQDLDKIIEGLIDTGALSILFLSLDGWDSASQNIMRAPAGGGVSDNFEKTMAVMEKVKEIKAKKNLKYPMVIPITVISNANYSRLTDIHRLVLDKAQLHPFYFGWFITEDRAAAHEKVFEARFSHKPKNHLGYLKSCFNDVDPKVTADQILRLKAMSKGKVCVPQFLPDIEKERQIKRYYNDHSWHCGYPKCESIYYTAEVSPDGRVTPCRDYQDFTAGNINEKGFYDIWNGPEFKKFRTEMKKGLMPVCTRCCGLQGF

SEQ ID NO: 70355 - DNA, 1863 bp, Unknown
  Obtained from environmental sample
  misc_feature (1)..(1863): n is a, c, g, or t
atgatggcagaaaagcgatataaaaaactgggcgaagtcctgctctcccaaggcctgataaccgaggagcagttgcttatcgccctgcgcgagtgccgtcgcaacggcctgagcctaggctccacgcttgtccaaatgcgtttcatctccaacgacgacctcacggccgtgctgggcgagcagatccacctgcagcagcggaagcgtataggcgagatacttgtcgagcagggcttcattaccgcggatcaacttgagaaggggttggccgagcagaagacctccaagatgctgttgggtaagtgtctcgtcaagctgggtttcatcagcgagcccaagcttatcgacgtcctgagcgctcagcttgacatacagcatgtggtattgcagcagttcaacttctccgccgagcttgtcaagtgcattccggaggacatggcgcgccgctacaaggtaatcccgctcttcgagcgcaacggcgtgctcaccgtggcgatggtcgacccgaccaacttgcgcgtcatcgaccacctgaagttcaaaaccggcagggagatcgatccggtgctcgccaccgagaagagcatcatgtcggccatcgagaaaaactacgcctccgccagcgaggagatgagccagctgctcagcagcgtggcctcccagggcgggggggatatagaggtcgtaaagtcgcaggaagagtccgattcgtcgctgacggacgaggagggcgcgcaggtagtgaagctcgtcaacctgatcgtcacccaagcgataagctccggcgcctccgacatacatatagaacctctggagagttacacgcgtttgcgttacaggatagacggcgatttggttgagcagaaccccataccgctccagatgcgggcgcagataacctcccgcctcaagatcatggcgggcatggacatagccgagaagcgcaaaccgcaggacggccgcttcaggatcagggcgcagggccgtgagatcgacctccgcgtctccatcttccccgtcatgacgcgtcttcgcggcgtaaacgaaaagatcgttatgcgtatcctggacccgcagtccatgaatatctccattgatatgctgggcttcctgcccaagaccaaggagatgttcgaagaggtcatagaaaagcccgacggcatcctgctcgtcaccggccctacgggtagcggtaaaagctccacgctgtacgccgctttgaagaggatcaacgacgtctccataaacatcatcacgatggaggaccccgtcgagttcaacctagacggcgtggcccagggtcagataaacccgctggccggattcaccttcgccgccggtatgcgttccatcctccgccaagaccccgacgtggtgatgatcggtgagatgcgcgacgccgagacttgccagatggctatccaagccgctctcaccggccacttggtattctccaccctgcacacaaacgactcgcccagcgcctacacgcgcctgcttgacatgggcatagaaccgttcctaatcacctcctccgtcataggcatcctggcgcagcgcctagtgagaaaattatgtaagtgtaaggaacagtacgatccggatcctctgttgttgcagaaattaggcctgcgtccggggttaaagttctatagaaacaaaggctgtaaaatatgtaataacacaggcttcaaaggtcgtatgggcctatacgagtttctcgttcccgacagcgagataaacaacatggtgataaaacgcctgccctcggagcaaatcaaacattacgcgttgaagagaggcaattacgactcgctacgcagggacgggttgaagaaggtgtggacgggtcgaccacaatag

SEQ ID NO: 70356 - protein, 620 aa, Unknown
  Obtained from environmental sample
  DOMAIN (103)...(210): GSPII_E N-terminal domain
  misc_feature (1)..(620): Xaa is any amino acid
MMAEKRYKKLGEVLLSQGLITEEQLLIALRECRRNGLSLGSTLVQMRFISNDDLTAVLGEQIHLQQRKRIGEILVEQGFITADQLEKGLAEQKTSKMLLGKCLVKLGFISEPKLIDVLSAQLDIQHVVLQQFNFSAELVKCIPEDMARRYKVIPLFERNGVLTVAMVDPTNLRVIDHLKFKTGREIDPVLATEKSIMSAIEKNYASASEEMSQLLSSVASQGGGDIEVVKSQEESDSSLTDEEGAQVVKLVNLIVTQAISSGASDIHIEPLESYTRLRYRIDGDLVEQNPIPLQMRAQITSRLKIMAGMDIAEKRKPQDGRFRIRAQGREIDLRVSIFPVMTRLRGVNEKIVMRILDPQSMNISIDMLGFLPKTKEMFEEVIEKPDGILLVTGPTGSGKSSTLYAALKRINDVSINIITMEDPVEFNLDGVAQGQINPLAGFTFAAGMRSILRQDPDVVMIGEMRDAETCQMAIQAALTGHLVFSTLHTNDSPSAYTRLLDMGIEPFLITSSVIGILAQRLVRKLCKCKEQYDPDPLLLQKLGLRPGLKFYRNKGCKICNNTGFKGRMGLYEFLVPDSEINNMVIKRLPSEQIKHYALKRGNYDSLRRDGLKKVWTGRPQ

SEQ ID NO: 70357 - DNA, 1191 bp, Unknown
  Obtained from environmental sample
  misc_feature (1)..(1191): n is a, c, g, or t
atgggaaatgtaacggcgacagaccttggcagttataatgaaagttggaacgggcttcttgccggttttgctccggtatatgataaggatggcaagttctattgtgtcgcggacgtggacataagcgataaagtcattttagaccaacgtagatattcactagttatgaccattctccaaattctcgccctctcagtttccgtattgttcggtattttaaattctttgttgtaccgaaggaaagcgcaggaaatagaagaggcccatatcaagctccagtatttcaacaataatatgcgtcaggctttttcaacatatttgtcggaagatgttgtagaggaagtaatatctgaccccacccgaatgcagcttggcggaataaaccggcacatgacggctttattttccgatataaagggatttaccggtatagctgaaaaacttacgccgcctcatttggtagatcttcttaaccattatctttcaaccatgagcgatgtcattctggaagaaaaagggacaatagacaaatatcagggagacgcaatcgtttctttctttggcgcgcctctggaacttgacgatcacgcattgcgggcatgcactgccggaatagttatgaagcggatggaaaaagaaataaacaaatatgttttggaaaatggaataagtccgtcgccgctgttgacccgtatcggcattaataccggaagcatggttgtaggaaacatgggcacgcaaaacaagatgaactacactatcatcagcaactccgttaaccttgccgcccgtcttgaaagcgtcaacaagcagtacggaacatggatactcgcttcagaagacacaatacgggaaacccggggaaatatccttacccgcgctcttgatcgcgtccgcgtagtcgggatcaacgagccggtgcgcctttacgaactcataaacaccgtggaaaactccagttctgaagaaaaacaattagtcaaaattttccgccaggcccttgaatgttatgagaatcgccaatggaaaaaagcagccgaaggcttcagggactcccttgaaatagagacaaggctcgctcttaaccctgacggcggcccctccgcggtatatcttgagcgctgcgggaaattcaaaaccaaaccgccggctgaagattgggatggcgtgcataacttgacggagaaataa

SEQ ID NO: 70358 - protein, 396 aa, Unknown
  Obtained from environmental sample
  DOMAIN (122)...(314): Adenylate and Guanylate cyclase catalytic domain
  misc_feature (1)..(396): Xaa is any amino acid
MGNVTATDLGSYNESWNGLLAGFAPVYDKDGKFYCVADVDISDKVILDQRRYSLVMTILQILALSVSVLFGILNSLLYRRKAQEIEEAHIKLQYFNNNMRQAFSTYLSEDVVEEVISDPTRMQLGGINRHMTALFSDIKGFTGIAEKLTPPHLVDLLNHYLSTMSDVILEEKGTIDKYQGDAIVSFFGAPLELDDHALRACTAGIVMKRMEKEINKYVLENGISPSPLLTRIGINTGSMVVGNMGTQNKMNYTIISNSVNLAARLESVNKQYGTWILASEDTIRETRGNILTRALDRVRVVGINEPVRLYELINTVENSSSEEKQLVKIFRQALECYENRQWKKAAEGFRDSLEIETRLALNPDGGPSAVYLERCGKFKTKPPAEDWDGVHNLTEK

SEQ ID NO: 70359 - DNA, 1200 bp, Unknown
  Obtained from environmental sample
  misc_feature (1)..(1200): n is a, c, g, or t
atgatacagcgtaatccttgcattgcgaatattaaagccggatacctctttcccgaagtcgccaagaggcggcgggagtacgcggcagcccatcccgaagcgaaaatcatcagcctgggggtggggaacacgacagaaccggttttgtcccatattaatcagggccttgtggatggagccaggcggcttgggacggttgaaggatattcaggctatcaggacgaggggcttcttgtccttcgtgaaaaaatttccgctgttttttacaacggaaaattcacggcaaatgaaatttttatttccgacggggcaaagtgcgacataggcaggctgcagctgttgtttggaagatccacgcaggtggcggttcaggacccttcttaccccgtgtatgttgacggttcggtgcttataggagctgccggcggggccgctgattccggttataaaggcatcgtctatcttccctgcacaaaggctaacggttttttcccggatctttcccggctcccgtcaaaaagccttttttatttttgctcgccgaacaatcccaccggcgcggtggcggacagggaacagctttccatccttgttaaaacctgtctggaaatgaaaaccattgtcgtctttgacgcggcctacagcgagtacatccgcgacccgaaattccccaaaagcatttacgagattgaaggctcaagacaatgcgctattgaggtaaactctttttccaagaccgcaggtttcaccggtgtgcgcctcggatggacagttgttccggctgagctcaaatatgaaggcggcgagagcgtcaacgccgactggagccgcgtctgctccacgatattcaacggggcttccaatatcgcgcaggccggcgggcttgccgcgttagatgatgaaggcctgaaggaaatccgcgggcttaccgatttttatctcggcaacgcgcggctgatacgcgaggcgctgaaagtcttaaatgtagaaaccacgggcggtgacaattccccgtacatttgggcttatttcccgaacagggacagttgggaagttttttcgcagatcctcgaaaaatgtcaggtagtaacaacgcccggagcgggatttggcccggcggggaacggctatatccgcttctccgcctttggccaccgcgccgacgtggaagaggcgtgcgcaagattgaaaaagttatga

SEQ ID NO: 70360 - protein, 399 aa, Unknown
  Obtained from environmental sample
  DOMAIN (34)...(396): Aminotransferase class I and II
  misc_feature (1)..(399): Xaa is any amino acid
MIQRNPCIANIKAGYLFPEVAKRRREYAAAHPEAKIISLGVGNTTEPVLSHINQGLVDGARRLGTVEGYSGYQDEGLLVLREKISAVFYNGKFTANEIFISDGAKCDIGRLQLLFGRSTQVAVQDPSYPVYVDGSVLIGAAGGAADSGYKGIVYLPCTKANGFFPDLSRLPSKSLFYFCSPNNPTGAVADREQLSILVKTCLEMKTIVVFDAAYSEYIRDPKFPKSIYEIEGSRQCAIEVNSFSKTAGFTGVRLGWTVVPAELKYEGGESVNADWSRVCSTIFNGASNIAQAGGLAALDDEGLKEIRGLTDFYLGNARLIREALKVLNVETTGGDNSPYIWAYFPNRDSWEVFSQILEKCQVVTTPGAGFGPAGNGYIRFSAFGHRADVEEACARLKKL

SEQ ID NO: 70361 - DNA, 1284 bp, Unknown
  Obtained from environmental sample
  misc_feature (1)..(1284): n is a, c, g, or t
atgagcgataaatattttcccctgtcaaaagcggagcttgaaaagctgacgaagcgttttcccacgccgttttatctgtatgacgagaaaggcattattgagaacgtccgcagaataaaggcggcgttctcaggtttccccggttacaaacagcatttcgcggtaaaggccctgcccaaccccttcattatgaagatactcgccgccgaaggcgttggagccgactgttccagttactcggaattaatgctggctgaaatggccggcattacgggcgagaatataatgttctcctccaatgagactccggcgcgggaatatgaattggcccggcagcttggcgcggtgatcaacctggacgatttgacccacattgaattcctggaaaaaaccgccgggtttacgcagttgatttcgctccgttataaccccggcccccttaaagagggaaacgcgatcatcggcaagccggaggaggcgaaatacggccttacccgcgaacagattatcaagggttatgccatactgaaggataaaggcatcaggcgtttcggccttcataccatggtggcttccaacgagctttccatcccctaccatgttgagacagcccgcatgttgtttgagcttgcggtggaaatactaaacaagaccggcgtaaagattgaatttgtaaaccttggcggcggcgtgggaatcccctacagtcctgaacaggtcgcggttgattacaatgttttgacagcgggtatacaaagggcgtataacgaggtactcaagcctgttggcctggaaccgggcatccacaccgaatatggccgtcccattaccggcccctacggctggctggtggcgcgggctgtccacaaaaaagaaatttaccgcaattacatcggcctggacacgtgcatggctgatttaatgcgccctgccctttacggcgcttatcaccacatcactgtcgcaggaaaagaaaacgccccccatgataaaacttatgacattgttggcagcctctgcgaaaacaacgataaatttgccagacagcgcaagctgcccaagattgatacggctgcgcaggctccggacggcaagggcgattttgtggtggtccatgacgcgggggcgcatggcagggcgatgggctttaactataacggcaaactccgctgcggagaactgcttctcaggcaggacggttcgaccgtaatgatacgccggcccgaaaccgtgaatgattatttcgtgactcttgatcttgcaggtttgaaaaaattttcataa

SEQ ID NO: 70362 - protein, 427 aa, Unknown
  Obtained from environmental sample
  DOMAIN (282)...(396): Pyridoxal-dependent decarboxylase, C-terminal sheet domain
  misc_feature (1)..(427): Xaa is any amino acid
MSDKYFPLSKAELEKLTKRFPTPFYLYDEKGIIENVRRIKAAFSGFPGYKQHFAVKALPNPFIMKILAAEGVGADCSSYSELMLAEMAGITGENIMFSSNETPAREYELARQLGAVINLDDLTHIEFLEKTAGFTQLISLRYNPGPLKEGNAIIGKPEEAKYGLTREQIIKGYAILKDKGIRRFGLHTMVASNELSIPYHVETARMLFELAVEILNKTGVKIEFVNLGGGVGIPYSPEQVAVDYNVLTAGIQRAYNEVLKPVGLEPGIHTEYGRPITGPYGWLVARAVHKKEIYRNYIGLDTCMADLMRPALYGAYHHITVAGKENAPHDKTYDIVGSLCENNDKFARQRKLPKIDTAAQAPDGKGDFVVVHDAGAHGRAMGFNYNGKLRCGELLLRQDGSTVMIRRPETVNDYFVTLDLAGLKKFS

SEQ ID NO: 70363 - DNA, 672 bp, Unknown
  Obtained from environmental sample
  misc_feature (1)..(672): n is a, c, g, or t
atgcagcggaaggccagaggctggaccaaaggcttcatcgccgtaaagcccaactgttcgatacaaagctacatgattcccttgcacgccctggcgctggcaggctatccagcgcagaggattattgtaacaaccctgcaggcggtttccggcgcgggctatcccggcgtgccgagtttggacatgctcgacaatatcattcccttcataggcggcgaggaagaaaaatccgaaaaagagccgctgaagattttcggcagcatcgtaaacggcgcgttccaaaacgccgtactgccaaagatttccgcctgctgtaaccgcgtgccggttgttgacgggcataccgcatgcgtcagcctggaattcggggagaagaagccttctatagaagaaattaaaaaaatctgggccgattttaaggctttgccccaggaactggatttacccacggctccaaagcagcctattatctaccgggaagaggacaaccggccccagccccgcaaggacagaaaccttgacaaggggatggcggtggtagtcggcaggctgcgcccctgcaatgtgtttgacatacgtttcaccgcggtttcgcataacacagtccggggcgcggcgggcggcggcatattgaacgcggaactcttgaaagagaaagggtatttaggatga

SEQ ID NO: 70364 - protein, 223 aa, Unknown
  Obtained from environmental sample
  DOMAIN (28)...(203): Semialdehyde dehydrogenase, dimerisation domain
  misc_feature (1)..(223): Xaa is any amino acid
MQRKARGWTKGFIAVKPNCSIQSYMIPLHALALAGYPAQRIIVTTLQAVSGAGYPGVPSLDMLDNIIPFIGGEEEKSEKEPLKIFGSIVNGAFQNAVLPKISACCNRVPVVDGHTACVSLEFGEKKPSIEEIKKIWADFKALPQELDLPTAPKQPIIYREEDNRPQPRKDRNLDKGMAVVVGRLRPCNVFDIRFTAVSHNTVRGAAGGGILNAELLKEKGYLG

SEQ ID NO: 70365 - DNA, 1014 bp, Unknown
  Obtained from environmental sample
  misc_feature (1)..(1014): n is a, c, g, or t
gtgtacaagagcgtcgatacaaaagtgaattttcccaaactggaagaagaagtacttgccttttgggagaaaaacaggatatttgaaaaatcagtttcgcagcgcgagggaaaagatgaattcgttttttacgatggtcccccatttgctacgggactgccgcatttcgggcactttattccaagcacgatcaaagacatcattccccgctatcagacaatgaaaggcaaaaaggtggaacgccgcttcggttgggactgccacggccttcccattgaaaaccttatagaaaaagagcttaagcttaattccaaaactgatatagaaaaatacggcgtcgcgaattttaacgaagcctgccgcgccgcagttttgcgttacgtgaaagaatggcggcgtaccataacgcgtctggggcgctgggtggatttcgacaacgattataaaaccatgaacccggactacatggagaccatctggtgggttgttaaatcgctttgggagaaagggcttctttacgaaggctattacaacctcccttattgtccgcgctgttccaccgtgctttccaatcacgaacttaatctgggcggttacaaagatgttcacgatccggcgattacgattcgctttaaggtgaagggagacgccttcccttccaacacgtattttctggcgtggacaaccactccctggacgctgccttctaaccttgctttaactctggggccggacatcgactatgtgatggtgcaggatagttccgattattacattttgggagaagcccgactttcggcttattacaaaaatgaaagcgaatataaaatcatctggcgaaaaaaaggagcagagctgaaaggcatagagtacgagccgctctttccgtattttcctgggccgccgaaaacaacgcgttcaggacttacctgggggattttgttacaaccgaagacggcacgggcattgtgcataccgcgccgggctttggcgaagacgacgccagggtgctga

SEQ ID NO: 70366 - protein, 337 aa, Unknown
  Obtained from environmental sample
  DOMAIN (17)...(336): tRNA synthetases class I (I, L, M and V)
  misc_feature (1)..(337): Xaa is any amino acid
MYKSVDTKVNFPKLEEEVLAFWEKNRIFEKSVSQREGKDEFVFYDGPPFATGLPHFGHFIPSTIKDIIPRYQTMKGKKVERRFGWDCHGLPIENLIEKELKLNSKTDIEKYGVANFNEACRAAVLRYVKEWRRTITRLGRWVDFDNDYKTMNPDYMETIWWVVKSLWEKGLLYEGYYNLPYCPRCSTVLSNHELNLGGYKDVHDPAITIRFKVKGDAFPSNTYFLAWTTTPWTLPSNLALTLGPDIDYVMVQDSSDYYILGEARLSAYYKNESEYKIIWRKKGAELKGIEYEPLFPYFPGPPKTTRSGLTWGILLQPKTARALCIPRRALAKTTPGC

SEQ ID NO: 70367 - DNA, 831 bp, Unknown
  Obtained from environmental sample
  misc_feature (1)..(831): n is a, c, g, or t
gtgctgcaccttttcgcggtcgcgcgcgaaaggggaatttcgcttaacctgaacatggtgaacggaatcagcgcaagaacgccgaacctctgccggcttgcaccggcaggcaaacaccacatccaggatctacatttcgcgggaggagtgtccgccgtcatgcgggagctgggagagctattaaacagggatgagcttaccgttacaggcaagacggctggcgagaacgtacagaacgcggttgtcaaaaacggcgaggtaattcaacgctacgctccctccggcggccttgcggtgctgttcggcagccttgctcctgacggcgcggttgtaaagcgcagcgccgtaaaaaaggagatgctggattttaccgggagtgcaagggtttttgacggcgaagaagctgcggtcgccgcgatatacagcgggaaaattgaagtcggcgatgtggttgttatacgctacgaagggccttccggcgggccaggtatgcgcgagatgctccaggcgacctcggcaattgcgggaatgggccttgacgcggatgtggcgctgatcaccgacgggcgcttttccggcgcgacccgcggggcagccatcgggcatatatcccccgaagcggcggcgggcggcccgattggttacgtgatcgatggcgacaaaattcacattgatattgagcgtaacgccataacgctgctcgtatccgatgaagaaatgcaaaagcgcagggatacaatgcgcttaagggagcctgaagctttaagcggttacttaaaacgttacgcgaaagcagtctcatccgccgacaagggagcagtactgaattaa

SEQ ID NO: 70368 - protein, 276 aa, Unknown
  Obtained from environmental sample
  DOMAIN (1)...(276): Dehydratase family
  misc_feature (1)..(276): Xaa is any amino acid
MLHLFAVARERGISLNLNMVNGISARTPNLCRLAPAGKHHIQDLHFAGGVSAVMRELGELLNRDELTVTGKTAGENVQNAVVKNGEVIQRYAPSGGLAVLFGSLAPDGAVVKRSAVKKEMLDFTGSARVFDGEEAAVAAIYSGKIEVGDVVVIRYEGPSGGPGMREMLQATSAIAGMGLDADVALITDGRFSGATRGAAIGHISPEAAAGGPIGYVIDGDKIHIDIERNAITLLVSDEEMQKRRDTMRLREPEALSGYLKRYAKAVSSADKGAVLN

SEQ ID NO: 70369 - DNA, 3765 bp, Unknown
  Obtained from environmental sample
  misc_feature (1)..(3765): n is a, c, g, or t
atggccgacggccgagcggccgagatctttgtcggcttgcttctaacaaaaagggaattaggaatgaaagtcaacagatttttcacagaccgtaaaagcggtccgtattatgatattgtctgggaacggcgcaaaagtgagattctcggcagtaaagggaaggcgatcttttccgaggacacggttatcgtgccggcgttctggagcaagatagcttcggacatcatagcccaaaagtatttccgtaaggcgggcatccctacggataaaatctacgagtggaagaagtggcttccgacggtcgagaatcccgaagacccgggcaactctctgcccaatgacggctgcgagcatgacgcaagacaggtctttcaccggcttgcctacacatggatggattggggcaggcggaacaattactttgacagcgaagaggacgagaaggcgttttatgacgaaacctgttacatgctggctcatcagttcgccgcgcctaacagcccgcagtggtttaataccggattgtacgccgtttacgggatcgacgggccggcgcaggggcatttttattttgatcctgaaagaaatgaggttgtaaagtccgagagcgcgtacaagcggccccagccgcatgcctgctttattctttccatagatgacgatcttgtaaacgagggcggcatcatggatttgatgacccgtgaggctaggctcttcaagtacgggtcggggacgggttccaatttttcgcgcattcggggcttgaacgaaaaactttcaggcggcggttattcgtcggggcttttatcgtttttgaaagttggggaccgttcggcttccgcgattaagtcgggggggactacccgccgcgccgccaagatggttaccctcgatatcgatcatcccgatgttgagaattacatcaactggaaatcaggagaggaacacaaagtcgcctcaatggtaacaggctcccttatattaaagaaacatattgacggtatcaaaaaagccctgacaggcttccgcggtcctgaagaagataaattcaacgccgagaaaaaccatgaattggcggcggttctgcgcgccgcgttaggcgataaaatacccgcgtcgtatctttaccagcagcttcgccgtcttgagcagggcgatgaggaagtcgatgtctcccaatattccaccgcttgggaagacgaggcgtacaatactgtttcggggcaaagttccaataacagcctgcgtgttaccgatgagttcatgcgagcggtgttaaacgataccgattgggatcttaaaagccgcacctcaggcgacgcggtaaaaaccgtcaaagccagaaaactttggacggatatcgccaggaccagctggcagtgcgcggatcccggccttcaataccacacgacaattaacgattggcatacatgccccgcgggcggagagatacgggcttccaacccgtgttcggaatatatgtttttggacgataccgcgtgcaacctggcttccataaaccttgtcgcgctatacgacaaaagaagaaaagcgtttaacgtcgaaggttatcttcacgcgataagcatctggactacaattttggaaatttccgtcgtgatggcgcagtttccgtcttcacgcatcgccgagctttcgtacaagtaccgcacgctggggctgggttacgccaacttgggaactcttcttatgatcatgggactcgcttatgattcggagcaggggcgcgcggtagcgggggcgctttcggcgctgcttaccggcgaagcgtacgcgcaatccgcccgcatggcgggagagcacggtccctttgcgcattacggcgagaactcgctgaatatgctccgtgttatacgcaaccacaggcgggcggtgaataacgcgcccgatattgaatatgagggaatccataccgtaccaaagggaatagatccggtttattgcccgccttatcttctggacgcggcaaaggacgcgtgggacagggcgcttgagttcggtaaaatgaacggctaccgcaacgcgcaggtaacggcgatcgcccccaccggaactatcggccttttgatggactgcgacaccacgggtattgagcctgatttcgcgcttgttaaatttaaaaatcttgccggcggcggtcagttcaaaattattaatcagtctgttcctatcgcccttgaaacgcttggttattcgcctcagactattgaggaaattgtcgcgtacgcaatgggcaggaaaaccctgaacggcgctccggcaatcaatgttgaaagccttaaagcaaaaggttttactcccgaggcgattgccgcggcggaagacgctgtaaagactgcgaccagtctggaaggcgtttttaatccgtgggtgctgggcaaatcgtttgtggagaaggtgctgaaggttcccgaatctacatggtcgcttgcgggtttttctcttctaaaacatcttgaatttgtaaaggaagatattgaggaggcggaattgttcgcctgcggaactatggctttagagggcgcgcccggtcttaaaaaagaacattatgttatctttgacacagccaacccttcgggcaaaaagagcaaacgctcgattccgtggacggcgcatataggcatgatggcggcggttcagccttttatttccggggcgatttccaaaacaatcaatatgccgaacggggctaattacgacgatgttaagggcgcgtacatgctctcgtggaaaaacgggcttaaggcggtggctttgtaccgcgacggctcgaaactttcacagccgcttaacagcgttgacccgggagcggatccgttagccgacactattatgaaggttgagagggggttggacattccggcttcctcgcccgaccgcaagaaattaaatgcgcgcggtttacgcagggctttgcctaaccgcaggatgggttacactcaaaaggcgaaaatcggagggcactcaatttttatcagaaccggcgaatatgaggacggcaatctgggcgaaatcttccttgacatgcacaaggaaggcgcggctttcaggagcctgttaaacagtttcgccattacggtttctctcggtttgcaatacggcgtgcctcttgaagaatatgttgacgctttcactttcagcaggtttgagcctaacggttttgtgcaggggcacgattatgtgaagatggcgaccagcgttattgattatattttccgcgatctcgccatcagttatctgaaacgcagcgacctggcgcaggttaagccggaagatcttgaggctacgggaaccaagagcgatttcggcgtgtccgacggcaaagaccgcagcgacaagcacagcgcgggtttcaggccgagcgcgacggtttccgcgccgaagagcgcgtctgcgcttcaagcttcacagcaagcagcggcgcagcaacaagcagcggcgcaaacgtcttcaacggggaaaaccgttaaagggcagggtgcctcttttgcgggaaacagtatgtcgatagacgggggagctgttgcgggtaacgccgccaaagccggcatttcttcttccggggcgcatacggcggttatggaaggctcttaccctgaggagaacgaagtgattaagatagtcaacgcccggcttaaaggttacgagggcgatccttgttctttatgcgggtctttttctctggttaggaacgggacttgtttgaagtgcgataattgcgggagtacgacggggtgttcgtag

SEQ ID NO: 70370 - protein, 1254 aa, Unknown
  Obtained from environmental sample
  DOMAIN (213)...(760): Ribonucleotide reductase, barrel domain
  misc_feature (1)..(1254): Xaa is any amino acid
MADGRAAEIFVGLLLTKRELGMKVNRFFTDRKSGPYYDIVWERRKSEILGSKGKAIFSEDTVIVPAFWSKIASDIIAQKYFRKAGIPTDKIYEWKKWLPTVENPEDPGNSLPNDGCEHDARQVFHRLAYTWMDWGRRNNYFDSEEDEKAFYDETCYMLAHQFAAPNSPQWFNTGLYAVYGIDGPAQGHFYFDPERNEVVKSESAYKRPQPHACFILSIDDDLVNEGGIMDLMTREARLFKYGSGTGSNFSRIRGLNEKLSGGGYSSGLLSFLKVGDRSASAIKSGGTTRRAAKMVTLDIDHPDVENYINWKSGEEHKVASMVTGSLILKKHIDGIKKALTGFRGPEEDKFNAEKNHELAAVLRAALGDKIPASYLYQQLRRLEQGDEEVDVSQYSTAWEDEAYNTVSGQSSNNSLRVTDEFMRAVLNDTDWDLKSRTSGDAVKTVKARKLWTDIARTSWQCADPGLQYHTTINDWHTCPAGGEIRASNPCSEYMFLDDTACNLASINLVALYDKRRKAFNVEGYLHAISIWTTILEISVVMAQFPSSRIAELSYKYRTLGLGYANLGTLLMIMGLAYDSEQGRAVAGALSALLTGEAYAQSARMAGEHGPFAHYGENSLNMLRVIRNHRRAVNNAPDIEYEGIHTVPKGIDPVYCPPYLLDAAKDAWDRALEFGKMNGYRNAQVTAIAPTGTIGLLMDCDTTGIEPDFALVKFKNLAGGGQFKIINQSVPIALETLGYSPQTIEEIVAYAMGRKTLNGAPAINVESLKAKGFTPEAIAAAEDAVKTATSLEGVFNPWVLGKSFVEKVLKVPESTWSLAGFSLLKHLEFVKEDIEEAELFACGTMALEGAPGLKKEHYVIFDTANPSGKKSKRSIPWTAHIGMMAAVQPFISGAISKTINMPNGANYDDVKGAYMLSWKNGLKAVALYRDGSKLSQPLNSVDPGADPLADTIMKVERGLDIPASSPDRKKLNARGLRRALPNRRMGYTQKAKIGGHSIFIRTGEYEDGNLGEIFLDMHKEGAAFRSLLNSFAITVSLGLQYGVPLEEYVDAFTFSRFEPNGFVQGHDYVKMATSVIDYIFRDLAISYLKRSDLAQVKPEDLEATGTKSDFGVSDGKDRSDKHSAGFRPSATVSAPKSASALQASQQAAAQQQAAAQTSSTGKTVKGQGASFAGNSMSIDGGAVAGNAAKAGISSSGAHTAVMEGSYPEENEVIKIVNARLKGYEGDPCSLCGSFSLVRNGTCLKCDNCGSTTGCS

SEQ ID NO: 70371 - DNA, 357 bp, Unknown
  Obtained from environmental sample
  misc_feature (1)..(357): n is a, c, g, or t
gtggaatttgtcctttcattgtccagcgatattattcctctggaaaccgaatggggcaccaatgaaaactcctttatgatagaacacctggccgatcatacttatagccctgaaccggtgcttatgaaaaaaagttccagagaagaaactttcaggatgttaaacgaactaaaagaaaatgaaaaaaacgtcttgatttacaggtacgagcttaacggaagcaaacgccgcacccttaaaaacatcagcaccaaactggggctgtcaaccgaaacaataaggcagatagaactcagggcgctgcaaaaactccgcgacaatgcaaaagatctgaagctttatgtggaaagtagttaa

SEQ ID NO: 70372 - protein, 118 aa, Unknown
  Obtained from environmental sample
  DOMAIN (53)...(106): Sigma-70, region 4
  misc_feature (1)..(118): Xaa is any amino acid
MEFVLSLSSDIIPLETEWGTNENSFMIEHLADHTYSPEPVLMKKSSREETFRMLNELKENEKNVLIYRYELNGSKRRTLKNISTKLGLSTETIRQIELRALQKLRDNAKDLKLYVESS

SEQ ID NO: 70373 - DNA, 366 bp, Unknown
  Obtained from environmental sample
  misc_feature (1)..(366): n is a, c, g, or t
atgtatagcatagattatatacggcgtgcggtagcctacaaagacgaagggcatactttcagggaattgaaagatgcgtttaatatcccggcagaaacgtattatcaatggaaagaaaagctcgaaaacggatatgacgggaaaaaagtctttcgggaacggtcgcgaaagatagacaaagagaaactaaaaaaagccgtagaggaaaaaccggatatgtacctttatgaactggcacagctgtttgattgtaccccccaagcggttttcctcatgcttgaaaaactcaatataacgcgaaaaaaaagtccttcacttattatgaaaagtccgaagaaaagcgtgcagaatttattacacggctaa

SEQ ID NO: 70374 - protein, 121 aa, Unknown
  Obtained from environmental sample
  DOMAIN (1)...(120): Transposase
  misc_feature (1)..(121): Xaa is any amino acid
MYSIDYIRRAVAYKDEGHTFRELKDAFNIPAETYYQWKEKLENGYDGKKVFRERSRKIDKEKLKKAVEEKPDMYLYELAQLFDCTPQAVFLMLEKLNITRKKSPSLIMKSPKKSVQNLLHG

SEQ ID NO: 70375 - DNA, 312 bp, Unknown; identical to SEQ ID NO: 287
  Obtained from environmental sample
  misc_feature (1)..(312): n is a, c, g, or t

SEQ ID NO: 70376 - protein, 103 aa, Unknown; identical to SEQ ID NO: 288
  Obtained from environmental sample
  DOMAIN (8)...(90): Transposase
  misc_feature (1)..(103): Xaa is any amino acid

SEQ ID NO: 70377 - DNA, 876 bp, Unknown
  Obtained from environmental sample
  misc_feature (1)..(876): n is a, c, g, or t
atggcgtatcaattcatgaaagcgaaccaggaccgatacgccattaaggagatggccgtgctttttggggtaagccgcagcgcctattaccgatgggcccgggtcggggcctcgcaggggcgtaaggaagccgatgcggagctggtacgccttattatggaaatagcggcgaagcatcaccgccggtatggcagcccgagggtacgccgggaacttcgcgatgcctacggaaaacgggtcagccttaagaaagtggcccgcctgatgcgggaaaacggccttaatgcccgaaggggcaggaagcatatcccgacgaccgactccagccatgcccttgcagtctctgaaaacatactgtcccgggagttttatgccgaatccggcggcgtaaagtgggtttcggacattacctatctgcgtacggtaaacggctgggtatacctgaccatagtgcttgacctgtttgaccggaaaattattggctgggcgcttagccttggcatggaaacttccgagacagccatcgccgcttttgaaatggcagtcaaaaacaggagccctcaaggcggcctgatattccattcggacaggggcgtccagtattgcgcccaatccttccgggatgttttgagggaaagatctcctacagttaggcagagcatgagcaggaagggcaattgctgggacaacgcatgcgccgaatcgtttttcaaaacgctgaagagggaactggaaacattggacggcaggcattctgaggctgaagtcaggcaatcggtatttttctacattgaggcgtattacaaccgcattcgcatgcattcgttgcttgactatgtagcgcctaacgtgtttaacttaggtacccccgcttaa

SEQ ID NO: 70378 - protein, 291 aa, Unknown
  Obtained from environmental sample
  DOMAIN (124)...(287): Integrase core domain
  misc_feature (1)..(291): Xaa is any amino acid
MAYQFMKANQDRYAIKEMAVLFGVSRSAYYRWARVGASQGRKEADAELVRLIMEIAAKHHRRYGSPRVRRELRDAYGKRVSLKKVARLMRENGLNARRGRKHIPTTDSSHALAVSENILSREFYAESGGVKWVSDITYLRTVNGWVYLTIVLDLFDRKIIGWALSLGMETSETAIAAFEMAVKNRSPQGGLIFHSDRGVQYCAQSFRDVLRERSPTVRQSMSRKGNCWDNACAESFFKTLKRELETLDGRHSEAEVRQSVFFYIEAYYNRIRMHSLLDYVAPNVFNLGTPA

SEQ ID NO: 70379 - DNA, 798 bp, Unknown
  Obtained from environmental sample
  misc_feature (1)..(798): n is a, c, g, or t
atgttaaacctcaacacccgaaaaaccttcgggattttcaaagacccatttacggacgatgtcatcaccgccgatgatgtctaccttaacgacgcatcccgctttgcggttgagtacctgtaccaaaccgccaaggcaggcgggatgctggccctcgtcggcgagtctggctccggcaagagcaccgtccgccgcctggctatcgaccgctggcaggcggaaggccagaaggtgagggtcattatcccgcggatattcgagaagcagcggcttgccgcgtccgccatctgcgacgccatcatcgccgactgctccaccgaaaagccccgccgcaccctggaagccaaagcccggcaggtggagcacatccttaccaactccagccgttcaggcttttcccacatcctcatgatagaggaagcgcacgacctttcgattcagaccctcaagtacctcaagcgcttctgggaactagaggacggcttcaagaaattattggcgattgtcctaatcgggcaggtcgagatgaaagccaagctggacgaatccaaaaactgggaagcccgggagataatccgccgcatggagatcctcgagctggagcctttggcggacaagaaggaagtcgccggatacctggacttgaaattttcgcggctcanaaaagaacggaaggaagtctttaccgacgaagcctgcgaggctcttgcccgcaagctccagcgccagaccagcaacgatgtggtgtactcggtcgcttacccctgctcatcaacaactgggcgcggaaagcgatga

SEQ ID NO: 70380 - protein, 265 aa, Unknown
  Obtained from environmental sample
  misc_feature (1)..(265): Xaa is any amino acid
MLNLNTRKTFGIFKDPFTDDVITADDVYLNDASRFAVEYLYQTAKAGGMLALVGESGSGKSTVRRLAIDRWQAEGQKVRVIIPRIFEKQRLAASAICDAIIADCSTEKPRRTLEAKARQVEHILTNSSRSGFSHILMIEEAHDLSIQTLKYLKRFWELEDGFKKLLAIVLIGQVEMKAKLDESKNWEAREIIRRMEILELEPLADKKEVAGYLDLKFSRLXKERKEVFTDEACEALARKLQRQTSNDVVYSVAYPCSSTTGRGKR

SEQ ID NO: 70381 - DNA, 1161 bp, Unknown
  Obtained from environmental sample
  misc_feature (1)..(1161): n is a, c, g, or t
gtgctaacggatcactattcgtcatcggtctgtgtgcgctattacgcggcatcgggagagaaagcagataatatgtacgactttctgctttacgcctgggggaagaaagacaacccggtatacggctttcacggcctgcctgaactgctgatatgggattgcggctctgccaacaaagccagggcgattaccaaagcgcttcaggcgttcagggtaacgaccatgcctcacttgccgggcaatccccgcgcaaaggggcaggtcgaaagggccaacgatctggtagagcataaatttgaaagccgcctgcgaattgagccggttcacagcattgaggaactcaacaaagccgcggagcggtggtgcgccgcgtttaattcagacagcattgaaaacacagattcgcgcctgcaccgtggacgccgggttattgggtgccgctataacttgtggaacagcattaagaacgaacaactgcgggaactgcccgatcctgaaatatgtcggcaaatctacacgactggtatcgttggccgcacagtagccggagatctaacggttaccctgttgcacccaaaaacaaaacggtcagaagtttacagcttagccgggcttcctggaatcatcattgggaagcagataaatgtacagccgatcctggtggatgctgaaccgctcattatcgcaagctgggaagtcagcaaaggcgagccgttcagcaaagagctggaacccattgaatgggatcgggctggtttcgatgttaccgcgcccgtatttggcaaagagtaccaacgcttgtcggatacccagattgaaaaaaacagcaaagagctgaaacagatcaatgccgaacttaagggaacgctcaaagcccacagttttattaatccgacgaatccctttgccagccagcgcacaggggaacagatcactgtatcccagccggatcgcgttgccatccatgagattttggtaagtcattttgagtttgtaagacgggtaagcgccaggcttggctatacccccgatggattatacgaccggataaaaaaggaataccccaacggggcgcctgaatcattggtcgaagctacagccaaagaatacgaattagcgaaccagtatggatcgcaagatcgtatggccaattttatgtag

SEQ ID NO: 70382 - protein, 386 aa, Unknown
  Obtained from environmental sample
  misc_feature (1)..(386): Xaa is any amino acid
MLTDHYSSSVCVRYYAASGEKADNMYDFLLYAWGKKDNPVYGFHGLPELLIWDCGSANKARAITKALQAFRVTTMPHLPGNPRAKGQVERANDLVEHKFESRLRIEPVHSIEELNKAAERWCAAFNSDSIENTDSRLHRGRRVIGCRYNLWNSIKNEQLRELPDPEICRQIYTTGIVGRTVAGDLTVTLLHPKTKRSEVYSLAGLPGIIIGKQINVQPILVDAEPLIIASWEVSKGEPFSKELEPIEWDRAGFDVTAPVFGKEYQRLSDTQIEKNSKELKQINAELKGTLKAHSFINPTNPFASQRTGEQITVSQPDRVAIHEILVSHFEFVRRVSARLGYTPDGLYDRIKKEYPNGAPESLVEATAKEYELANQYGSQDRMANFM

SEQ ID NO: 70383 - DNA, 879 bp, Unknown
  Obtained from environmental sample
  misc_feature (1)..(879): n is a, c, g, or t
atgagttttacgccgcgcagggggggaaccctctcgcttgaagcgttgagggaacaggcaagaaaaaactgcgaaggcagtatgggcagaatcagcgcggcgctggagcggctgcgtgaaaaagaagcgtcttttgccgattcgcaccgtttaaaaacttacggcgatattattctttccaatatagcgaatattaaaacggacgataaatggctggaaacagagtatgacggcgaaaatatacgtattgagcttgagcagcgcgtaaacccgtcggcgcaggcgcagaaatattacgataaataccgcaaggcgaagaacgggcttgcagatgttcaacgggaaattgaaagcggggagagggaacttaaagaagtaacggagcggttagaacgtctgttatgtgaaaataatcctttgattctcgctaaattgctaaaaacaggcgtttccgcgccgcgggcggcttcgggaaaaaaggaaaaggcgcgtccggggcttgcgtttaaacgcggtgattggattatcattgttggcagggacgcaaatgaaaacgacgaacttttgcgccgtcatgtaaaggggaacgatatgtggctccacgcaagggattatcacggctcctatgtgtttataaaacaaagggctggaaaatcggttccgttggagatactgcttgacgccggcagccttgcgattttttattcaaagggcaggaataacggcgaaggcgatttgttctacactcaggtaaaatatttaagacgcgccaaaaacggaccaaaggggctggttatccccactcaggaaaaaaacctccatgttaaggttgatgatgagcgccttcgttctcttgaaaactgtaaaattgttcagtaa

SEQ ID NO: 70384 - protein, 292 aa, Unknown
  Obtained from environmental sample
  DOMAIN (167)...(256): Domain of unknown function (DUF814)
  misc_feature (1)..(292): Xaa is any amino acid
MSFTPRRGGTLSLEALREQARKNCEGSMGRISAALERLREKEASFADSHRLKTYGDIILSNIANIKTDDKWLETEYDGENIRIELEQRVNPSAQAQKYYDKYRKAKNGLADVQREIESGERELKEVTERLERLLCENNPLILAKLLKTGVSAPRAASGKKEKARPGLAFKRGDWIIIVGRDANENDELLRRHVKGNDMWLHARDYHGSYVFIKQRAGKSVPLEILLDAGSLAIFYSKGRNNGEGDLFYTQVKYLRRAKNGPKGLVIPTQEKNLHVKVDDERLRSLENCKIVQ

SEQ ID NO: 70385 - DNA, 660 bp, Unknown
  Obtained from environmental sample
  misc_feature (1)..(660): n is a, c, g, or t
gtgttctttgtgagaaatttttgcgaactatgctatactacccccatgtccctgaactggaaagaaataaatttaatcctcgatgaactagctcttgaaggcgcgcaaattcagagcgccgtgcagagcgcgtttgatgtgattattttgcgtcttcataaaaaaggggaaacaaagcaggtgcttgtttcgttaagtcccggcgcgtgcagactgcatgaaacttttcgcgctgtgcccaaaagcgagaagcctctgcgtttcgcgcaatttttatcgtcaaagattgtaaacggctggataacggaagcggcgcagataggggataatcgcattgtgcgcttaaccgttaaaagaacgattagcgccgatgacggcaaagattcatctgagacagcaatttataaattgtacattcgtctttggtcaaacgcggcgaattttatcgttaccgatgacagcggcgttgtgttggatgctatgcgccgtttgccgaagcgcggcgaagttacgggcggaagttatctgccggaaaatattgaggcaaagaccgataaacctgtccgcgagtttgaaattcgcgaactccccggagaaggttccttcaataaaaaagtagatgagttttacgccgcgcagggggggaaccctctcgcttga

SEQ ID NO: 70386 - protein, 219 aa, Unknown
  Obtained from environmental sample
  misc_feature (1)..(219): Xaa is any amino acid
MFFVRNFCELCYTTPMSLNWKEINLILDELALEGAQIQSAVQSAFDVIILRLHKKGETKQVLVSLSPGACRLHETFRAVPKSEKPLRFAQFLSSKIVNGWITEAAQIGDNRIVRLTVKRTISADDGKDSSETAIYKLYIRLWSNAANFIVTDDSGVVLDAMRRLPKRGEVTGGSYLPENIEAKTDKPVREFEIRELPGEGSFNKKVDEFYAAQGGNPLA

SEQ ID NO: 70387 - DNA, 312 bp, Unknown
  Obtained from environmental sample
  misc_feature (1)..(312): n is a, c, g, or t
atggataaacaagctgaattgcggcaatggctggaaattgctgacaacgatttagcttatgcagaatttgcttcaaagaatatgtggcctgttccgtatggaattatttgttttcattgtcaacaagcagtagaaaaatatctcaagcggtttctggtaatgaatgatattgctccgcctaaaattcatgatttacaagaactattaaaactctgtgcagctattaagcctcaattttccactatatacgaggaatgtagtgttttgtcagggtatgcggtacaaacccgctaccaaatgaaatatctgtag

SEQ ID NO: 70388 - protein, 103 aa, Unknown
  Obtained from environmental sample
  DOMAIN (7)...(100): HEPN domain
  misc_feature (1)..(103): Xaa is any amino acid
MDKQAELRQWLEIADNDLAYAEFASKNMWPVPYGIICFHCQQAVEKYLKRFLVMNDIAPPKIHDLQELLKLCAAIKPQFSTIYEECSVLSGYAVQTRYQMKYL

SEQ ID NO: 70389 - DNA, 324 bp, Unknown
  Obtained from environmental sample
  misc_feature (1)..(324): n is a, c, g, or t
atgaatactattattcaagcagagttggatacacttaaagaaattatcataaatactgttcctgtagaacaaatttatctttttggctcctatgcatccggaacgccgcataaagactctgatcttgatttatatgtggttcttagtgataatgcgcaaatacggcttattgacgcaattgcaaaaatcagactggcaataggcatgaaaaaaacaatgccggtagatattcttgccaacactttgagcagataccgtgaacgggcagaaggaccaaccattgagcgtacgattaacagcgaaggtataaaaatatatggataa

SEQ ID NO: 70390 - protein, 107 aa, Unknown
  Obtained from environmental sample
  DOMAIN (5)...(105): Nucleotidyltransferase domain
  misc_feature (1)..(107): Xaa is any amino acid
MNTIIQAELDTLKEIIINTVPVEQIYLFGSYASGTPHKDSDLDLYVVLSDNAQIRLIDAIAKIRLAIGMKKTMPVDILANTLSRYRERAEGPTIERTINSEGIKIYG

SEQ ID NO: 70391 - DNA, 1698 bp, Unknown
  Obtained from environmental sample
  misc_feature (1)..(1698): n is a, c, g, or t
atgtcaacagatgataaaaaaattatttactccatgtataaggtttccaaaaaacatggaactaaacaggtgctaaaggatattagtatctcctactattacggcgcgaaaatcggcgttatcggtcttaacggatcgggtaagtcgagtcttttaaaaattctctcaggcaaagatacggagttcgcgggagaaacaactgtcagtccggggtatactatcgggtttcttgaacaggagccgtatcttgaaccggggaagactgtcaaggaaattgtgtccgagggggcgaaagaactggttgaccttcttgcggaatttgacaaggtaagcgaagcgtttggagacccggacgcggattacgataaactgggcgcgaagcaggcggaattgcaggaaaaaatcgaagccgccgacgggtggaacttggatagccgccttgagcttgcgatggaagctctgcgctgtcctcccggcgacgaggttgtggatcatctttccggcggtgagaggcggcgtgtcgctctttgccgtctgctcctgcaaaagcccgacattcttctgctcgacgaacctaccaaccacttggacgcggaaactgtggcatggctggaacgtcatctgcgggactacgccggaacagttatcgctgttacacacgaccgctattttttggataatgtcgctggctggatactggagcttgaccgcggagagggaattccgtggaagggaaattattcgggctggcttgaacaaaaagaaaaccgcatggcgcaggaagaaaaaggcgaaagcgacaggcgcaaaacattacagcgcgaacttgaatggatacgcatgagtccaaagggacggcacgcaaagagcaaggcgcgtattactcagtacgaaaaactttttcaggacgatgagagggaacgttcgcggggagcggtaacaaacaataaaatcacaattcctgcgggtccgcatttgggtaaacttgtaattgaagcgcaagggttatcaaaatctttcgggaacaaattgttattcgacaatatgacttttacagtgccgccgggcgcgtgcgtgggtattatcggaccgaacggcgcgggcaagactacactttttaaattgataacgggtattgaaaaaccggacgcgggagaattgcggctgggcgagactgtaaaaatcggttatgccgatcagatgcgcgcctctcttgacggagaaaaaagcgtttgggaacagctttcggacggacaggatttgattaaactcggcagcggacagggcgcgagggaagtaaactcccgcgcctactgctcatggtacaatttttcgggagcggatcagacaaaaaaagtgggtgtcctttccggcggagagcgtaacaggcttaatcttgcgatgatgctcaaggaaggtgctaatgttcttttgcttgacgagccgacaaatgatcttgatgtaaacacgttacgcgctttggaagacgctctggatactttcgccggagttagtcttgtaatcagccacgaccgttggttcttggatcgcattgttacgcacatattggcttttgaagacggcgaagtggtatggtacgacggcaactggtcggagtacgccgattggcgcagagagaaacttgggtctgcggcggatagtccgcatcgctatgtgtaccgtanattggaaaggtag

SEQ ID NO: 70392 - protein, 565 aa, Unknown
  Obtained from environmental sample
  DOMAIN (356)...(528): ABC transporter
  misc_feature (1)..(565): Xaa is any amino acid
MSTDDKKIIYSMYKVSKKHGTKQVLKDISISYYYGAKIGVIGLNGSGKSSLLKILSGKDTEFAGETTVSPGYTIGFLEQEPYLEPGKTVKEIVSEGAKELVDLLAEFDKVSEAFGDPDADYDKLGAKQAELQEKIEAADGWNLDSRLELAMEALRCPPGDEVVDHLSGGERRRVALCRLLLQKPDILLLDEPTNHLDAETVAWLERHLRDYAGTVIAVTHDRYFLDNVAGWILELDRGEGIPWKGNYSGWLEQKENRMAQEEKGESDRRKTLQRELEWIRMSPKGRHAKSKARITQYEKLFQDDERERSRGAVTNNKITIPAGPHLGKLVIEAQGLSKSFGNKLLFDNMTFTVPPGACVGIIGPNGAGKTTLFKLITGIEKPDAGELRLGETVKIGYADQMRASLDGEKSVWEQLSDGQDLIKLGSGQGAREVNSRAYCSWYNFSGADQTKKVGVLSGGERNRLNLAMMLKEGANVLLLDEPTNDLDVNTLRALEDALDTFAGVSLVISHDRWFLDRIVTHILAFEDGEVVWYDGNWSEYADWRREKLGSAADSPHRYVYRXLER

SEQ ID NO: 70393 - DNA, 594 bp, Unknown
  Obtained from environmental sample
  misc_feature (1)..(594): n is a, c, g, or t
ttgttcaagccagcccgaataatttcccttccacggaattccctctccgcggtcaagctccagtatccagccagcgacattatccaaaaaatagcggtcgtgtgtaacagcgataactgttccggcgtagtcccgcagatgacgttccagccatgccacagtttccgcgtccaagtggttggtaggttcgtcgagcagaagaatgtcgggcttttgcaggagcagacggcaaagagcgacacgccgcctctcaccgccggaaagatgatccacaacctcgtcgccgggaggacagcgcagagcttccatcgcaagctcaaggcggctatccaagttccacccgtcggcggcttcgattttttcctgcaattccgcctgcttcgcgcccagtttatcgtaatccgcgtccgggtctccaaacgcttcgcttaccttgtcaaattccgcaagaaggtcaaccagttctttcgccccctcggacacaatttccttgacagtcttccccggttcaagatacggctcctgttcaagaaacccgatagtataccccggactgacagttgtttctcccgcgaactccgtatctttgcctga

SEQ ID NO: 70394 - protein, 197 aa, Unknown
  Obtained from environmental sample
  misc_feature (1)..(197): Xaa is any amino acid
MFKPARIISLPRNSLSAVKLQYPASDIIQKIAVVCNSDNCSGVVPQMTFQPCHSFRVQVVGRFVEQKNVGLLQEQTAKSDTPPLTAGKMIHNLVAGRTAQSFHRKLKAAIQVPPVGGFDFFLQFRLLRAQFIVIRVRVSKRFAYLVKFRKKVNQFFRPLGHNFLDSLPRFKIRLLFKKPDSIPRTDSCFSRELRIFA

SEQ ID NO: 70395 - DNA, 1236 bp, Unknown
  Obtained from environmental sample
  misc_feature (1)..(1236): n is a, c, g, or t
atggcaacacctgtaggacgaatagaaaaagaatttttatttaacgcgatatttgaagaaaaaatctctttaatgcacatgagggatagagtagagtatatttttaaacttgacgagaaggcaggagaggaattggtttttcgctctgaaaaacctttgggcaagttaaaacctcacacaaaattgccgattaaatttaattaccgagggcaggtgatagattttacagcggaattaatagcgcaaaaagaagatctggtttattgtaagatgcccgcggcgttgtataaaaatctggatcgtaattttttaagggttgacgctccgtccgacataaaaattctttttactttccgcggggatcgttataatcttgcctttccgaaagtttctgagtatgaaagtattacagttaacgatttggttaacaaccttgacccgagcaatctttccgggcttataaaacaaatagcgggtatgttaagtaatttttgcgatggttacaaaatagcgaattttaaagataaaaaaccggaaacgctggaagaaaaaatagtatcggaaacggggaaaactctttttattccctcgactgtgggatatttaccgaagaccgatccgtatcccaaaaaacgcataataacagaggatatatttcacagatatcttgagactaacggtattggaactaaatatttggaagaaaacacggagcgtattttaaagaataaatttaaagacggtattttttccgacgcgtgggttcccattttgtttcatgaatatgttataggatatattcgtatttggattgataaacagggcaggcttccgtttgatttcagcgtgcttgataatgtttatcaatacgctaaggtgcttgcgttcggattaaaagagaacggatattttgatcatgggaaggtagagaatcagccgtttcagggcaaggtgcttgatataagcgcgtccggtttgatgtttgcgtatccgctcggttccagtatgctggcgactcttttggttgattcggaattaacggtaactattgaaactccgaaacgcacaattaatgtcctcgcgaaaattgtccgtaagtttaaagataagagcgcgggctacttgggatgccgctttataaatattgctcccgaagatacgcgttttctttatgagcatttgtatggcaggcaaattgatgatattgatacggagtttttagccggacaggtttag

SEQ ID NO: 70396 - protein, 411 aa, Unknown
  Obtained from environmental sample
  DOMAIN (273)...(396): PilZ domain
  misc_feature (1)..(411): Xaa is any amino acid
MATPVGRIEKEFLFNAIFEEKISLMHMRDRVEYIFKLDEKAGEELVFRSEKPLGKLKPHTKLPIKFNYRGQVIDFTAELIAQKEDLVYCKMPAALYKNLDRNFLRVDAPSDIKILFTFRGDRYNLAFPKVSEYESITVNDLVNNLDPSNLSGLIKQIAGMLSNFCDGYKIANFKDKKPETLEEKIVSETGKTLFIPSTVGYLPKTDPYPKKRIITEDIFHRYLETNGIGTKYLEENTERILKNKFKDGIFSDAWVPILFHEYVIGYIRIWIDKQGRLPFDFSVLDNVYQYAKVLAFGLKENGYFDHGKVENQPFQGKVLDISASGLMFAYPLGSSMLATLLVDSELTVTIETPKRTINVLAKIVRKFKDKSAGYLGCRFINIAPEDTRFLYEHLYGRQIDDIDTEFLAGQV

SEQ ID NO: 70397 - DNA, 1056 bp, Unknown
  Obtained from environmental sample
  misc_feature (1)..(1056): n is a, c, g, or t
atgagtaaaaaaacggacaaccccctaatcgataattacacttatccggtaagagacattctatgggggcatgtttacatgacggaaaatcaggctaaattgacagaatccgctcctttcatgcgcctgaacagaattatgcagttaggtcccgtataccttgtctatcccggcgcgacgcatacaagggcaagtcattcaatcggcgtctaccatttgggaaaaagactcttaaaaaacctgtcgaaacgcggcgccgaagactggctgacaaacgaggggattaattcctttctcgccgcctgcctgctccatgacctaggtcatttcccctatacccactcgttaaaagaactgtccctgtcttcccatgaatcgcttacaggcgaaataatcatgaaggaacccatgaaaacccttgtgggcgcggcaggtgcggaccctgagcttaccgcggcgataatcgacaagggaaaaaatggaattcagagcgatgagcttcatttttaccgtaaactcctctccggagcgcttgatcccgacaaactcgactatctgaaccgcgatgcccgctattgcggagtcccctacggcgcgcaggatgtcgattttatcctttcaaggcttcagccggacaaaaaacgcggggtcgacatcgattcccgcctgattccaaacgtagaatccatacttttttcaaaatatctgatgtatcgtactgtttattggcatcgtcaggtacgcgccgttacctccatgattaaaaaagcgcttataaacgggcttgaaacagggcaaataacaggcgatgacctgtacaatcttgacgattacagtcttttttcacttcttgaacaaaaaatcaaaaaaatcaatggttccccgattaacggagccgcccttgtggaatatgtgcgcgaaggggatatatacgccgcgattctggaaatttcaccggataaagccggttttcaggcgctcagggatgtcaaaaacagagcaaaatccgagaaaaaattgacggaagacctgcgcggagcgggactgaagaaataa

SEQ ID NO: 70398 - protein, 351 aa, Unknown
  Obtained from environmental sample
  DOMAIN (63)...(189): HD domain
  misc_feature (1)..(351): Xaa is any amino acid
MSKKTDNPLIDNYTYPVRDILWGHVYMTENQAKLTESAPFMRLNRIMQLGPVYLVYPGATHTRASHSIGVYHLGKRLLKNLSKRGAEDWLTNEGINSFLAACLLHDLGHFPYTHSLKELSLSSHESLTGEIIMKEPMKTLVGAAGADPELTAAIIDKGKNGIQSDELHFYRKLLSGALDPDKLDYLNRDARYCGVPYGAQDVDFILSRLQPDKKRGVDIDSRLIPNVESILFSKYLMYRTVYWHRQVRAVTSMIKKALINGLETGQITGDDLYNLDDYSLFSLLEQKIKKINGSPINGAALVEYVREGDIYAAILEISPDKAGFQALRDVKNRAKSEKKLTEDLRGAGLKK

SEQ ID NO: 70399 - DNA, 963 bp, Unknown
  Obtained from environmental sample
  misc_feature (1)..(963): n is a, c, g, or t
atgggcggcgcggagtaccatgttcccgtgcttctcggggaggtattggagctttttgtttcggccggcggggtttacgtcgacgggacgctcggcggcggcgggcactttagggcgattgcggagggtttgtcgtcgagagggttttctgaaaacgcgataatgccggctattatgataggaatagatagggacggcgaggcgctggagagggcgcggcaaaattcgtttgacggcatcggcgtcaaggtcataatcgagcggtcgcgtttctcggagtttgacgccgttttggccaagcacggcatagaacaagttcagggcttattcgtagacctgggggtttcgtcccgccagatagacgaaccggaccgcggctttatgtacatgaaagacgcgccgctggacatgcggatggatcagagcgcaggaatgacggcggcggagtttttggagcgttgcgaagaggaggagttggcggatgtccttgacaaatacggcgaaatcagaaacgcgccgagactggcgcgggcgataaaagcctatatggccggcaataaagtggaaacatcagccgatctgaaaaattgtattgcaagcgagtatggtaagcatgttgatataaaattgttagccaagctcttccaagccttgcgaataagcgtaaacggagagcttacggaattaaggacgtttcttgacaaatcggtacgatatttatccaaaggcggaagggtggcggtaatctcttaccactctttggaggacaggacggtaaaagagttttttcgggaagcggaagcggcgtgcgtttgcgatccgaatcaaccggtttgtacctgcggtaaacaagtattattgagacgtgtaaacagaaaagcggtaacggcgtcggaagaggagataaaacgcaatccgagggctaggagcgcgagactgagggtcgcggaaaagattgtctga

SEQ ID NO: 70400 - protein, 320 aa, Unknown
  Obtained from environmental sample
  DOMAIN (5)...(319): MraW methylase family
  misc_feature (1)..(320): Xaa is any amino acid
MGGAEYHVPVLLGEVLELFVSAGGVYVDGTLGGGGHFRAIAEGLSSRGFSENAIMPAIMIGIDRDGEALERARQNSFDGIGVKVIIERSRFSEFDAVLAKHGIEQVQGLFVDLGVSSRQIDEPDRGFMYMKDAPLDMRMDQSAGMTAAEFLERCEEEELADVLDKYGEIRNAPRLARAIKAYMAGNKVETSADLKNCIASEYGKHVDIKLLAKLFQALRISVNGELTELRTFLDKSVRYLSKGGRVAVISYHSLEDRTVKEFFREAEAACVCDPNQPVCTCGKQVLLRRVNRKAVTASEEEIKRNPRARSARLRVAEKIV

SEQ ID NO: 70401 - DNA, 474 bp, Unknown
  Obtained from environmental sample
  misc_feature (1)..(474): n is a, c, g, or t
gtgtgtatggccagtttttacggcagcttcgactattccgttgacgccaagggcagggtgaacgttccggctaagttccggaaggctctctcgccggaggccgaggatacgttcatagtctcccacggaccggggaactgccttcgcgcctatcctaaggatgtgtggaacaacgagcgtatgccgaaaatcgcggcgcttccggcgacgccggacaacgacaagatgcggcgctacatatccagcacttcgacggactccgtcctcgacctgcaggggcggattatgctgtcggcggctcagatgaagtacgctaggattacgaaaaacgtgacgataataggcgatatgaaggggtatatagagctgtgggacagtgataagtacaaggagcatataggtacgatccctgatgttgactcgttgatttatgcggttgaggatcagttggccaagaatgggcaatcggcgtaa

SEQ ID NO: 70402 - protein, 157 aa, Unknown
  Obtained from environmental sample
  DOMAIN (80)...(153): MraZ protein
  misc_feature (1)..(157): Xaa is any amino acid
MCMASFYGSFDYSVDAKGRVNVPAKFRKALSPEAEDTFIVSHGPGNCLRAYPKDVWNNERMPKIAALPATPDNDKMRRYISSTSTDSVLDLQGRIMLSAAQMKYARITKNVTIIGDMKGYIELWDSDKYKEHIGTIPDVDSLIYAVEDQLAKNGQSA

SEQ ID NO: 70403 - DNA, 2688 bp, Unknown
  Obtained from environmental sample
  misc_feature (1)..(2688): n is a, c, g, or t
atggattcaagaatacattttttcagtcaaaaagacgttatctccaataaggttgcgccggaattattaggtatccgcggaagacaggcaaatgaatttgccgagcttggtttccccattctgccgggatttattttagatacggatattgcgtcggacattgatataaagagtattaaaaaagatatttcggatcttttggcaaaatgcgcgaaaatggttggcaaaggttacggcgatgttaataatcccatgttgttaaaactgattatttcttcaaacatggcgattacaacttatcccgtattgcacaacttcgggcttgtaaaacctgttcttaatggttttgcaaaatgggtcggcaaggattttgccgcaaatgaagttttatttatgatcaacggcatgatgaacatagaagagaagattaaagaccttgaaggcaaaaccaaagagaaagatgaaattgccgaaaaaaataaaattataaaaagattattggggattcatggaccttccaatgaattgcataaaaaagaagaccccatgccgaagaagaaaaccgctgaagaatatatggacgattacgccaaatatttccccaaaggtttctttgatgacgctgaatcacagttaatgataaccatcagtgaaatttccaaactgcttaaaatggacgaacagaacaacgaagatacagctattgttgttcaaccgatggtatacggaaattacggtaaagattcttgttcgggttatttcttcacgcgcaatgttgtaaccggcgaaaagaaacttcagggaagttactttaccgggaaatttaacgaaacaggcgaaacgggacacgagatcaataaaattgacgcgtctcatcttaaacagcttgaaaagatagcgggagtccttgaggataaattcaaggaaattcgccaggtgcgctttaccgtagaaaacgaaaaactctggcttatagagcagagactcgtagaccaaaaatccacacaagctgatcttaaacttttgcttgatcttcaaaagcgaaaaatagtcgatgcggcttatgtagtaaaagcgattgatcctttaaggcttaatgaaattctccatcctgtaattaatcctgccagcgttaaaggatttaaatcatggaagggcggtattgcgggcgctccgggcgcggcgataggacgcgtctatttcagcacggacgctctgttggaagcgaaaaaagcggcgacacagcagggaaataaagacagttttattctctgtcttgaatcttcttttgcggaagacgtaaaggcgattgaagtaagcgccggcgtattaaccgccgagggcggatattccgctcacgcgtccgtagtagcgcgccagtacgggaaagtgtcgcttgtatctcccgagcttaaaattaaaggaacaaaagctactctcggcgattttagtttctccgaaggaaactacataactatcgacgttcctttctacggcgaatcaaaagtgtatcttggaacagcggaacttatagagcctgatccaaaaggctctggacttctggactttatcgatctttccaagagcttcttaaaagaattccatatcaggtgtaatgcggacactccgcgggacgctaaacttgctttagacttcggcgcggatggcgtaggtttgtgccgcacggaacatatgttctttaaagcggatcgcatcaatgttttccgcgatatgttgatgtccgatgacaaaaaagaacgccagaaagttttaaataaactgcaaataatgcaaagggaagatttttacggcatcatgaaagtgatggcgggcaaggaagtaacaatccgtcttttggattcgccgcttcatgaatttatgcctcataatcctgatgaaattcagggttatattgatcatgttgcaaaaactacaggctcaaaaccgtcaaaggctgatattgccgcgcgcattgacgctctgcacgaatttaaccccatgcttggacatcgcggatgccgtatcgccgtctcttacccggagatttacgcgatgcaggtaaaggctatttttgaagccacatataaactgcgctccgaaaaaattgacgcgcgtcctgaaattatggttccgattataatgaacgccgcggaattaaaacttatcgcgtacgggaaaaagatcgaaggctccaactatttgggtattgttgatatcgaggaaaatctcagaaaacttttaaaagccagagaagtggaatataaaatcggcactatgattgaacttcccgcagcggctcttggcgccggagaaatcgccaggtacggacgtttcttcagttttggaacaaacgacctgactcagactactttaggaatttcaagagatgactttaccgcgtttatgcccgactatactttgtttgaccttatcaacggcaacccgttcagcacattggatccaagagtaaaagagcttatcgcccttgcgacggatcgcggacggctgacgcgccccgatcttgtctgcggcttgtgcggcgaacacggagccaatcccgcaaacgttcgtttctgcatggacgcgggacttaactatgtttcctgttctccatactcggttccaatcgcgctgttagcggtagcgcaggcggaaatcagtaagtccgaggggacagagcagagttaa

SEQ ID NO: 70404 - protein, 895 aa, Unknown
  Obtained from environmental sample
  DOMAIN (394)...(493): PEP-utilising enzyme, mobile domain
  misc_feature (1)..(895): Xaa is any amino acid
MDSRIHFFSQKDVISNKVAPELLGIRGRQANEFAELGFPILPGFILDTDIASDIDIKSIKKDISDLLAKCAKMVGKGYGDVNNPMLLKLIISSNMAITTYPVLHNFGLVKPVLNGFAKWVGKDFAANEVLFMINGMMNIEEKIKDLEGKTKEKDEIAEKNKIIKRLLGIHGPSNELHKKEDPMPKKKTAEEYMDDYAKYFPKGFFDDAESQLMITISEISKLLKMDEQNNEDTAIVVQPMVYGNYGKDSCSGYFFTRNVVTGEKKLQGSYFTGKFNETGETGHEINKIDASHLKQLEKIAGVLEDKFKEIRQVRFTVENEKLWLIEQRLVDQKSTQADLKLLLDLQKRKIVDAAYVVKAIDPLRLNEILHPVINPASVKGFKSWKGGIAGAPGAAIGRVYFSTDALLEAKKAATQQGNKDSFILCLESSFAEDVKAIEVSAGVLTAEGGYSAHASVVARQYGKVSLVSPELKIKGTKATLGDFSFSEGNYITIDVPFYGESKVYLGTAELIEPDPKGSGLLDFIDLSKSFLKEFHIRCNADTPRDAKLALDFGADGVGLCRTEHMFFKADRINVFRDMLMSDDKKERQKVLNKLQIMQREDFYGIMKVMAGKEVTIRLLDSPLHEFMPHNPDEIQGYIDHVAKTTGSKPSKADIAARIDALHEFNPMLGHRGCRIAVSYPEIYAMQVKAIFEATYKLRSEKIDARPEIMVPIIMNAAELKLIAYGKKIEGSNYLGIVDIEENLRKLLKAREVEYKIGTMIELPAAALGAGEIARYGRFFSFGTNDLTQTTLGISRDDFTAFMPDYTLFDLINGNPFSTLDPRVKELIALATDRGRLTRPDLVCGLCGEHGANPANVRFCMDAGLNYVSCSPYSVPIALLAVAQAEISKSEGTEQS

SEQ ID NO: 70405 - DNA, 813 bp, Unknown
  Obtained from environmental sample
  misc_feature (1)..(813): n is a, c, g, or t
atggaaagtgccgcgggcaaagataatcttgcggacattctgtacgaaatgaaagacgaagaagtggacgggaccaggtctgccctgatattaaacatacttcttgtagacaaaatggggtataaaaccgtttcgggaaaccttaaatcggtagtgggggatgtttcttctctggccaaagaatttggaaaatggaaagggattgatctggttgcggcataccatcatccggaactggggcttcttgtggctaacccgaagatcgctgaagaattggcggcctttggatctttacgaaagagggaacttctggtgatttacgccggtaaaggcaatgccgcggcagacgccgactgtcaaaaagcggcggaactggcgctgcgtttttttgaaggatctaaatccggcgttcctccttcctttttgcggggcagtttcgcggcaaaagcgcccaaggtaaaagcagcgccaaaaactcctaaggctccaaaaacggcaaaagtacccaaagcgcccaaggccgcggcggcaggccgccgtgcgcccgttaggcaggctccggaagctcaacgggtggcgcctcctgttgttaccgctgcggcgcctcctgcggcagctcctacagggcctgtaaagatgaccccgcggtatgctgttgtagtgcagaatgagctttttcacaacggtaacgttgaagcctggaaacgcattatcgcaagttacaatgccacgtaccccagccttcagctttatatttactatgacggagaaagatactggacattaactcgttgttttaatggggcaaggtaa

SEQ ID NO: 70406 - protein, 270 aa, Unknown
  Obtained from environmental sample
  misc_feature (1)..(270): Xaa is any amino acid
MESAAGKDNLADILYEMKDEEVDGTRSALILNILLVDKMGYKTVSGNLKSVVGDVSSLAKEFGKWKGIDLVAAYHHPELGLLVANPKIAEELAAFGSLRKRELLVIYAGKGNAAADADCQKAAELALRFFEGSKSGVPPSFLRGSFAAKAPKVKAAPKTPKAPKTAKVPKAPKAAAAGRRAPVRQAPEAQRVAPPVVTAAAPPAAAPTGPVKMTPRYAVVVQNELFHNGNVEAWKRIIASYNATYPSLQLYIYYDGERYWTLTRCFNGAR

SEQ ID NO: 70407 - DNA, 2028 bp, Unknown
  Obtained from environmental sample
  misc_feature (1)..(2028): n is a, c, g, or t
atgagaggcgcggcacggagatacgcggtttcgctctttttacttgtatgcggactctcgccgccgagtatcgttgcgcagacgtatttggattcgctgatacggcaccaaaggtcgttgcaggagcaggagatgcgcaggtatggggagaacggtcaggattcgttgcaggaggagtcgcggtgggggaacgggcgtacgctttcccgcagcgagatacgggagtttgagcgccagcagaaggaggagcgcaagcggcgcgaagagcgttcatggcgcgtgcgttccgtaaatttctcgggcaacaagtcttacggtaagaaagatctgcaaagcctgatggagcttaaaaagaagtcgcgtttcacaaactatcttttgaaatccgatttggacgcgttgaccgcgttctacaagaacggcgggtttgaggacgttaaggttaagtccgagagcgtggagcgggacagcgtaaagcgcaaggtggcgattcacatctccgtggaggaggggccgcgtattcacgtcggcgaaatcatcgttgacgcgcggcggttcacgccgagtccatccgtgatgcgccggcttgcgaccaagcagggcgcgccgctcgtccactccgacgtgcgccaagattgccgcaagctgaaagaggtcgccggcgagcgcggttttctcgaggctgtcgtagagccggaggtcatgatagacaccgtcgaacatcaggcgagcgtggttttcaaggtgagcgagggtccgatagtcacggtcggcgagataaaaatccagtcgagggggttcaaaaagtttaccgtccggcgggaactgtccatacacagcggcgacacgctgaacctgcgtaacgtgagagagtccgagcgcaatctctacaccacaggcctattcaactacgtgcatataaaaccggagttcgactctaccgtcgccgcgttggaacttcccgacagcgtctacgacgtgcttgtccgcgtgacgcgtggcgagtacgtccgaatgcaggccggcctagggtacagcacagacgagggcgcgagggtctccgccaccgcgacgtggaagaacatgttcggactcgggcaaagcctcgctctgagcaccaagctctcgctggtctcccaaggcgcggaagcggttcacgccatcccgtggttcttatacatgccggtgcagctcaacacaaaactgtactacacaagattcgataaaccgcagctctacaagggcaccttcgacggactgcgcctgtcgcttggccgtcagtccaactacgacatactctaccaagtatggtcgcagtgggaggatgtgcactgggtcaaggccccgtcgcaagacgccgacttgaccgacgttcccaactacccgacgcaaagcatcggcggcgacatcgcctacgacgagagaaacgacctgttcagcccgacaaaaggcggctttgtccggctcggcgtagagttggccggcgtcttcggcgggaaatccaatcagttcgtgaagacgaccctcgactcccgcatatacttcactcgccatacgcgttaccacctgtcaatggccgcccgaaccggttacgcggtaccatacggcaaaagcggcgacgttccgccgcaaagcaagttctacggcggcggcagcaccacggtcaggggctttccggtagacaagctcgcggttctgccgaacaacgatccgctgctgggaaatttttacatattcctaaacctcgccgacgtccgcgcccccatgttttggtggatacgcggagactcgttcctaacatggttcaacgctgcggcgttcatagacgccggaaacgtgtggccgaacttttccgatatagcgtctgccgaaagtctatttgacgacctcagatggtcggcgggtcccgggttgcgtatagacacgcctataaagcttgtggccagattagacttcggattcaagttggataggcgtcccggagagagcgttatggagatacactttgatttggggcagccgttttga

SEQ ID NO: 70408 - protein, 675 aa, Unknown
  Obtained from environmental sample
  SIGNAL (1)...(26)
  DOMAIN (174)...(252): Surface antigen variable number repeat
  misc_feature (1)..(675): Xaa is any amino acid
MRGAARRYAVSLFLLVCGLSPPSIVAQTYLDSLIRHQRSLQEQEMRRYGENGQDSLQEESRWGNGRTLSRSEIREFERQQKEERKRREERSWRVRSVNFSGNKSYGKKDLQSLMELKKKSRFTNYLLKSDLDALTAFYKNGGFEDVKVKSESVERDSVKRKVAIHISVEEGPRIHVGEIIVDARRFTPSPSVMRRLATKQGAPLVHSDVRQDCRKLKEVAGERGFLEAVVEPEVMIDTVEHQASVVFKVSEGPIVTVGEIKIQSRGFKKFTVRRELSIHSGDTLNLRNVRESERNLYTTGLFNYVHIKPEFDSTVAALELPDSVYDVLVRVTRGEYVRMQAGLGYSTDEGARVSATATWKNMFGLGQSLALSTKLSLVSQGAEAVHAIPWFLYMPVQLNTKLYYTRFDKPQLYKGTFDGLRLSLGRQSNYDILYQVWSQWEDVHWVKAPSQDADLTDVPNYPTQSIGGDIAYDERNDLFSPTKGGFVRLGVELAGVFGGKSNQFVKTTLDSRIYFTRHTRYHLSMAARTGYAVPYGKSGDVPPQSKFYGGGSTTVRGFPVDKLAVLPNNDPLLGNFYIFLNLADVRAPMFWWIRGDSFLTWFNAAAFIDAGNVWPNFSDIASAESLFDDLRWSAGPGLRIDTPIKLVARLDFGFKLDRRPGESVMEIHFDLGQPF

SEQ ID NO: 70409 - DNA, 1596 bp, Unknown
  Obtained from environmental sample
  misc_feature (1)..(1596): n is a, c, g, or t
atggcaacaaacaccgaaagaatcctgcccgtaggcatacaagacttccaaaagattagggagcggggtttcgtttacgtagacaagaccacccgcatccacgaactccttaccggctccggcgaggcgttcttcctctcacgtccgcggcgcttcgggaagtcgttgctatgttcgacacttagggcgatcttcgaggggcggcgggagcttttcggagagatcgcggggcgaccggcgttggccattgataccctcgattggggatggaaggtgcatccggtgattcggatcgacctgagcgccggaaattacagcgatgggaagcctgtcctaaatacggtactgcaaaataaacttgaaaactgcgcccgacgctacaaggtggccctgcgcgggcaaaccgcgccggtgcagttcgagaacctcattatggatttaaacgagcgcttcggcgaagaaaccgtagtcatcatcgacgagtacgacagtccgctgaccagtacccttctcgaaccgaccgtacacgtccagctgcggaacgaactgaaagcgttttacagcgtcatgaaatcctgtgatgccaacctgcgcttcatcttactgaccggcgtgagcaagttctcccacgtgagcatattctccggtctgaatcagataaccgacctgacctttgacccttgctacgccgacctctgcggactgacccaagaggaactagagacgaatttcgggccggagatcgacggggttttggaaagtgccgggtgtagccgcgaggagtacatagacaaaatgcgtcgcttttacaacggttaccgtttctccgaggagatacttaaagtctacaatccgttcggtctactcaaccacttcaaggatcgcggaaaattccggccgtattggtatcgaagcggcacacccaccctcttaacagacctgattaacgaccggaatttcgacttcgcgaacctgaacaatacgcaggtcgggtatgaggatttcgacaattttgacatagaaaacttagaactggaaccgcttttgtatcaaaccggctacctcactataacagattacgacgaaaaacaagagtgcttcacgcttgattatccgaacatagaggtacgtagcgcctttgcaaaatcgcttgctacgtactgtctgaaaacgcccttgaattggtcaacctcgtcatgcaaaaaactaatggcggcgctaaacggcggcgacgtagacgccgcgatggaggcggtaaagctatttctgactaaaatcccatacgacttattccaaaaacgggagaacttcttccaatcggtggtatatgtgatgttcgcaatgctaggccttgactgccgcacggaggaaagaatcgccacagggcggatcgatatggtcgtcgagacgcggagcttcgtttactgtttcgagttcaaattagacggtactgcggaggcggcgctcgcacagatcaacagcaaggagtacgccgtcccttggacgggtagcggaaagaaggtattcaaggtcggggtgaactttgatttcgagaagaagaacattggggagtgggtgtctgcggcaaccgaataa

SEQ ID NO: 70410 - protein, 531 aa, Unknown
  Obtained from environmental sample
  DOMAIN (1)...(525): Protein of unknown function (DUF1703)
  misc_feature (1)..(531): Xaa is any amino acid
MATNTERILPVGIQDFQKIRERGFVYVDKTTRIHELLTGSGEAFFLSRPRRFGKSLLCSTLRAIFEGRRELFGEIAGRPALAIDTLDWGWKVHPVIRIDLSAGNYSDGKPVLNTVLQNKLENCARRYKVALRGQTAPVQFENLIMDLNERFGEETVVIIDEYDSPLTSTLLEPTVHVQLRNELKAFYSVMKSCDANLRFILLTGVSKFSHVSIFSGLNQITDLTFDPCYADLCGLTQEELETNFGPEIDGVLESAGCSREEYIDKMRRFYNGYRFSEEILKVYNPFGLLNHFKDRGKFRPYWYRSGTPTLLTDLINDRNFDFANLNNTQVGYEDFDNFDIENLELEPLLYQTGYLTITDYDEKQECFTLDYPNIEVRSAFAKSLATYCLKTPLNWSTSSCKKLMAALNGGDVDAAMEAVKLFLTKIPYDLFQKRENFFQSVVYVMFAMLGLDCRTEERIATGRIDMVVETRSFVYCFEFKLDGTAEAALAQINSKEYAVPWTGSGKKVFKVGVNFDFEKKNIGEWVSAATE

SEQ ID NO: 70411 - DNA, 3570 bp, Unknown
  Obtained from environmental sample
  misc_feature (1)..(3570): n is a, c, g, or t
ttgccgcacgctctacaaaatatttcaaggagaaaagcaatggaaccaaacaaagaaaaaataaatttaaatgatgaacagcaggccgcggcgtattgcgatgaaaacgcggtggttgctgcaggcgcgggttccggaaaaaccatggtgctcgccagccgtttcgcctggctggtaacggagcgaaaatgccgtgtaagggagattcttacccttacctttaccaagaaggccgctgcgcagatgtaccgtcgaatccacctgctgttagctgaaatcgcattagattccggcataaagggaaaaccggcgcgggaggctcttgaggaatttgctcaggcaagaatccaaaccctggattcctacagcgccgccattgtcaaacaggcggcaaaccgttatggaatcaacccggagttttcaattgacgaggaacgttgtctccgagttgcccatgatgaggcaatgtctttttttattgccaaacgcagccacccggcaatacaaaggctttaccccaataaaagcccggtatccatcgcaaatgatatttttgcttccggtttgtttaattacacccatatcgacatgcagcccgatcctgcgggggattttaccaaacaatgcgataccatttgcgttgaatgggaaaaacagagcgggcggataatcagcctgctgcggaaaatcaacgaagcaaatacggaagatgagaagctccttcccgatcttgcgcctgttataagccaattcaacatgggaaagattgtttttccggatgtacgggaactcggcgagtattttcaacaacttgcggcaatcccccacgattcaattatcaaatggacggactcacatccgctgcaaacggcgttaacaaatgtcatggattttcttttattgttggtttctcttaatttacaaaaaggcaaaaggcaaaataaccccataaaagaattgataaaagagttacgcgaattatttgcccaattttcgtcaataataattttttgcatacaggcggggctgacctgttcggtgcaaaaactcttgtccaatctccagaatcgctaccttgacaggaaaagggctgaaagggttttaacctataccgatgtcgcccgcctcgcaaaaaccattcttattgaacagcgggacattcgccaaagcgaaaaagaatcgttcaaggcgataatgatagatgaatttcaggataacaacgaactgcagaaagacctgctttttttaatagcggaaaaaaaagatattacaaataagacagtaccctccgcaaaagacctttctccgggaaaactcttttttgtgggggatgaaaaacaatccgtgtaccttttccgcggagcggatgtttccgtgttccgaaaattaaaaagagaactcggcggtactaatcttccccttaaaacaaactaccgttccgcgcccgttctgataggcgcgtttaattccatttttggcggttataaatttgatcctgaaggaacagcgacggaggaaaaaaataacggcgaaagaaatcccgccgtatttgttccggctgcggaaaatttacgtttgccggagcggtcgcgcttgcccggacaggagtggctgcctccgtttgaggcttcctttacacctcttcatgccagcaaaaaaaacgggggaaaacttaccctttgtatactggacaagcaagactcgccggaaaacaactccgccgatgattcaaaggggggagaagcggaacttttgacgcccgtggaaaatgaggcgcgttatgccgcctggcgaatcggagaactgcttaaagaaaaagacgagaccggcaaatttaaataccagccaggtgatattgccattctttttcgtacccgcagcccgcagtacctgtttgagaaacacctgatgctgatgaatattccctacgcatctgaggacctaaacggttttttttacggaggccccgtggacgatctgatgtccgtcctccggcttgccgcctatccgaaagacagcgccgcctatgcgcaaatgctgcgctcgccttttgccggcctttctctgcaggggcttgcgctttgcgtcaacgaagttcctttctgtaatgagccgctttccctgctttacggagatgacagggttaagtatctccatggaaagcgtatttatcacaagatccttgacatagcgcaaaaagaaagcatcagctccctggtgagcgaattgtggtatggggaaggataccgctacgaaaccgaatggaatcccagaacggccgcttaccgggaattgtacgattaccttttccatcttgcggctctggccgatgagaaaaatcaggggcttgcggaatttaccgattacatccaaagcctgtacaatgccgatgaacggttaagcgacattgaaatcccgctggaacgcccaagcgctgtgcgccttatcaccatacataaaagcaagggacttgaatttccggtggtttttatctgttgctgcgataaaaaaggccaaaatgactctagcggcgatttgtactataccggagattcgggcctgacgttcacgccccctctgccgcgggaatacagcgataacggatttgttaaacgcagttacttttgggaacgctctctggcgatcagaaaagaaaaaagaacagcggaactgcgccgacttctatatgtcggtatgacacgggcggaaaacgaattgtttctttcgggcagccttggcatcagcaagaccctcggcctggaaaacagggaccaaaacattgatgttgaaagtttttcacggtatttaaagcaatatatagatgttaaaaatgaaaaagccgagagaagtaacggcattaaaggcgatacaatactggatggtaataccttttttggattgtgcctgccggcattcggcgcgcatttagcggaaggtacaggggaatctttttttcatattgaggaaattcccgcttacagcgaacagcagatacgcgacgctgaaaaaagcggatcgcggttttcaaatgatcaaaccgggctaaacgctttttttgagttagtagaatctttttataaaaacgcgggcggcatcgaaacacctgatgttccgaaaattcattataccccgacatcgctgcattacgttccggtttataatggcgaagaccagtgggctgacagaaaaaacgcatggtctggcgaagcatctgcggatatttttagcagtgttgattccatgataaagtgttacgagaagcaacatagaaaagacaatgaaaaattcaattatggcagctttgggactattgtccatatttgtatagaagcattgctttgcattcaggaaattaagatttccgcgcatctgacggaattaatcagttccagggatgcggatgccgtttttttggcggggaaagaacttgcgtggagttttgtgcggtgtcatatgggaaacattgccagagaatcggaaaaactgaaaagcgaattttcttttagcagcggtgataccgggagaaaaggaattctttataaagcgggaccagtcgatctttgtgtttga

SEQ ID NO: 70412 - protein, 1189 aa, Unknown
  Obtained from environmental sample
  DOMAIN (23)...(749): UvrD/REP helicase
  misc_feature (1)..(1189): Xaa is any amino acid
MPHALQNISRRKAMEPNKEKINLNDEQQAAAYCDENAVVAAGAGSGKTMVLASRFAWLVTERKCRVREILTLTFTKKAAAQMYRRIHLLLAEIALDSGIKGKPAREALEEFAQARIQTLDSYSAAIVKQAANRYGINPEFSIDEERCLRVAHDEAMSFFIAKRSHPAIQRLYPNKSPVSIANDIFASGLFNYTHIDMQPDPAGDFTKQCDTICVEWEKQSGRIISLLRKINEANTEDEKLLPDLAPVISQFNMGKIVFPDVRELGEYFQQLAAIPHDSIIKWTDSHPLQTALTNVMDFLLLLVSLNLQKGKRQNNPIKELIKELRELFAQFSSIIIFCIQAGLTCSVQKLLSNLQNRYLDRKRAERVLTYTDVARLAKTILIEQRDIRQSEKESFKAIMIDEFQDNNELQKDLLFLIAEKKDITNKTVPSAKDLSPGKLFFVGDEKQSVYLFRGADVSVFRKLKRELGGTNLPLKTNYRSAPVLIGAFNSIFGGYKFDPEGTATEEKNNGERNPAVFVPAAENLRLPERSRLPGQEWLPPFEASFTPLHASKKNGGKLTLCILDKQDSPENNSADDSKGGEAELLTPVENEARYAAWRIGELLKEKDETGKFKYQPGDIAILFRTRSPQYLFEKHLMLMNIPYASEDLNGFFYGGPVDDLMSVLRLAAYPKDSAAYAQMLRSPFAGLSLQGLALCVNEVPFCNEPLSLLYGDDRVKYLHGKRIYHKILDIAQKESISSLVSELWYGEGYRYETEWNPRTAAYRELYDYLFHLAALADEKNQGLAEFTDYIQSLYNADERLSDIEIPLERPSAVRLITIHKSKGLEFPVVFICCCDKKGQNDSSGDLYYTGDSGLTFTPPLPREYSDNGFVKRSYFWERSLAIRKEKRTAELRRLLYVGMTRAENELFLSGSLGISKTLGLENRDQNIDVESFSRYLKQYIDVKNEKAERSNGIKGDTILDGNTFFGLCLPAFGAHLAEGTGESFFHIEEIPAYSEQQIRDAEKSGSRFSNDQTGLNAFFELVESFYKNAGGIETPDVPKIHYTPTSLHYVPVYNGEDQWADRKNAWSGEASADIFSSVDSMIKCYEKQHRKDNEKFNYGSFGTIVHICIEALLCIQEIKISAHLTELISSRDADAVFLAGKELAWSFVRCHMGNIARESEKLKSEFSFSSGDTGRKGILYKAGPVDLCV

SEQ ID NO: 70413 - DNA, 783 bp, Unknown
  Obtained from environmental sample
  misc_feature (1)..(783): n is a, c, g, or t
ttgcctgcaggcgcgccttcaccacagtatatgctgccaaaatcatactgggatatattgacggaaaaaaccgatattgtttttaattctttcccgtatttatccggagaagaagacgataaaccggcgatgagcatgctgaccgctcgcctccttcgggcggaaaaagaacttttctttgcccggctggaaaattttcttgttaaatttatttcattctttgccggtttttcggttgccgccagcgaaggcggatatacgcttaacaaagaatcctattatcttaacgggtatattgactgtattcttgagaaaggttcgggggatcagggttctttggtcattgtggattttaaaaccaaatatatgcccgatctttcggattgcatcggccttgagggacttgcgaatttccagctccccatgtacatccgccttgcggaaaacgaattcggaaaacccgccggcgccgcgctgttcttcagcatagtggatgccaggccgaaagtattgttcggtgtaattgaggacgcaataagcggcgaaatcattccgggaaaagaaggggatcgcataacgcatggcagcgatgaatatgaacgcattatgggtgaatttgacaggaaggcggagcaattcgcagcggaaattataaacggcacttttgctttctctccatctcattgggagctgtgccatgaatgcggctataacaaggtttgccgcacgctctacaaaatatttcaaggagaaaagcaatggaaccaaacaaagaaaaaataa

SEQ ID NO: 70414 - protein, 260 aa, Unknown
  Obtained from environmental sample
  misc_feature (1)..(260): Xaa is any amino acid
MPAGAPSPQYMLPKSYWDILTEKTDIVFNSFPYLSGEEDDKPAMSMLTARLLRAEKELFFARLENFLVKFISFFAGFSVAASEGGYTLNKESYYLNGYIDCILEKGSGDQGSLVIVDFKTKYMPDLSDCIGLEGLANFQLPMYIRLAENEFGKPAGAALFFSIVDARPKVLFGVIEDAISGEIIPGKEGDRITHGSDEYERIMGEFDRKAEQFAAEIINGTFAFSPSHWELCHECGYNKVCRTLYKIFQGEKQWNQTKKK

SEQ ID NO: 70415 - DNA, 1539 bp, Unknown
  Obtained from environmental sample
  misc_feature (1)..(1539): n is a, c, g, or t
ttgcacgaaaaccaaaaagtgccctgggacgccatttccgtcagcgtccccgacaccgggaattacgacccctatgtcttccgcgaatttgacaaccggaacatcccatatatcaggcaaagcggcaagccccttgcgtcttaccccggagggcaatttttcaccgcgattgccggctgcagttccggaaatttttcctttgcctcaataacggcgctgcttttaaaccggcaccttccgtggaaagatgacgaaaaaattcaggccttgatacaatttggcattgacaataactgtttatgttcatggacggaggaagaagcgccttctaaagaaggcgtgccttctgacgaaggcggcaaagaaaaaaagataaatgtctgggaagacgcttttgaaaaccatacaaatgattccgcctggctttatacatttttcaaaaaattgacgcttatgataaacgcaatgcgttacgcggattcgttttccgcggtcaggaaacattatttcgcgtttcgcggatctttttttgacatggaaaaatgcctggacgaaaccgaccttgtcctttcccgctgtattgccgaactgggctatctggttgagatagaaaattcataccctgacatgcgcgttcccgatccttatacattttttacagaatatcttgaagagacaagttaccttgcccagcagtcaagttccggcgtcgcgatccttccgtacaggacggccgccccggcccctttcgactgccatatagtcctcggcgcaaaccaggactcgctctcggccgtgttttcttctttgtcctttctgcccgggaacaaacgggaaaaactcggtataagcgacaatgacgcgtcacaggcttttatcacgctgcaccggtttaactcgcgtctgcccaccgcttttttctgctccgagcagaccttttccaattatgccatcccgcacagcgcgttgaaggcggaaataaaacccagacagcgttatcgcgatgatcccgcgcttggcgtaaaattcgcaccggacctttaccataaggaaagcagcctctacacatccctgtatttttccgatcggggtcaggcggaaccggggcaggcggggctgcctgcaaaactacatttaaaccagaaacagggttttaacgagtggctgacaagaagaaagagcgctgatactggcggtgacagcgaaaccagccgtccgtttgttgaacatattcgcaatcgtttcttatataaaggggatgacaaaaaattggaaggcaaatacggcgtctcatcctcatcgcttgaattgtatttcaaatgcccgcttcaatttattttttcgagggtacttaaacttaaaaatgttgagatagaaacaagccttatggccaatgaaacagccggaatagtttaccataaaataataaatttatttttacgggaattaaaggaaaaaggagaggctatcgcgccgccttgcctgcaggcgcgccttcaccacagtatatgctgccaaaatcatactgggatatattga

SEQ ID NO: 70416 - protein, 512 aa, Unknown
  Obtained from environmental sample
  misc_feature (1)..(512): Xaa is any amino acid
MHENQKVPWDAISVSVPDTGNYDPYVFREFDNRNIPYIRQSGKPLASYPGGQFFTAIAGCSSGNFSFASITALLLNRHLPWKDDEKIQALIQFGIDNNCLCSWTEEEAPSKEGVPSDEGGKEKKINVWEDAFENHTNDSAWLYTFFKKLTLMINAMRYADSFSAVRKHYFAFRGSFFDMEKCLDETDLVLSRCIAELGYLVEIENSYPDMRVPDPYTFFTEYLEETSYLAQQSSSGVAILPYRTAAPAPFDCHIVLGANQDSLSAVFSSLSFLPGNKREKLGISDNDASQAFITLHRFNSRLPTAFFCSEQTFSNYAIPHSALKAEIKPRQRYRDDPALGVKFAPDLYHKESSLYTSLYFSDRGQAEPGQAGLPAKLHLNQKQGFNEWLTRRKSADTGGDSETSRPFVEHIRNRFLYKGDDKKLEGKYGVSSSSLELYFKCPLQFIFSRVLKLKNVEIETSLMANETAGIVYHKIINLFLRELKEKGEAIAPPCLQARLHHSICCQNHTGIY

SEQ ID NO: 70417 - DNA, 540 bp, Unknown
  Obtained from environmental sample
  misc_feature (1)..(540): n is a, c, g, or t
atgcgtaggtcaggggttcgactccccttatctccattgatgtccttagaaacacacatgattctgcgttgcccagaagcctctgtatttatatatgcaatgccagatggcgaaaatcctaaaacatgggtgaataaaagcctctcgcatatcttggatgtgtcaaaagtacatatagaaacggacagcttgggcaagccccatttacaaaaaggaatgggttttgcaaactggagcgatagcagagggcaatgcgttcttgcatattcaaaagaatgtgaagttgggatagatttggagttttaccgcgatagaaattttaaggctatctcaaaaagattttttgcccaaagcgaagcaactaacaaagcagatgttttttaccatcactgggtaaaaaaagaggcttactacaaatgcttaggcgggcattttttttccgtcttaaaaaatgattcgtacccaaatgcaaagatatggaacttgcaagggccttacagggaaaaacacgagctagctctatgcctcaaaatcaaatag

SEQ ID NO: 70418 - protein, 179 aa, Unknown
  Obtained from environmental sample
  DOMAIN (95)...(150): 4'-phosphopantetheinyl transferase superfamily
  misc_feature (1)..(179): Xaa is any amino acid
MRRSGVRLPLSPLMSLETHMILRCPEASVFIYAMPDGENPKTWVNKSLSHILDVSKVHIETDSLGKPHLQKGMGFANWSDSRGQCVLAYSKECEVGIDLEFYRDRNFKAISKRFFAQSEATNKADVFYHHWVKKEAYYKCLGGHFFSVLKNDSYPNAKIWNLQGPYREKHELALCLKIK

SEQ ID NO: 70419 - DNA, 459 bp, Unknown
  Obtained from environmental sample
  misc_feature (1)..(459): n is a, c, g, or t
atgtctaaagttgtaatatcagatacaagttgttttataattttatccaaaatcaacgaaatggaattattgcataaagtttatgaaaatattttaacaacgccagagatagttgaggaatatggcgaaacattgccagaatggatagaaattgttcccgtgcaggataagtataagcagcaattatttgagatgcaactaggaaaaggtgaatcaagcgcaatggcattatcacttgaaatccctaatagcgttcttattattgatgactacaaagcgagaaaaaccgcagaaatattaaacttaaaatttattggtacaataggattaatcatcaaagcaaaattggatggcgtgattccttcgataaaacctttgttgcaaaaaattaaattaacaaatttcagattattaaccgacttggaacaatatgcacttaaagaagctggagaattgtaa

SEQ ID NO: 70420 - protein, 152 aa, Unknown
  Obtained from environmental sample
  misc_feature (1)..(152): Xaa is any amino acid
MSKVVISDTSCFIILSKINEMELLHKVYENILTTPEIVEEYGETLPEWIEIVPVQDKYKQQLFEMQLGKGESSAMALSLEIPNSVLIIDDYKARKTAEILNLKFIGTIGLIIKAKLDGVIPSIKPLLQKIKLTNFRLLTDLEQYALKEAGEL

SEQ ID NO: 70421 - DNA, 855 bp, Unknown
  Obtained from environmental sample
  misc_feature (1)..(855): n is a, c, g, or t
atgtttgaaggaacagcatggaaagaggttatcgccaatttgaaaaacggtaaacctgttgctgggcgcgagcctacccttcacttcctcgggcttttctcggacggcaatgtccacagccacatggatcacttaaaagcgatgattgctcacgccaagaaagaaggcgtaaaacgcgtgcgcgttcacgtcctttttgacgggcgcgacgtaggcgagacaagcgcccttgaatatgtcgatccttttgaggcgtttttaaaagatttaaacaaagacggctttgacgcgaaaatcggctccggcggcgggcgcatgtggattacgatggaccgctacggcgcggactgggaaatggtgcaccggggttggcagacccatgtgttcgggaacgcccgccagtttgccacgacgcgggaagctgtcgaaacctaccgcaaggaaattcccggcgttatagatcaggacttaaaagaatttgttatagccgaaaacggcaaacccataggcactatcgaggatggggactcccttatctactttaacttccggggagaccgcgcgctggaaataacagccgcttttgaagatgacaactttacccatttcgaccgcttacgccgcccgaagatttgctattcgggaatgatggaatacgacggcgacctgcatgtcccaaaacggtacctcgtcagccctccctcaatcgaccgcacaatgngcgaatacctcgcggcgacaggcgttaggacgctggcgatttccgagacgcagaagtacgggcacgttacatactttttcaacggaaccgcacaggcaagttcgacgacaaacttgaagactatgtggaaataa

SEQ ID NO: 70422 - protein, 284 aa, Unknown
  Obtained from environmental sample
  DOMAIN (1)...(282): BPG-independent PGAM N-terminus (iPGM_N)
  misc_feature (1)..(284): Xaa is any amino acid
MFEGTAWKEVIANLKNGKPVAGREPTLHFLGLFSDGNVHSHMDHLKAMIAHAKKEGVKRVRVHVLFDGRDVGETSALEYVDPFEAFLKDLNKDGFDAKIGSGGGRMWITMDRYGADWEMVHRGWQTHVFGNARQFATTREAVETYRKEIPGVIDQDLKEFVIAENGKPIGTIEDGDSLIYFNFRGDRALEITAAFEDDNFTHFDRLRRPKICYSGMMEYDGDLHVPKRYLVSPPSIDRTMXEYLAATGVRTLAISETQKYGHVTYFFNGTAQASSTTNLKTMWK

SEQ ID NO: 70423 - DNA, 480 bp, Unknown
  Obtained from environmental sample
  misc_feature (1)..(480): n is a, c, g, or t
atgaagtgcgcggaaattaccgatcaggtaatggccgcagtaggttcgggaaaatatgattttatcaggctgaactatcccaacggcgacatggtaggacacacaggcgtttatcaggcggttgtatgttcaatggaagcgatggacattcagcttggcaggctcttaaaagccgccgacgaagccggcgcggtaatggtaatcacagccgaccacggcaacagcgacgacatgttcgagcatgacaagaaaaccggcgctgtttcgcttaaagcggacggcacgcctaagtccaaaacaagccacagcttgaatcctgttccgtgcattgttcacgatcccgaatacaaaggcgaatatcccaacggacaaaacgatttgaacgagggtttggggataagctccatagcggcaacctgcatacagttgttaggctacattccgccggaggattacgacaagtctgtgctgaagatgtaa

SEQ ID NO: 70424 - protein, 159 aa, Unknown
  Obtained from environmental sample
  DOMAIN (1)...(128): Metalloenzyme superfamily
  misc_feature (1)..(159): Xaa is any amino acid
MKCAEITDQVMAAVGSGKYDFIRLNYPNGDMVGHTGVYQAVVCSMEAMDIQLGRLLKAADEAGAVMVITADHGNSDDMFEHDKKTGAVSLKADGTPKSKTSHSLNPVPCIVHDPEYKGEYPNGQNDLNEGLGISSIAATCIQLLGYIPPEDYDKSVLKM

SEQ ID NO: 70425 - DNA, 813 bp, Unknown
  Obtained from environmental sample
  misc_feature (1)..(813): n is a, c, g, or t
ttgcacatagcaaacgcctatgcccgcgaagcgggggtgcgcaactttgaaaaaaatctggacaagatccaccgtaaactcgcaaagcaaattgtagaggcgcaggaaacggcgcctcccgctcccgttgaggactcttcctcggataaaaaacctgtaaagccggcgaaatcggcaaagccggaaattttccatgtcgataaaaaatttgtggaaaagcagttgggaaagcctattttccccgaaggcgacataaagaaagccgacaagccgggaatgtctgtcgggcttgcgtggacaagcatgggcggcgacacccttgtgatagaagcgacgtctcttcccggaaaagaaggcttcacgctgacgggcaaaatgggcgacacaatgaaggagagcgctacaatcgccatgactgtagcccgcaagctggcggtggaacgttacggcatagacagcgagtggtttgacaagaaccatatccatttgcacataccggaaggggcgacgcccaaggacggcccatccgccggaataactatggcgacggctttgatttcgctgttacgcgaaaaggtcatcaccgacaaactggtaatgacgggggagctttcgcttacagggcaggtgcttcctatcggaggacttaaggaaaagacagtcgccgcccgcagaaataaggcgaagcacattatttttccgaaacaaaatgagcgcgatcttgatgaaattccggattatgtaaagaagggaattgagttccatcctgttacttcttatcaggaagttttatctctggctctgcctgattaa

SEQ ID NO: 70426 - protein, 270 aa, Unknown
  Obtained from environmental sample
  DOMAIN (65)...(270): Lon protease (S16) C-terminal proteolytic domain
  misc_feature (1)..(270): Xaa is any amino acid
MHIANAYAREAGVRNFEKNLDKIHRKLAKQIVEAQETAPPAPVEDSSSDKKPVKPAKSAKPEIFHVDKKFVEKQLGKPIFPEGDIKKADKPGMSVGLAWTSMGGDTLVIEATSLPGKEGFTLTGKMGDTMKESATIAMTVARKLAVERYGIDSEWFDKNHIHLHIPEGATPKDGPSAGITMATALISLLREKVITDKLVMTGELSLTGQVLPIGGLKEKTVAARRNKAKHIIFPKQNERDLDEIPDYVKKGIEFHPVTSYQEVLSLALPD

SEQ ID NO: 70427 - DNA, 1569 bp, Unknown
  Obtained from environmental sample
  misc_feature (1)..(1569): n is a, c, g, or t
atgtcagaccaaagcgtcatacctatagagcaacttttaccccacaaactgccgcttgtggcgctcatgggccgtcccatctttcccggtatttttacgcccatcatgattggcaaccccaccgacgtaaaagtcgtagaggacgccgccgcaggagacgcgatggtgggccttgttttaatgcaaaatgaaaccgagaccccggcaataaccgatttatacaccgtgggaacggcggcaaagatagtaaaaaaaattaacctgcccgacggcggtcttaacatttttatttccacattaaaacgtttccgcgtaaaaaagacgcttcaccccagtaatcctattgtcgccgtggtagagtaccttgaagacgaggaagacaacacaagcgaggtaaaagcccttacaagagcgttaatttccgaaatgaaacagataagcgagaacaacccgcttttttcggaagagatgcgccttaatatgatcaatatagaccaccccggaaaaatcgcggattttatcgcgagtatccttaacatagaaaaggcggaacagcagaagattcttgaaattatgaacgtgcgaaaacgcatggaacaggttcttgtttttattaagaaagagcaggaacttctgcgtattcaaaaaaagattcaaagggagataaacgaaaaaatagaaaaatcccagcgcgattatttcttaaaggaagaattaaaagcgataaagactgagcttggcatgacgaccgacgccaaaagctccgattaccagcgtttcagggaaaagtttgacacatttaaatttgaaggcgaaataaaggaagtagtggagcaggaacttgataaattcaacctgatggagcccaattccccggagtataccgttacgcgcaactatcttgacgtgatagtgtctcttccctggggagagccttcccctgaggtttttgatttgaagaacgcgcaggccattctggaagaagatcactacgggttaaaagacgtaaagacgcgtatagttgagtatcttgctgtgcgcaaactgcgcaaggacacgaaaggctcgatagtctgccttgtaggtccgccgggggtgggaaaaacttccgtgggcagatcaatcgcccgcgcgctcggcaagcaatttttccgtttttcagtcggcggcatgagggacgaggctgaaatcaaggggcacaggcgcacatatatcggggcgatgcccggaaaaattattcaggggctgaagattgtaaagacaagagatccggtttttatgatagacgaaattgacaagatgggttccagttttcagggagaccccgcaagcgcccttcttgaagtgctggaccctgagcagaattacgccttccgcgatcattatcttgatctgccgtttgatatttcccatgttttttttatcgtaacggcaaacactctggatacaatccccgttccgcttatggatagaatggaaataatacagcttcccggttatatagacatagaaaaacttgaaatcgcgcagcgttatcttctgccaaaaagcctgaaaagaacggtctaa

SEQ ID NO: 70428 - protein, 522 aa, Unknown
  Obtained from environmental sample
  DOMAIN (357)...(500): ATPase family associated with various cellular activities (AAA)
  misc_feature (1)..(522): Xaa is any amino acid
MSDQSVIPIEQLLPHKLPLVALMGRPIFPGIFTPIMIGNPTDVKVVEDAAAGDAMVGLVLMQNETETPAITDLYTVGTAAKIVKKINLPDGGLNIFISTLKRFRVKKTLHPSNPIVAVVEYLEDEEDNTSEVKALTRALISEMKQISENNPLFSEEMRLNMINIDHPGKIADFIASILNIEKAEQQKILEIMNVRKRMEQVLVFIKKEQELLRIQKKIQREINEKIEKSQRDYFLKEELKAIKTELGMTTDAKSSDYQRFREKFDTFKFEGEIKEVVEQELDKFNLMEPNSPEYTVTRNYLDVIVSLPWGEPSPEVFDLKNAQAILEEDHYGLKDVKTRIVEYLAVRKLRKDTKGSIVCLVGPPGVGKTSVGRSIARALGKQFFRFSVGGMRDEAEIKGHRRTYIGAMPGKIIQGLKIVKTRDPVFMIDEIDKMGSSFQGDPASALLEVLDPEQNYAFRDHYLDLPFDISHVFFIVTANTLDTIPVPLMDRMEIIQLPGYIDIEKLEIAQRYLLPKSLKRTV

SEQ ID NO: 70429 - DNA, 909 bp, Unknown
  Obtained from environmental sample
  misc_feature (1)..(909): n is a, c, g, or t
atgatcgaacttgacggaaccgataacaaggccaaactgggcgccaacgcgattttaggcgtatctatggcgacggcccgcgccgcggcggattttctcggcgtgccgctgtacaaatatctgggcgcgttccactcaaatcttttgcccgttccaatggcgaatataattaacggaggcaagcactcagacaataaaatcgactttcaggaattcatggtcatgcccgtcggcgcgcagtccatcagggaagcggtccgctggacagccgaaatttttcataacctgaaaaacatccttcacgccgcgggcaagaacaccgcggttggagacgaaggcggtttcgcgcccgacatcggaaacgaagaagcccttgactacataatgaaagcgattgaaaaagccggatacaaaccccacgagcagatagcgatagccatggactgcgcctcttccgaactttacggtgaaggcggcaagaaaggctacaaattctggaaatccaaccccgataaacttttctccgccgaagaaatgatcgaaatgtataccaaatgggtgaacaaatacccgattatttccattgaagacccgctggatcaggacgattgggaaggttatgtgaagatgacaaagagccttggttcaaagatacagattgtaggcgacgacttctttgtcaccaacacaaaaaggctggagaagggaataggcatgggagcgtgtaactcaattttgattaaagtgaatcaaatcggcactgtaaccgaaacttacgaggccgtagaaatggctaagaaagccggctataccgcaattgtttcccaccgctcaggcgagacggaagacagcttcatcgccgaccttgtagtcgcccttgaaaccggacagatcaagaccggttcatga

SEQ ID NO: 70430 - protein, 302 aa, Unknown
  Obtained from environmental sample
  DOMAIN (46)...(302): Enolase, C-terminal TIM barrel domain
  misc_feature (1)..(302): Xaa is any amino acid
MIELDGTDNKAKLGANAILGVSMATARAAADFLGVPLYKYLGAFHSNLLPVPMANIINGGKHSDNKIDFQEFMVMPVGAQSIREAVRWTAEIFHNLKNILHAAGKNTAVGDEGGFAPDIGNEEALDYIMKAIEKAGYKPHEQIAIAMDCASSELYGEGGKKGYKFWKSNPDKLFSAEEMIEMYTKWVNKYPIISIEDPLDQDDWEGYVKMTKSLGSKIQIVGDDFFVTNTKRLEKGIGMGACNSILIKVNQIGTVTETYEAVEMAKKAGYTAIVSHRSGETEDSFIADLVVALETGQIKTGS

SEQ ID NO: 70431 - DNA, 1119 bp, Unknown
  Obtained from environmental sample
  misc_feature (1)..(1119): n is a, c, g, or t
atgaaattgaaaacaatgaaactggcggcaataattgccgcgctctttctggcaatcggatgtgccggaagcccaaaggcaggatcgggtaatgacggactcgatgccggaatgagaaaaatatcggactatctgaatgagagaataccgaaaggcaacaaggtggtatttcttaacgtcaagagcgactggcccgatctttccgagtacattctttcagggctttctgagaacgccgtaaacgacagagtattttccgtagtagaccgccaacagcttgactcaatacgcgctgaactcaacttccagtggtctggggaagtaagcgacaaatcggcgcaggaaatcgggcagatgctcggagcgcaaataatcgtgtcgggagtagtaaccaagatcggcgacgaataccgcatacaggtacgggcgataacggtaaagaccgcggaagtacagggacaaacaactcagatgatagacggcaaaggcaagcgtgttgtcgcattgacaaaaaaagttgtccccgcaggttcgggcggcgcttcaagcggaacgtcaacggcaagcgggacacggacgcaaaccgcaaccggcagcggacagtcggcgcaggcggctccggctcaaccggcgactgtttacaaaatcggcgacaccggccccgcaggcggcttgatattttacgacaagggcaacagcataggcggctggcggtatctggaagcggctccggcggatataaacgataagtttcagaattatatggatggcgttcccccaaatgactttagggaaagggctgttggatggggaaaacgaaacacggcggcgatcatgaaagaggcggcaagcaggggcggcggtttcgggtggcctgcgcaagcgtgcgacacatacaccctgaacggttttaacgactggtttttgcctagccttgatgagcttaattgggtatacggtaacttgcataaaaagggattaggcgatttcagaaacgattggtatgtttcatcaacagacaatcctgtcatgctgattaattttagaacaggggaacaggatttctggcatggtaatcgtataaataaccagcgtgtccgcctcataaggcagttttag

SEQ ID NO: 70432 - protein, 372 aa, Unknown
  Obtained from environmental sample
  SIGNAL (1)...(26)
  misc_feature (1)..(372): Xaa is any amino acid
MKLKTMKLAAIIAALFLAIGCAGSPKAGSGNDGLDAGMRKISDYLNERIPKGNKVVFLNVKSDWPDLSEYILSGLSENAVNDRVFSVVDRQQLDSIRAELNFQWSGEVSDKSAQEIGQMLGAQIIVSGVVTKIGDEYRIQVRAITVKTAEVQGQTTQMIDGKGKRVVALTKKVVPAGSGGASSGTSTASGTRTQTATGSGQSAQAAPAQPATVYKIGDTGPAGGLIFYDKGNSIGGWRYLEAAPADINDKFQNYMDGVPPNDFRERAVGWGKRNTAAIMKEAASRGGGFGWPAQACDTYTLNGFNDWFLPSLDELNWVYGNLHKKGLGDFRNDWYVSSTDNPVMLINFRTGEQDFWHGNRINNQRVRLIRQF

SEQ ID NO: 70433 - DNA, 1098 bp, Unknown
  Obtained from environmental sample
  misc_feature (1)..(1098): n is a, c, g, or t
atgaagatgaaattaacggcggcaatcattgccgcttttgtaataataatgggttgtgccggaggtcccaaggcttccaaagctgacgaacttgatctggcaattagggacacatcggactatctcaatgacaatatcccaaaagggaacaaaataataatattgaacatacaatccgactacgcttcgctatctgattatattattgatgaactgatagcgaatgcggtcaacgacaaaatatttaaagtggtagacagggcacaattggaacaaatccgcgctgagttaaattttcaatggtcaggcgaagtggacgacaaatccgcccttgaaatcggtaaattcctcggagcgcaaaccatcgtaacaggagcgataagccaactagccgaccgccaccgcatgagaatccgcgccctcaatgtaaaaaccgccgaagtgcagggacagtataacagaaacataaccacaagtcccatgataaccgcattgatgaagggtggaaaatcaactaacacatcatacggcggaaaaacccgcagcggaaattcaagcggaactacaggcggtacaagcggcgcaaagacctcgcaacctgcgacacctgaatacaaaatcggcgacacgggacccgcaggcggattgatattttacgacaagaagaataacagaaacggctggcgttatctcgaagccgcccccgcaaacacggaacgggaaacttttatgtcaggcgactctccctattcgcttggaaataaaaatctggtcggtgatggttttgaaaacacacaaaacatgatgaaaagcatagagaaaaaaggaggcggtatcggttccgcaccatattattgtactaatcttgtcgtgaacggatttaatgactggtatctgccttcgtttgacgaaatctctttaatgtataccaatttacacgcaaacaacttgggcagttttaagcaaagggattattggcattcatcggaacacggagtggtttggggaacatacagttttgccaaaggtgaaaaaggacagcacagttacgcctacgataacgacaaacgcctaactcgcgcctgtcggcgtttttaa

SEQ ID NO: 70434 - protein, 365 aa, Unknown
  Obtained from environmental sample
  SIGNAL (1)...(25)
  misc_feature (1)..(365): Xaa is any amino acid
MKMKLTAAIIAAFVIIMGCAGGPKASKADELDLAIRDTSDYLNDNIPKGNKIIILNIQSDYASLSDYIIDELIANAVNDKIFKVVDRAQLEQIRAELNFQWSGEVDDKSALEIGKFLGAQTIVTGAISQLADRHRMRIRALNVKTAEVQGQYNRNITTSPMITALMKGGKSTNTSYGGKTRSGNSSGTTGGTSGAKTSQPATPEYKIGDTGPAGGLIFYDKKNNRNGWRYLEAAPANTERETFMSGDSPYSLGNKNLVGDGFENTQNMMKSIEKKGGGIGSAPYYCTNLVVNGFNDWYLPSFDEISLMYTNLHANNLGSFKQRDYWHSSEHGVVWGTYSFAKGEKGQHSYAYDNDKRLTRACRRF

SEQ ID NO: 70435 - DNA, 690 bp, Unknown
  Obtained from environmental sample
  misc_feature (1)..(690): n is a, c, g, or t
atgaagattgcaaaaaaagcgttggcggcgcttaccgtcataaccatcgtggcgcttatcggatgcgcttcaaaaccgaaagtcaaagttgttgaaatggaaaacaagggaacgtcgatgggcattaaaacgccggactggatcaaaaactacaccgccaacggcatttcggcggtacaggcgcagtacaaagacaaatactgcatcattggcgaggaaagcggcgtgaacaaacaattcgttatgacatgggcggacaacttcagcgcacagcagagaatcggcgcgatgttacgcacaaacatcgaaagcgaatatcaggcgcgggtaaagggcatggcgacatcgacaggcggcgcaaatgcgacagcatcgcaagcggcaagcacaggcgaacttaacaatcagattaacagcgtaattaacgcggttgtgaacgtgagctactcaggagcgcagagagaagcggactggtggagccttcgcagacgctatgatcccgatcagaaaaaagaatttacagatgaatacacggcttatgttctttacacaatccccaaaaaggaactgaacacgcaggtggcgaatgcgatgacaaccgcaatcaaaaaagattcggcgttatacgacatcaccattcagatagcgcaggatatgcttcaaaaaggcataatgaactggggcgaataa

SEQ ID NO: 70436 - protein, 229 aa, Unknown
  Obtained from environmental sample
  SIGNAL (1)...(23)
  misc_feature (1)..(229): Xaa is any amino acid
MKIAKKALAALTVITIVALIGCASKPKVKVVEMENKGTSMGIKTPDWIKNYTANGISAVQAQYKDKYCIIGEESGVNKQFVMTWADNFSAQQRIGAMLRTNIESEYQARVKGMATSTGGANATASQAASTGELNNQINSVINAVVNVSYSGAQREADWWSLRRRYDPDQKKEFTDEYTAYVLYTIPKKELNTQVANAMTTAIKKDSALYDITIQIAQDMLQKGIMNWGE

SEQ ID NO: 70437 - DNA, 624 bp, Unknown
  Obtained from environmental sample
  misc_feature (1)..(624): n is a, c, g, or t
atgcacggccatcccgtaaacctgacaggctcaggcaggactgattccggcgttcacgcggttgggcaggcggcaaatttttacacggatatcgaaagcattcccgcaggaagattcgctcccgcgctgaactcttccctgccccacgatgtaagagtgcttgaatcctgcgaaacggacggagaatttcacgcccgcttcagcgcaaaggcgcggacttatcgttatcaatttatatgccgccccctcctgcctcatgaaagccgctacaatctgcaattacgccgtttcccgcgccttgaacttcttaacgcgcacggaagactgctacttggggaaacagactgctccatttttgccggcgcgggggacacaagcgcctccaaaaaccgctatgtttacaaggcgtatttttatgcggaaagagattccttgatttttgaaatctgcgccaacgccttcctccgcaacatggtccgctccgtagccggcaccttccttcactacgaagaaaccgccacgccgcctgacaaactgcgggaaatcatcgccacaggagaacgctccctagccggcccccacatgcccccacaagggctatttctgtggcaggtggagtattaa

SEQ ID NO: 70438 - protein, 207 aa, Unknown
  Obtained from environmental sample
  DOMAIN (106)...(207): tRNA pseudouridine synthase
  misc_feature (1)..(207): Xaa is any amino acid
MHGHPVNLTGSGRTDSGVHAVGQAANFYTDIESIPAGRFAPALNSSLPHDVRVLESCETDGEFHARFSAKARTYRYQFICRPLLPHESRYNLQLRRFPRLELLNAHGRLLLGETDCSIFAGAGDTSASKNRYVYKAYFYAERDSLIFEICANAFLRNMVRSVAGTFLHYEETATPPDKLREIIATGERSLAGPHMPPQGLFLWQVEY

SEQ ID NO: 70439 - DNA, 1605 bp, Unknown
  Obtained from environmental sample
  misc_feature (1)..(1605): n is a, c, g, or t
atgactaatgcaaaattaacgctcttgggagacgaagcggtcgccttaggagcgatacactcaggcgtaagcgcgtcttacggctatccgggaaccccgtcaacggaaattttacagtacttaattgacgaacacaaaaaaggcggtcctatcgcgcgctggtgcgccaacgaaaaatccgcgcttgaatcggctatgggcgtttccttcgccggacgcagggcgctcgttacaatgaaacatgtcgggcttaatgtcgcggctgacccgttcataaacgccgctcttttaaaaattaaaggcggtcttgtagtcgtagtcgccgatgaccccggtatgcacagttcccagaatgagcaggattcccgcttttacgctaaattcgcgatggttccctgtcttgagccgcgcaatcagcaggaagcctacgacatggcgcgcgaggcgtttgacgtttcggagtgcttcagcgttcccgtccttttgcgccttgtaacgcgcctgtctcacgcgcgcgccgtagttgaaacaagaaactcgcaggaacaaaacgagttatccaagacaaaggaaaaagaagggtggatgcttcttcccgcttacgcgcgcaaaaactactccgcgcttatcgctaaacaaaaaattcttgaggaatggtctttccagcatgaaataaacaaactgtcaggcgtaagcaatgaccttggcataatcacatccggaattggctgtaattattacgaggaaaatcttgcggactttttagcaatgcggaaaaaacagggaaaaggcgagccgcttcatttacacatcggcgcgtatcccctgccggagaaaaaaattcgcaaactttacgagagcgtaaacgagattctgataattgaggaagggcagcctttcatagcgcaaagggttttcggtcttacaggcgcggaattaaagcccatcattcaatgcggagagcttgaccccgacaatgtccgcaaggcgctcggtcttccgccgagaaaaagcgtcaatattattacaggcgctcttcccgcgcgtccgccacagttatgcaagggctgtccccacgccgacagttacaacacaattaacaaagtcgtcgccgcccttgacccgcgcgaggatcaccccgacgtggcggttaattccgacatcggctgttattcgctgggagcgaccccgccgttttcagccattgagagcgtagtctgcatgggagcctgcgtaggcatggcaaaaggcgcggctgacgctggtcttaaatactcgcttgccgtaataggagattcaaccttcatacattcgggcattaccccgctcattgacgccgtagaagccgacacgccgatgaccctcataattcttgataactccaccgtagcaatgacaggctgtcagccgaccatagtgccgtccaaaaacctaaaaaccctcttaaaaggctgcggtgtaaagcgcatccttgaactggaaacaaaggcggctcttgtagaaaaaaacgccgccaaactgaaagctgaggttcaacataaagggttttctgtcgttatctttaaacgggagtgtctggaagcgctgcgtaagagtaagcgttag

SEQ ID NO: 70440 - protein, 534 aa, Unknown
  Obtained from environmental sample
  DOMAIN (16)...(243): Pyruvate flavodoxin/ferredoxin oxidoreductase, thiamine diP-binding domain
  misc_feature (1)..(534): Xaa is any amino acid
MTNAKLTLLGDEAVALGAIHSGVSASYGYPGTPSTEILQYLIDEHKKGGPIARWCANEKSALESAMGVSFAGRRALVTMKHVGLNVAADPFINAALLKIKGGLVVVVADDPGMHSSQNEQDSRFYAKFAMVPCLEPRNQQEAYDMAREAFDVSECFSVPVLLRLVTRLSHARAVVETRNSQEQNELSKTKEKEGWMLLPAYARKNYSALIAKQKILEEWSFQHEINKLSGVSNDLGIITSGIGCNYYEENLADFLAMRKKQGKGEPLHLHIGAYPLPEKKIRKLYESVNEILIIEEGQPFIAQRVFGLTGAELKPIIQCGELDPDNVRKALGLPPRKSVNIITGALPARPPQLCKGCPHADSYNTINKVVAALDPREDHPDVAVNSDIGCYSLGATPPFSAIESVVCMGACVGMAKGAADAGLKYSLAVIGDSTFIHSGITPLIDAVEADTPMTLIILDNSTVAMTGCQPTIVPSKNLKTLLKGCGVKRILELETKAALVEKNAAKLKAEVQHKGFSVVIFKRECLEALRKSKR

SEQ ID NO: 70441 - DNA, 1530 bp, Unknown
  Obtained from environmental sample
  misc_feature (1)..(1530): n is a, c, g, or t
ttgtttttcgtagtgacaatttttgtcggtttctatttcaagaaaagaacttcaagcgtaaatgattttgtgcttggcggacgcgcggtaggtccgtggcttacggctttcgcctacggaacgtcgtatttttccgcggtaatttttgtcggctacgccggacaattcggctggagattcggaaccgcggcgacatgggttggtttaggcaacgcgtttatcggctcgctgatgccgtgggtaatactcggacggcgtacccgcgtaatgacacagcacttaaaaagcgcgaccatgccggaatttttcggctctcgttttaacgcggcttcgttaaaaataggggcgtcgctcatactttttatattccttatcccctacaccgcttcgttatacaacggtctttcgcgtttattcgagatggcgttcggcattgattttatttactgtattatcggcatggctgtacttaccgccgtttatgtcgtagtcggcggttactttgccacagcggcaaacgattttattcaaggcataatcatgctttgcggtattgtcgccattatcaccgcggtgcttcacagcaacggcggatttattaacgcgttggcaaaaatggcggcggtagaagccaaaaatgttaacggcgatgtcgtaccgggaattcttacgtcattcttcggtcccgacccgttaagtttattaggcgtcataattcttacgtcgctcggaacatggggacttccgcagatggtttctaaattttactccataaagtccgaaaaaatgataagtaagggcgcaattgtatcgacatttttcgggcttgttgtagccggcggttgttattttcttggcagtttcggcagattatacggcagttcaaatatatacaatgaaaagggcgcaatagtctttgacgccattgtaccggcaatgctttctaatttccctgattttttgatcggtatagttatagtactggtattcgccgcgtcaatatccacgctttcatcccttgtcatggcatcctcctctactcttacgctggatttccttaaaggtcacatcattaaaaacatgaacgaaaagaaacaactgtttatcattcgcgcgttgattgttgtatttataataatttcttcttgtatagcgattattcagtacaaaggctctatctcatttattgcgcagcttatgggtatctcgtggggagcgctcgccggctccttccttgcgccgttcctctacggactgtattggaaacgcgttacaaaacccgcggtttggtgcaactttattttcagcacggtactgatgactcttaacatatttttcagagctaagttcccggctgttttacaatcgccgattaacgccggagcgtttacaatgcttgccggttttattatcgtgcctgtcataagcattcttacaaaagcgccggataaaaacgcggtagataactgctttacctgttatgatgagatggtcagcgtaaaagtccgcgacgaccttggcgataaatag

SEQ ID NO: 70442 - protein, 509 aa, Unknown
  Obtained from environmental sample
  DOMAIN (23)...(435): Sodium:solute symporter family
  misc_feature (1)..(509): Xaa is any amino acid
MFFVVTIFVGFYFKKRTSSVNDFVLGGRAVGPWLTAFAYGTSYFSAVIFVGYAGQFGWRFGTAATWVGLGNAFIGSLMPWVILGRRTRVMTQHLKSATMPEFFGSRFNAASLKIGASLILFIFLIPYTASLYNGLSRLFEMAFGIDFIYCIIGMAVLTAVYVVVGGYFATAANDFIQGIIMLCGIVAIITAVLHSNGGFINALAKMAAVEAKNVNGDVVPGILTSFFGPDPLSLLGVIILTSLGTWGLPQMVSKFYSIKSEKMISKGAIVSTFFGLVVAGGCYFLGSFGRLYGSSNIYNEKGAIVFDAIVPAMLSNFPDFLIGIVIVLVFAASISTLSSLVMASSSTLTLDFLKGHIIKNMNEKKQLFIIRALIVVFIIISSCIAIIQYKGSISFIAQLMGISWGALAGSFLAPFLYGLYWKRVTKPAVWCNFIFSTVLMTLNIFFRAKFPAVLQSPINAGAFTMLAGFIIVPVISILTKAPDKNAVDNCFTCYDEMVSVKVRDDLGDK

SEQ ID NO: 70443 - DNA, 369 bp, Unknown
  Obtained from environmental sample
  misc_feature (1)..(369): n is a, c, g, or t
atggctcatcttgaggcaggcttcccgcttagatgccttcagcggttatcctttccggacatggctacccggcgcttgcccctggcgggacaaccggcacaccagcggtccgtccgtctcggtcctctcgtactaaaaacagctcctctcaaccatccttcgcccatggcagatagggaccgaactgtctcgcgacgttctgaacccagctcacgtaccgctttaattggcgaacagccaaacccttgggacctgcttcagccccaggatgcgatgagccgacatcgaggtgccaaaccttcccgtcgatgtgaactcttggggaagattagcctgttatccccggagtaccttttatccgttaagtga

SEQ ID NO: 70444 - protein, 122 aa, Unknown
  Obtained from environmental sample
  misc_feature (1)..(122): Xaa is any amino acid
MAHLEAGFPLRCLQRLSFPDMATRRLPLAGQPAHQRSVRLGPLVLKTAPLNHPSPMADRDRTVSRRSEPSSRTALIGEQPNPWDLLQPQDAMSRHRGAKPSRRCELLGKISLLSPEYLLSVK

SEQ ID NO: 70445 - DNA, 303 bp, Unknown
  Obtained from environmental sample
  misc_feature (1)..(303): n is a, c, g, or t
gtgccaaaccttcccgtcgatgtgaactcttggggaagattagcctgttatccccggagtaccttttatccgttaagtgacggcgcttccacccgctaccgccagatcactaagacctactttcgtacctgcccggcctgtcggcctcgcagtcaagcctccttttgcctttacactcgcgcgccgatttccaaccggcgcgaggagaccttcgcgcacctccgttactctttgggaggcgaccgccccagtcaaactgcctgcctaccgctgtccggaacccagcttcatggatcccgttag

SEQ ID NO: 70446 - protein, 100 aa, Unknown
  Obtained from environmental sample
  misc_feature (1)..(100): Xaa is any amino acid
MPNLPVDVNSWGRLACYPRSTFYPLSDGASTRYRQITKTYFRTCPACRPRSQASFCLYTRAPISNRREETFAHLRYSLGGDRPSQTACLPLSGTQLHGSR

SEQ ID NO: 70447 - DNA, 321 bp, Unknown
  Obtained from environmental sample
  misc_feature (1)..(321): n is a, c, g, or t
gtgacggcgcttccacccgctaccgccagatcactaagacctactttcgtacctgcccggcctgtcggcctcgcagtcaagcctccttttgcctttacactcgcgcgccgatttccaaccggcgcgaggagaccttcgcgcacctccgttactctttgggaggcgaccgccccagtcaaactgcctgcctaccgctgtccggaacccagcttcatggatcccgttagaaacctaatcagacaagggtggtatttcaccgtcggctccatacaggctaacgcccatacttcaaagcctcccacctatcctacacatgcctga

SEQ ID NO: 70448 - protein, 106 aa, Unknown
  Obtained from environmental sample
  misc_feature (1)..(106): Xaa is any amino acid
MTALPPATARSLRPTFVPARPVGLAVKPPFAFTLARRFPTGARRPSRTSVTLWEATAPVKLPAYRCPEPSFMDPVRNLIRQGWYFTVGSIQANAHTSKPPTYPTHA

SEQ ID NO: 70449 - DNA, 564 bp, Unknown
  Obtained from environmental sample
  misc_feature (1)..(564): n is a, c, g, or t
gtgactgcgcccgcttcgcttcgctgtcgctccgctcgctgtaacgcctcgcctgcggccgtttcctccggccccactagcttggcgcttcgaccgggactaccgtcgcccggccgggcttcgcctcatgcgtcgtcccttgaaaccaagaacggtactggaataatgaccagtttcccatcggctacgggtttccccctcgccttaggggccgacttaccctgggaagattgcctttacccaggaaacctcgggcttccggcggagggggatcccacccctcttttcgtctacttatacctgcattctctcttccgccccctccagcgcgccttgcagcgcgccttcgatcggttcgcggaatgctcccctaccatccgcgcattgctgcgcgaatccgcggcttcggttgcgtgcttagccccgatacattgtctgcgcgccgtgactcgaccagtgagctgttacacactctttcaaggaatggctgcttctaagccaacctcctggctgtcttcgccacgtcacatcattttacactcagcacgccatccgggaccttag

SEQ ID NO: 70450 - protein, 187 aa, Unknown
  Obtained from environmental sample
  misc_feature (1)..(187): Xaa is any amino acid
MTAPASLRCRSARCNASPAAVSSGPTSLALRPGLPSPGRASPHASSLETKNGTGIMTSFPSATGFPLALGADLPWEDCLYPGNLGLPAEGDPTPLFVYLYLHSLFRPLQRALQRAFDRFAECSPTIRALLRESAASVACLAPIHCLRAVTRPVSCYTLFQGMAASKPTSWLSSPRHIILHSARHPGP

SEQ ID NO: 70451 - DNA, 477 bp, Unknown
  Obtained from environmental sample
  misc_feature (1)..(477): n is a, c, g, or t
atgcaactgaacgccctgttcagactcggtttccctccggctccgggactcccatcccttagcctcgctgcataccataactcgcaggctcattctacaaaaggcacgccgtcaccgcatcgctgcggctccgacatgttgcgggtccacggtttcaggttctatttcactcccctcgccggggttcttttcgcctttccctcacggtacttctgcgctatcggtcgctccctgtgtttagccttggatcgtggtcgacccggattcccgcggggtttctcgtgccccgcagtacttaggattccgctccctcgccgccatcatttcgggtacggggctttcaccccctctggccggctttcccaaaaccgttcccctatcatgacgacgaagttgtcgcggtcctgcaaccccgccctcgcgggcggtttaggctcctccgatttcgctcgccgctactttcggaatctctgttga

SEQ ID NO: 70452 - protein, 158 aa, Unknown
  Obtained from environmental sample
  misc_feature (1)..(158): Xaa is any amino acid
MQLNALFRLGFPPAPGLPSLSLAAYHNSQAHSTKGTPSPHRCGSDMLRVHGFRFYFTPLAGVLFAFPSRYFCAIGRSLCLALDRGRPGFPRGFSCPAVLRIPLPRRHHFGYGAFTPSGRLSQNRSPIMTTKLSRSCNPALAGGLGSSDFARRYFRNLC

SEQ ID NO: 70453 - DNA, 384 bp, Unknown
  Obtained from environmental sample
  misc_feature (1)..(384): n is a, c, g, or t
ttgatttcttttcccggggtactgagatggttcagttcccccagtcctgcctccgcaccctatatattcagatgcggataccaagctcgcgctcggtgggttaccccattcggctaccggcggatcttaggatgtgtgctcctccccgccgcttttcgcagcttgccgcggccttcttcgccagggtgcgccaaggcatccacctgtggacccttctctcgcttgaccatattattgatccgccgaatgccgccttcgcggctccggcttccgcccttccctctcggaggcctctccagccgcctttctgtcaaatatctgtggggatacttctccctggagataaggagactcggacccctgacatccagcttgcaaagctag

SEQ ID NO: 70454 - protein, 127 aa, Unknown
  Obtained from environmental sample
  misc_feature (1)..(127): Xaa is any amino acid
MISFPGVLRWFSSPSPASAPYIFRCGYQARARWVTPFGYRRILGCVLLPAAFRSLPRPSSPGCAKASTCGPFSRLTILLIRRMPPSRLRLPPFPLGGLSSRLSVKYLWGYFSLEIRRLGPLTSSLQS

SEQ ID NO: 70455 - DNA, 429 bp, Unknown
  Obtained from environmental sample
  misc_feature (1)..(429): n is a, c, g, or t
gtgtgccgcctggggagtatgcccgcaagggtgaaactcaaaggaattgacgggggcccgcacaagcggtggagcatgtggtttaattcgatggtacgcgaggaaccttacctgggtttgacatgggggcggatgcgccagagatggcgcagcgtagcaatacgcgcccctgcaggtgctgcatggctgtcgtcagctcgtgccgtgaggtgttgggttaagtcccgcaacgagcgcaacccctactgccagttactagcaggcaatgctgaggactctggcggaactgccggtgacaaaccggaggaaggtggggatgacgtcaagtcatcatggcccttatgtccagggctacacacgtgctacaatgggcggtacagagcgaagcgaagccgcgaggcaagagcgaagcgcgaaagccgcccgtag

SEQ ID NO: 70456 - protein, 142 aa, Unknown
  Obtained from environmental sample
  misc_feature (1)..(142): Xaa is any amino acid
MCRLGSMPARVKLKGIDGGPHKRWSMWFNSMVREEPYLGLTWGRMRQRWRSVAIRAPAGAAWLSSARAVRCWVKSRNERNPYCQLLAGNAEDSGGTAGDKPEEGGDDVKSSWPLCPGLHTCYNGRYRAKRSREARAKRESRP

SEQ ID NO: 70457 - DNA, 387 bp, Unknown
  Obtained from environmental sample
  misc_feature (1)..(387): n is a, c, g, or t
atgctccaccgcttgtgcgggcccccgtcaattcctttgagtttcacccttgcgggcatactccccaggcggcacacttaccgcgttcgcttcggcaccggaacgctcgccccgacgcctagtgtgcatcgtttacagtgcggactaccagggtatctaatcctgtttgctccccgcactttcgcgcctcagcgtcagtcatcggctggaagcctgccttcgccatcggtgttcttcctgatatctacagatttcacccctacaccaggaattccggcttcccctccgtcactcaagccgcgcagtttccaatgcagttcccgggttgagcccggggttttcacatcagacttacgcggccgcctacgcgccctttacgcccaataa

SEQ ID NO: 70458 - protein, 128 aa, Unknown
  Obtained from environmental sample
  misc_feature (1)..(128): Xaa is any amino acid
MLHRLCGPPSIPLSFTLAGILPRRHTYRVRFGTGTLAPTPSVHRLQCGLPGYLILFAPRTFAPQRQSSAGSLPSPSVFFLISTDFTPTPGIPASPPSLKPRSFQCSSRVEPGVFTSDLRGRLRALYAQ

SEQ ID NO: 70459 - DNA, 375 bp, Unknown
  Obtained from environmental sample
  misc_feature (1)..(375): n is a, c, g, or t
ttgagcccggggttttcacatcagacttacgcggccgcctacgcgccctttacgcccaataattccgaacaacgctcgccccttacgtgttaccgcggctgctggcacgtaattagccggggcttattcgcgggccggcgtcaccagcctggcattccctccaagccttcttcttcgcccgcaaaaggattttacaacctttcggccttcgtcatccacgcggcgtcgctccgtcagactttcgtccattgcggaatattcttagctgctgcctcccgtaggagtctgggccgtatctcagtcccagtgtggccgttcgccctctcaggccggctacccatcttcgccttggtgggctcttacccctccaactag

SEQ ID NO: 70460 - protein, 124 aa, Unknown
  Obtained from environmental sample
  misc_feature (1)..(124): Xaa is any amino acid
MSPGFSHQTYAAAYAPFTPNNSEQRSPLTCYRGCWHVISRGLFAGRRHQPGIPSKPSSSPAKGFYNLSAFVIHAASLRQTFVHCGIFLAAASRRSLGRISVPVWPFALSGRLPIFALVGSYPSN

SEQ ID NO: 70461 - DNA, 306 bp, Unknown
  Obtained from environmental sample
  misc_feature (1)..(306): n is a, c, g, or t
gtgagtaacgcgtgggcgacctgccccggggatggggacagccgttggaaacagcgggtaataccgaatacgatcaccatgttacggcatggtgaggaaaggggctacggccccgccccgggatgggcccgcgtcccattagctagttggaggggtaagagcccaccaaggcgaagatgggtagccggcctgagagggcgaacggccacactgggactgagatacggcccagactcctacgggaggcagcagctaagaatattccgcaatggacgaaagtctgacggagcgacgccgcgtggatga

SEQ ID NO: 70462 - protein, 101 aa, Unknown
  Obtained from environmental sample
  misc_feature (1)..(101): Xaa is any amino acid
MSNAWATCPGDGDSRWKQRVIPNTITMLRHGEERGYGPAPGWARVPLASWRGKSPPRRRWVAGLRGRTATLGLRYGPDSYGRQQLRIFRNGRKSDGATPRG

SEQ ID NO: 70463 - DNA, 3174 bp, Unknown
  Obtained from environmental sample
  misc_feature (1)..(3174): n is a, c, g, or t
atggcgagcggatgtctggcctgccggcagaccggatgggcaatgatcgcgtcaaacagcgttcaggaagtaatggatttcgcgcttatcgcccatgccagcaccctgcgttcccgcgttcccttccttcacttctttgacggtttccgcaccagccacgaattgcagaatgtggaagagatatcccacgatgatataaggaagatgattgataacgatctggtaatggcccacaggacccggggccttaacccggaaaatccccatatccgagggacagcccaaaacccggacacctatttccagggccgcgaaggggtgaacaagtattaccttaaggtgccgggcatcgtgcaggcggaaatggacaagttagccaaaatcatagggcggcagtaccatgtattcgattatcacggcgcgaaagacgcggaaaaagtaatcatcatcatgggttccggcgcggaaacctgcgaggaaaccgttgattaccttaatgcaaagggagagaaactcggcctggtgaaagttcacctgtaccgcccctttgacgtaagcctctttgtaaaggccctgccctccacggtaaaagccatcgccgtcctcgaccgcaccaaagacccgggcgcaatcggcgagcccttatacgaagatgtccgcaccgcgatcgccgaagcgaaagcatcaggcagtttctccgccgacccgattgtattgggcggacgttacgggcttggttccaaagagttcacccccacaatggtcaaggctgtgtttgacaacctttccggcaagaaaatcgccaacttcatcgtcggcgttaatgacgacgtggagcacaagagcctggattacgatccgaattttgtactggaagaagaaggtttaagcgaagctttgttctacggcttgggatcggacggcacggtcggcgcgaacaagaactcaatcaagatcatcagcgaggcgaaaccggaactcaacgcgcaggcgtacttctcctacgactcaaaaaaatcaggcggctttaccgtatcgcatcttcgcttcggcaaaggcgctatcagaaggccataccttatcaactccgcggacttcctcgcgtgtcacaaattttcctacatggaaatgtacgatatgcttaaaatgctcaagtcgggcggcacattccttcttaacagccccttcaaagcggcggatgtatggaagaatatccccgtagaggctcagcagcgcataatcgacaaaaaattaaaattctatgttataaacgccgccgaaattgcgtttaacacaggtatgggcaaccgcatcaacacggtcatgcaggccgcttatttcaaaatctccggcatattgtctgaagaagaagcggtaagacgcatgaaggaacatatcgaacattcctacggcaagaagggcaaagacgtagtagaaaagaactacaaaaccgtagacgcgtcattaaccgccgttgaaaaagttgagtatccttccaagaccgaaggcgacatccacatgaaaaaaccctttgccaccgcgaaggatccatggatcaaggaagttctcggaaccatgtcggtacaggaaggcgacaacctgcctgtcagcaaacttccggaagacggaacattcccgacagccacgacccagtacgaaaaacggtctgtcgcggaacgcgttcccctttggaatcctgaagtatgtatacagtgcggtaactgtacggtcgtatgtccgcacgcgtgtatgcgctttaaaaaccttacagacgatcaggttgcgaaagcgcctaagggatttaagaccgcggaaattaaaccgaaaccggtagccggacagaaagcggcgcttgttattgcctgcgaagattgttacagctgcggcgtttgtttcaatatctgcccaatgtccaataaaggccaggagaaaccggcgttgtcatggaaatcttacgcggacgatcatgaattacacgcggaacaggtagccgtttgggattatttcctttcattgcccgaaactccggccggcgatcttatatcgccgaaagcgcttgcctataagcgccccttgtttgaattctcgggcgcgtgcggcggctgcggtgagactccctacgttaaacttatgtcgcagttgttcggcgaccgcgcgatcatcgccaacgccacgggctgttcctccatttacggcggaaacctcccgactacgccttactgccagcgcgcggacggacgcgggccggcatggtcaaacagcttgttcgaagacgcggctgaatttgcgatgggcttccgcctgacaagcgacaagctcgccgttcacgcccgcgaaatcgccgagaaggcaaagagcgaaggcatcgcggcgggaattatcgacaagattctttctaacaatcaggcggacgacgcggcaattgacgaacttcgcaaaaatattgacgcgcttaaagccgaacttaaaaacaactccaaacccacggcaaaactgcttgtttcgttagctgactattttgtaaaacgttcagtgtgggcgttcggcggcgacggctgggcttacgacatcggcttcggcggactggatcacgttatcgcttccggcaagaacgtaaacctcttgtgcatggataccgaggtttattccaacaccggcggacagatgtccaaatcgacgcctgtcggcgcaatcgcgaaatttgccaacgcgggaaaggatattacaaagaaggatcttggcgctatagcgatgagttacggttatgtgtatgtcgccaaagtttcgttaggcgcaaatatgccgcaggtaatcaaggcgttccgcgaagcggaatcttacgacggcccgtcgcttataatcgcatactcgcactgtatcaaccacggaatcgacatgagcaaggggcttgagcagggcaaggcggttgtatcaagcggcctatggccattgtaccgctacgatccgcggcttaaggatcaggggaaaaatcccttccagcttgactcgaaagatccgacgacaagcatagaagactttatgtacaaagaagtacgtttcaagagcttaaaagccgctaatcccggccgcgcagacgcgttgcttgcaaaagcgaaagcccatgcggaaagagtttggaaagagtacaaatatctggctgaacgtccgttctaa

SEQ ID NO: 70464 - protein, 1057 aa, Unknown
  Obtained from environmental sample
  DOMAIN (562)...(585): 4Fe-4S binding domain
  misc_feature (1)..(1057): Xaa is any amino acid
MASGCLACRQTGWAMIASNSVQEVMDFALIAHASTLRSRVPFLHFFDGFRTSHELQNVEEISHDDIRKMIDNDLVMAHRTRGLNPENPHIRGTAQNPDTYFQGREGVNKYYLKVPGIVQAEMDKLAKIIGRQYHVFDYHGAKDAEKVIIIMGSGAETCEETVDYLNAKGEKLGLVKVHLYRPFDVSLFVKALPSTVKAIAVLDRTKDPGAIGEPLYEDVRTAIAEAKASGSFSADPIVLGGRYGLGSKEFTPTMVKAVFDNLSGKKIANFIVGVNDDVEHKSLDYDPNFVLEEEGLSEALFYGLGSDGTVGANKNSIKIISEAKPELNAQAYFSYDSKKSGGFTVSHLRFGKGAIRRPYLINSADFLACHKFSYMEMYDMLKMLKSGGTFLLNSPFKAADVWKNIPVEAQQRIIDKKLKFYVINAAEIAFNTGMGNRINTVMQAAYFKISGILSEEEAVRRMKEHIEHSYGKKGKDVVEKNYKTVDASLTAVEKVEYPSKTEGDIHMKKPFATAKDPWIKEVLGTMSVQEGDNLPVSKLPEDGTFPTATTQYEKRSVAERVPLWNPEVCIQCGNCTVVCPHACMRFKNLTDDQVAKAPKGFKTAEIKPKPVAGQKAALVIACEDCYSCGVCFNICPMSNKGQEKPALSWKSYADDHELHAEQVAVWDYFLSLPETPAGDLISPKALAYKRPLFEFSGACGGCGETPYVKLMSQLFGDRAIIANATGCSSIYGGNLPTTPYCQRADGRGPAWSNSLFEDAAEFAMGFRLTSDKLAVHAREIAEKAKSEGIAAGIIDKILSNNQADDAAIDELRKNIDALKAELKNNSKPTAKLLVSLADYFVKRSVWAFGGDGWAYDIGFGGLDHVIASGKNVNLLCMDTEVYSNTGGQMSKSTPVGAIAKFANAGKDITKKDLGAIAMSYGYVYVAKVSLGANMPQVIKAFREAESYDGPSLIIAYSHCINHGIDMSKGLEQGKAVVSSGLWPLYRYDPRLKDQGKNPFQLDSKDPTTSIEDFMYKEVRFKSLKAANPGRADALLAKAKAHAERVWKEYKYLAERPF

SEQ ID NO: 70465 - DNA, 1023 bp, Unknown
  Obtained from environmental sample
  misc_feature (1)..(1023): n is a, c, g, or t
atgaagaccatatttgtcgttgacgacagcgataccaacctgacgatggcagagtcggcattggaagaccaataccgcgttatgacaatgccgtcagcggcaagtatgttctcgtttttagaaaaagttattcccgatttaatccttctggatatagaaatgccggaaatggacggctttgaagcgcttgcgaaacttaagactaaagataattacagcgaaatccccatcatgtttttaacaggcagaaccgacgcggacgtggaagcgcgcggttttgaaatgggcgcggtggattttgtaacaaagccgttctccgcgcctgtactgttaaaccgcataaagactcaccttgatattgatcaggtaatccgcgagcggactgcgcagttgcgccggcttcaaaacaatatagtgtctgttctcgcggacatggtggaaaaccgcgacaaggggacaggcggacatatcgaacgcacttcaatttacataaaaattctgatagaggaaatgaaagagcgcggggtttatctcgatgaaatccgcgattgggacgtggataaaattgtttcttccgcgcgtatgcacgacctcgggaaaatctccattaccgatattattgtgaacaagccggataaacttaccgatgacgaatacgagctgataaaaacgcacaccatcgaaggcgagatgataattgacgagataatttccaaaacgggagaagatgaatttttaaacagcgctcgtctgtttgccggctgccatcatgaacgttgggacggcaaagggtatcctcgggggttaaagggagagaaaatcccgctgcagggtcgcatcatggctattgtggacgtgtacgacgcccttgtttccgaacggccgtataaaaaagcgttttccgacgaggaagcggtacagataatattggataacgccggcgtccactatgatccaaaaatagtagaggtttttaattcggtaaaagatcagtttaaatctgtaagggctaaattattatga

SEQ ID NO: 70466 - protein, 340 aa, Unknown
  Obtained from environmental sample
  DOMAIN (153)...(290): HD domain
  misc_feature (1)..(340): Xaa is any amino acid
MKTIFVVDDSDTNLTMAESALEDQYRVMTMPSAASMFSFLEKVIPDLILLDIEMPEMDGFEALAKLKTKDNYSEIPIMFLTGRTDADVEARGFEMGAVDFVTKPFSAPVLLNRIKTHLDIDQVIRERTAQLRRLQNNIVSVLADMVENRDKGTGGHIERTSIYIKILIEEMKERGVYLDEIRDWDVDKIVSSARMHDLGKISITDIIVNKPDKLTDDEYELIKTHTIEGEMIIDEIISKTGEDEFLNSARLFAGCHHERWDGKGYPRGLKGEKIPLQGRIMAIVDVYDALVSERPYKKAFSDEEAVQIILDNAGVHYDPKIVEVFNSVKDQFKSVRAKLL

SEQ ID NO: 70467 - DNA, 2001 bp, Unknown
  Obtained from environmental sample
  misc_feature (1)..(2001): n is a, c, g, or t
atgatgtcattattgcgcataactaaaaccgtttttaaaaaatatgcgcaagtctttgccgtctttcttgcttttgctctaatggtgatcttcagttattcatttacaagtaaaaaagagcgcgtaaatttacaggataaagtaaaagacgctatttctaaaacagaagccaatataaaagccgagttaaaagaacctgaaaccttgcttgccggcgtctccgaaactttaagagcaatgttatttgacaacagagacgcggatactgtgcagggatttatagatcacattgacaattatgttcagtcggaatccgataaacgtatgtttggggttatcggtttttacgcggtctttgatatttttgacgggaaatttatgaccgggtcaaaaacatgggagaagcctgaaaattttgaccctaaaagcctgccgtggtatacggaggctgtaaaggcagacggagatatcgccataactcagccggttgttgacaagtcttccggaaaagtgtcattgtcattttcgcgccgcatttctgatgatgaaggacatccgtttggggttatcgcccttgatatataccttgataaaataaaacaggaagctattaatacgcgttttacaaaagacggatacggttttttgttagatgatgaaacggaagtgattgttcatcctgaaccatggatgctgggtttattattaaatgaggtaaaaagcaatatctccgcttattcagacgaactgcagcggaccggcagcgtttccgaggctgtaacggccgattacaggggaattcaaagtattgtatttatgcaaaggctttataacggctggtatatgggagtcgtaacgccgagagacaattattatcagagtacgagacatcttgcggtaattctttccgcgtttggcgttgtatttgccgttcttctgggctggatgctgttgacaatttcctctggaaaagccgcgtcggacgagcgtattcagcttatgtccgacagcaaccccataggcatgtctttttgggacgggaatttacacattatagactgtaataaaacctctttggaaatgtttggcctgtcaagtaaaaaagaatattttgaaatgtttgatttgctctcgccggagcgccagcctgacggttcaatttcaaagataaaaggttttgaattattaagagaaacgctggagacgggttttaaccgttttgaatggctgcatcaaaagccggacggggagccaataccgtgcgaacttacgcttatccggactaaatataaaaaagattatactatcatggcgtatgtgcgtgatttacgcgagcaaaagagaataatgaaaatgatggaatggcgcacgcaccttctggatatggttaacagcgccgcgactatccttttgtcaagcaataacgccggttcttttgaatcctcaatgatgagaagttttgagcttgtgggacactgtttggacgttgaccgcgttcagatttggcgcaatgaaatggttgaaaacgaaatgcactatgttctcagatatgaatggctcagcgaatacggcaaaaagtgcaagagcgttcccttggggcttcatttcccatacagtatgaaaaaagaatgggaagaactgtttttacgcggcgatcatataaatatgccgcttaaggatatgtcgcctgaggatcaggctttccttggatattacgaaatgaaatccatcgttatgatccccatgtttttggaaaacgaattttggggcttcttcagtattgacgactgcagaaacgagcgcgtgttttcaagcgaagaaataagcatattgtcttccgccggattaatgatgagcagcgccgtaaaccgttatatgcaaatgaataatatgcgcgaagccgacgagcgcatgcatataatgatcgacgcggccccgctttgcgcgattttctgggataaagatcttaaccctatagactgtaatcaagaaaaacgttaa

SEQ ID NO: 70468 - protein, 666 aa, Unknown
  Obtained from environmental sample
  SIGNAL (1)...(26)
  DOMAIN (478)...(622): GAF domain
  misc_feature (1)..(666): Xaa is any amino acid
MMSLLRITKTVFKKYAQVFAVFLAFALMVIFSYSFTSKKERVNLQDKVKDAISKTEANIKAELKEPETLLAGVSETLRAMLFDNRDADTVQGFIDHIDNYVQSESDKRMFGVIGFYAVFDIFDGKFMTGSKTWEKPENFDPKSLPWYTEAVKADGDIAITQPVVDKSSGKVSLSFSRRISDDEGHPFGVIALDIYLDKIKQEAINTRFTKDGYGFLLDDETEVIVHPEPWMLGLLLNEVKSNISAYSDELQRTGSVSEAVTADYRGIQSIVFMQRLYNGWYMGVVTPRDNYYQSTRHLAVILSAFGVVFAVLLGWMLLTISSGKAASDERIQLMSDSNPIGMSFWDGNLHIIDCNKTSLEMFGLSSKKEYFEMFDLLSPERQPDGSISKIKGFELLRETLETGFNRFEWLHQKPDGEPIPCELTLIRTKYKKDYTIMAYVRDLREQKRIMKMMEWRTHLLDMVNSAATILLSSNNAGSFESSMMRSFELVGHCLDVDRVQIWRNEMVENEMHYVLRYEWLSEYGKKCKSVPLGLHFPYSMKKEWEELFLRGDHINMPLKDMSPEDQAFLGYYEMKSIVMIPMFLENEFWGFFSIDDCRNERVFSSEEISILSSAGLMMSSAVNRYMQMNNMREADERMHIMIDAAPLCAIFWDKDLNPIDCNQEKR

SEQ ID NO: 70469 - DNA, 711 bp, Unknown
  Obtained from environmental sample
  misc_feature (1)..(711): n is a, c, g, or t
atgaatgatttttcatgtttaagccgagaaatggaagaaacaaaaaataaaagccgatttcttccgcagggaaaaacagcggcggttcaattcgcgccggcgggacaaagcactcagcttattgtcggagctacaaacgaggacgacaggcagatcatcaatttgacaagttcgctttacaataaattttctttaaagcgggtgtactactccgctttcattcatccgggcagtatcgcggacaaagaaaatatttttgaccctcgcctgcccgaaacttcaagtccgcctttagtcagggagcatcgcttgtatcaggcggattggctcttgcgcttctaccattttgaagccggtgaaattctaacggaagaacagccattccttgacgcgcatatcgatcctaaaacagcgtgggcgttaaaaaatcttgatttcttccccatcgaagtaaacagcgcggattacgaaaccttactgcgaattccgggcataggcgctaaaacggcgaggcgtataatagagagcaggcgttcgcgcaatttaacaatagagaaccttcacagaatgggagcgacgctgaaacgcgcccgttactttttatccgcaggcggcgcgtatatcgaacgtcccgacgaccctgtccgtatccgccgtttgctctcggacgcggacggcgcggggcttcaactgccgctttttgagttttaa

SEQ ID NO: 70470 - protein, 236 aa, Unknown
  Obtained from environmental sample
  DOMAIN (147)...(176): Helix-hairpin-helix motif
  misc_feature (1)..(236): Xaa is any amino acid
MNDFSCLSREMEETKNKSRFLPQGKTAAVQFAPAGQSTQLIVGATNEDDRQIINLTSSLYNKFSLKRVYYSAFIHPGSIADKENIFDPRLPETSSPPLVREHRLYQADWLLRFYHFEAGEILTEEQPFLDAHIDPKTAWALKNLDFFPIEVNSADYETLLRIPGIGAKTARRIIESRRSRNLTIENLHRMGATLKRARYFLSAGGAYIERPDDPVRIRRLLSDADGAGLQLPLFEF

SEQ ID NO: 70471 - DNA, 792 bp, Unknown
  Obtained from environmental sample
  misc_feature (1)..(792): n is a, c, g, or t
ttgagttttaatatgagaataaatcttaataaactgtttttaagtctggacaatccagcatttgtcattgacgaagaaatattactcaatcttgcatcggaagaaaaagaacatcaatttgaaacggaagatattaattttgccgcggcttatttctccaataagtttaacgcgtctttgcttgaaggagcggcgcaaagcctctttgaaatatcatctaacgcattagacaacatcatgctcgcgtggctcagcgaacttccggtagaaagggaaataatcgcctacggcagaggggttttagccgccgcccatgattttaacaatttagatgataaacgccgcgccgccggaagagcggcaaataaccgcacaaactccgacgcgttaacggtgctaactacggcatataaagtgcagattgaggttcacagaatgatgggacttttgcggttttccgtgaatgaaagcggcgagtttatcgcaaggtgcgaacctgatcattttatccttccctgtcttggagacttttttaccgcccgttttggggacaccccctggacaattattgacgaaaaaaggggactggctttgcgccgcaaaccgcgaggacaggcaaaaatcattgttttggaagaatacggcgaagacattcccgccgccgggcgcgatgaatgggaagagctttggaagcactaccacaaaacaattaacaatgaagaccgcgaaaaccgcgatttacagcgccaactcatgccaaaacgttactggaagcacctgcctgaagtgtag

SEQ ID NO: 70472 - protein, 263 aa, Unknown
  Obtained from environmental sample
  misc_feature (1)..(263): Xaa is any amino acid
MSFNMRINLNKLFLSLDNPAFVIDEEILLNLASEEKEHQFETEDINFAAAYFSNKFNASLLEGAAQSLFEISSNALDNIMLAWLSELPVEREIIAYGRGVLAAAHDFNNLDDKRRAAGRAANNRTNSDALTVLTTAYKVQIEVHRMMGLLRFSVNESGEFIARCEPDHFILPCLGDFFTARFGDTPWTIIDEKRGLALRRKPRGQAKIIVLEEYGEDIPAAGRDEWEELWKHYHKTINNEDRENRDLQRQLMPKRYWKHLPEV

SEQ ID NO: 70473 - DNA, 1215 bp, Unknown
  Obtained from environmental sample
  misc_feature (1)..(1215): n is a, c, g, or t
ttggaatacaatctttcccttaaaaagagcgagattgaccttgcggcaagcggctactcggaaaaaaatctttggtcggaaatttttccgtctatcagcgccagcgcaggcacagggtacagaaaaagtcttttcagcgatattcctcttaacaatgaaggttctaattacagtttaggctttagcgttactctcggcatgaacgccggtattccgtatacaatgaaaaatattaaattggctcatcaggggaatattttaaaatacgaagacgcgaaaaatcagctttcgattcaaattaccaaattattttattcgcttaccgcggagaagaataatattctgctccttgaagaaatttttaaccttgcgcaaagacaatatacaagaagcgaagtttcattcaggaacgggctggtgggggaactttcccttacgcagagcagtctcgctctggaaaacgcgcggtacaatcttaacacggcgaaaacagcccacaaaaacaatatgtcggactttcttgcaatgcttggattgtccgacgaagatataacattgtcaggtgaatttaagatagtaaagattgacgccgacgcggaagcgcttataaatgattatcttcccaaacgtcccgacatcataagggcgattcaggagattgaaaggcttacgattacgcaaaagcaaaccttactgcaaactaaagccccttctttgaatttatcggttgattggaacacttcctcttctgagccttatgaaaacccttttaccgactcagtaagcgctaccgcgcgtatcagcataccgattgacccgtggattccgggtacaacaaaattccaaaacgtttcaaaagcttccgactcgacaaaaaaggcaaaacttgatctttcagcggcggaaaattccgcaaaaactcaaatacgctctctttgctcccaacttcgcaattcatgggacaatatattgattgcccgtcttagctttaccgcggcgcagagaagttatcagctaacagaacagggttttaataacggaactgttgaattgttaactttgcaggacgcgcgtaacaatatggcaaacgtaagacagcgtttattgcaggcggaactttcatattttaatatgattcttgatctttcgtccgccttgaatatcgactggaaaaatcttattcaaacttttggagtatcaagtgaagaaaactaa

SEQ ID NO: 70474 - protein, 404 aa, Unknown
  Obtained from environmental sample
  DOMAIN (199)...(387): Outer membrane efflux protein
  misc_feature (1)..(404): Xaa is any amino acid
MEYNLSLKKSEIDLAASGYSEKNLWSEIFPSISASAGTGYRKSLFSDIPLNNEGSNYSLGFSVTLGMNAGIPYTMKNIKLAHQGNILKYEDAKNQLSIQITKLFYSLTAEKNNILLLEEIFNLAQRQYTRSEVSFRNGLVGELSLTQSSLALENARYNLNTAKTAHKNNMSDFLAMLGLSDEDITLSGEFKIVKIDADAEALINDYLPKRPDIIRAIQEIERLTITQKQTLLQTKAPSLNLSVDWNTSSSEPYENPFTDSVSATARISIPIDPWIPGTTKFQNVSKASDSTKKAKLDLSAAENSAKTQIRSLCSQLRNSWDNILIARLSFTAAQRSYQLTEQGFNNGTVELLTLQDARNNMANVRQRLLQAELSYFNMILDLSSALNIDWKNLIQTFGVSSEEN

SEQ ID NO: 70475 - DNA, 1260 bp, Unknown
  Obtained from environmental sample
  misc_feature (1)..(1260): n is a, c, g, or t
ttggagtatcaagtgaagaaaactaaaattattactattgcgataatttcgcttattgcgttatttgctatcctaattctgcttaattttctttttcccggaaaagcaaaaaccccgggacaggcgcaggcaggcggtcccgccgccgcaaacagttcaggcggcggaaacgcaaatagacccgcctcagcaaacggttcggagagcggtaactcgaacagatccggcagaagcggcggatcagacagttcaggcggagctgataatgctccagccaatagcggcagagcgggtaatgccgacggttccggcagggcggacaactcaggcggtcagggcgatcaaggcagttccggcagagcgggtaataccgacggctccggcagggcgggaaactcaggcggtcaaggaggagcaggtaattcgggcgcaaacgccggtcgccaaggcggtcccggcggcggctcttcgcgtaacgttacgacggttcgcgttacgcctgtttccacaagcactatcgaaaaaagcgtaatcattaacggcgaaatattggcgcgtaatcaagtaacgattttccccaccatcggcggaaaacttgtagagacaaggctcggcataggggacagggtttcaagcggacagattgtcgcgatggtagacccgtcaagacccggagaagtttattcgcgaagccctgtcgtctccacggtgtcgggaacagttatacaggctcccttcagtataggcgatacgctcacaacgcagtcggcagtctatatagtgggagacctttcttcgctgttagttgaaacctttgtgccggagagatttgtagcgtccgtcagacagggaatgcgcgcgcagttgaaacttgaggcaatagccggcgaatcatttgacgccgaagttatcgaaataaacccggtgctagaccccgcaagcagaacattaaaaatacgcctgcggtttgtaaagcccgaccctcggataaaagccggaatgttcgccactatcagccttgtaacaaatcgtaaggtcgatgtcccggtcattcaaagaacttccgtaataaacacctatggttcatggattgtttttgtcgtggacgaaaacagcacagcaaggcggcgggaagtaacattagggcttgaaaacgaagatttttttgaaatcttaggcggcttgagtttggatgataaagttgtaagcgccggacagaactttctttccgacggcgatcctgtaagggttgtggactaa

SEQ ID NO: 70476 - protein, 419 aa, Unknown
  Obtained from environmental sample
  misc_feature (1)..(419): Xaa is any amino acid
MEYQVKKTKIITIAIISLIALFAILILLNFLFPGKAKTPGQAQAGGPAAANSSGGGNANRPASANGSESGNSNRSGRSGGSDSSGGADNAPANSGRAGNADGSGRADNSGGQGDQGSSGRAGNTDGSGRAGNSGGQGGAGNSGANAGRQGGPGGGSSRNVTTVRVTPVSTSTIEKSVIINGEILARNQVTIFPTIGGKLVETRLGIGDRVSSGQIVAMVDPSRPGEVYSRSPVVSTVSGTVIQAPFSIGDTLTTQSAVYIVGDLSSLLVETFVPERFVASVRQGMRAQLKLEAIAGESFDAEVIEINPVLDPASRTLKIRLRFVKPDPRIKAGMFATISLVTNRKVDVPVIQRTSVINTYGSWIVFVVDENSTARRREVTLGLENEDFFEILGGLSLDDKVVSAGQNFLSDGDPVRVVD

SEQ ID NO: 70477 - DNA, 816 bp, Unknown
  Obtained from environmental sample
  misc_feature (1)..(816): n is a, c, g, or t
atgaaaggcaaaaaagtggaaaggcgcttcggctgggactgccatggccttcctatcgaaaccctgattgaagaagagcttaaacttaactctaaaaccgatattgaaaaattcggcgtggcgaaattcaacgaagcctgccgcgcctctgtattgcgttatgtaaaagaatggcggcaaaccatcacccgcttaggccgctgggtagattttgacaacgactataaaaccatgaactcggattatatggaatcaatatggtgggtcatgaaaaccctctgggaaaaaggactcctatacgaaggccactacattctcccgtactgcccccgctgttccacagttttgtctaaccacgaactcaatctcggcggttataaagatgtacatgatcccgcgattaccgtacgattcaaggttttagggaatggggagttgggagtagggagtagggaaggtgcctcgaaactcctaatacctcctaacacttacttactggcgtggacaactactccctggactctgccttcgaacctagccctaactcttggttccgacattgattatgttttaatcgaagacatccccactccccactccccacaccctactccccatgatcactacatattggcggaagctcgcctgcccgcgtactacaaaaatgataccgaatataaaatcgtatggcgcaaaaaaggagcggaactcaaaggcattcaatacgagccgctgttcccttacttcaagatgcgcctaacgccttccgcaccttcctcggcgattttgttacaaccgaagacggcacaggcatag

SEQ ID NO: 70478 - protein, 271 aa, Unknown
  Obtained from environmental sample
  DOMAIN (1)...(271): tRNA synthetases class I (I, L, M and V)
  misc_feature (1)..(271): Xaa is any amino acid
MKGKKVERRFGWDCHGLPIETLIEEELKLNSKTDIEKFGVAKFNEACRASVLRYVKEWRQTITRLGRWVDFDNDYKTMNSDYMESIWWVMKTLWEKGLLYEGHYILPYCPRCSTVLSNHELNLGGYKDVHDPAITVRFKVLGNGELGVGSREGASKLLIPPNTYLLAWTTTPWTLPSNLALTLGSDIDYVLIEDIPTPHSPHPTPHDHYILAEARLPAYYKNDTEYKIVWRKKGAELKGIQYEPLFPYFKMRLTPSAPSSAILLQPKTAQA

SEQ ID NO: 70479 - DNA, 2301 bp, Unknown
  Obtained from environmental sample
  misc_feature (1)..(2301): n is a, c, g, or t
atggcgcaaaaaaggagcggaactcaaaggcattcaatacgagccgctgttcccttacttcaagatgcgcctaacgccttccgcaccttcctcggcgattttgttacaaccgaagacggcacaggcatagtgcataccgcccccggattcggcgaagacgacgcccgagtactcaaaggaacaggcatacccgttatctgcccggtagacgccgaatgccgcttcactcaggaagttcccgattttgcgggcgtgtttgtaaaagacgccgacaaagcaatcatcgaaaaattaaaaaacgaaggtaaacttgtaaagagagatcaaatacttcactcttatccgcattgctggcgctgttccagccccctcatttaccgcgcagtaggctcatggtttgtcagcgtagaaaaaataaaaaaagatatgttagacgcaaacagccaaatatattggatacctgaacacatcaaagaaggcagattcggcaaatggctggaaggcgcgcgtgattgggcaatcagccgaagccgctattggggaaacccattgccgatatggcgatgccccgactgcggaaaaacaatctgcgtcggaagccgagccgagttgaaagaattatcgggcgtataccccgacgaccttcataagcattttgtagatgaaataaaaatcccctgctcctgcggcgcaaaaatgacacgcgttcccgaagttttagactgctggtttgagtcaggagcaatgccttatgctcaaaatcattatccgtttgaaaacaaagaattttttgacagccatttcccctcggattttatcagcgaagggttggatcaaacacggggctggttttacaccctaacagtccttgcggcggcgctccttaaaaaacccgcatttaaaaactgcatagtcagcggactagttcttgcgagcgacggcaaaaaaatgagcaaaagccttcgcaactacacagacccaaacgaagtaataaattccttcggcgctgacgcgttacgcctttttcttgtacactcggcggtagtaaaagccgacgaccttcgctacagcgatgacggcgtgcgtgaaataatgaaaagcataatcattccattgtggaacgcctacagtttttttgtaacttacgccaacatcgacaaaatcaccgctacaggcgcgcctgaaaaaccatccaatcctctggatcaatggatactttcagagacgcaaaccttagtagaaaaagtaagcgccgctcttgacgcctacgacctaagtcgcgccgtcgatccaattctgcgtttcatagaccttttgaacaactggtacatacgccgctcacgccgccgtttctggcgcagtgaaaatgacagcgacaaactcgaagcctacggcgctctctacgaggctcttaaaacgttaataacagtcgcctctcctttcatgccgtttaccacagacgctgtctggcaaaatctgcgcctgaaagacgatcccgaatcggtgcatttaaccgactatccttcacctaacgcaaaacgccgagacagcgatcttgaattccgcatggcggcggtaatgtcagccgtttcaatcggacgctcgcttcgttcccagtacaatatcaaaatgcgccagccgcttcgcaaggcggaacttgttacacgcaacgaagaagagaaaaaagccctgctcggcatggcggacataatccgagaggaactgaacgtaaaagaggtagtattttcagataacgaagaagatttggtagagtacgaagtaaaagccaacttccgtgtattgggaaaagaacttgggaaagacatgaaatccgccgccgccaaaatagaagccctaacccacgcggaaattcaaaaaatcgtgcaaggttcgccgctttccataaacgtcccctgcgaaggcggcgatagagcgcttgtaataacagccgacaaactcgacattcgccgaatagaaaaagcgaacctgcgtgttcttaacgaaggcacactcacagtcggacttgatacggaaataaccagagaactttcaatggaaggcgacatccgagacctgattcgaggcatacaaaacgcccgcaaagaaatgggcttgtctgttaccgaccgcatagaattatgcgtacacggcgcggacaccttaaaagaagcatgggagaatttcggcaaatccgccgccgaagaaaccctagccgtaaaaacccaatgggcaaaaacagacggacaaatccccatagaagccggagaagaaacatggcaagtaaagatagtaaaagcgtaa

SEQ ID NO: 70480 - protein, 766 aa, Unknown
  Obtained from environmental sample
  DOMAIN (1)...(355): tRNA synthetases class I (I, L, M and V)
  misc_feature (1)..(766): Xaa is any amino acid
MAQKRSGTQRHSIRAAVPLLQDAPNAFRTFLGDFVTTEDGTGIVHTAPGFGEDDARVLKGTGIPVICPVDAECRFTQEVPDFAGVFVKDADKAIIEKLKNEGKLVKRDQILHSYPHCWRCSSPLIYRAVGSWFVSVEKIKKDMLDANSQIYWIPEHIKEGRFGKWLEGARDWAISRSRYWGNPLPIWRCPDCGKTICVGSRAELKELSGVYPDDLHKHFVDEIKIPCSCGAKMTRVPEVLDCWFESGAMPYAQNHYPFENKEFFDSHFPSDFISEGLDQTRGWFYTLTVLAAALLKKPAFKNCIVSGLVLASDGKKMSKSLRNYTDPNEVINSFGADALRLFLVHSAVVKADDLRYSDDGVREIMKSIIIPLWNAYSFFVTYANIDKITATGAPEKPSNPLDQWILSETQTLVEKVSAALDAYDLSRAVDPILRFIDLLNNWYIRRSRRRFWRSENDSDKLEAYGALYEALKTLITVASPFMPFTTDAVWQNLRLKDDPESVHLTDYPSPNAKRRDSDLEFRMAAVMSAVSIGRSLRSQYNIKMRQPLRKAELVTRNEEEKKALLGMADIIREELNVKEVVFSDNEEDLVEYEVKANFRVLGKELGKDMKSAAAKIEALTHAEIQKIVQGSPLSINVPCEGGDRALVITADKLDIRRIEKANLRVLNEGTLTVGLDTEITRELSMEGDIRDLIRGIQNARKEMGLSVTDRIELCVHGADTLKEAWENFGKSAAEETLAVKTQWAKTDGQIPIEAGEETWQVKIVKA

SEQ ID NO: 70481 - DNA, 393 bp, Unknown
  Obtained from environmental sample
  misc_feature (1)..(393): n is a, c, g, or t
atggcaaaattgagtcttaacgacttaagaaaattaagagaagaaaaaaaagccgaatttaacaaggttaaaaccgacggcaaagagattcagattgttatcggtatgggaacttgcggtatagccgccggggcgaaacaggctctggaagcgtttaataacgaaataaaagaaaaaaaacttacaaattgccgcgtaaagcaaaccggctgtatggggttgtgccattcagagccgaccgtagaaattatagttccgggtatggctcccgtaatttacggcatggtggactcggaagtaacaaaatcgatcattcaaaaacatataatcggcaaggaattgttaaacgattatattttggaacgtcctgccgctgatattttggcttcttaa

SEQ ID NO: 70482 - protein, 130 aa, Unknown; identical to SEQ ID NO: 26728
  Obtained from environmental sample
  misc_feature (1)..(130): Xaa is any amino acid

SEQ ID NO: 70483 - DNA, 324 bp, Unknown
  Obtained from environmental sample
  misc_feature (1)..(324): n is a, c, g, or t
atggcaaatactaataaacagcttcgcgtcgtgcttcgcaactgcggcgtgattgatcctgaaagcatcgacgaatatattgcgcgcgacggctacctgggtcttgaaaaagttctctttgactggacatccgaacaagtaattgaggagatgaaagtatccggtcttcgcggaagaggcggcgcaggtttcccgacatggttaaaatgggatttggcgcgcaaagccgcgggcgacgaaaattcgttatctgcaacgcggacgaaggcgatccgggcgcttacatggatcgatccacaattgagggcgacccccactctgtaa

SEQ ID NO: 70484 - protein, 107 aa, Unknown
  Obtained from environmental sample
  misc_feature (1)..(107): Xaa is any amino acid
MANTNKQLRVVLRNCGVIDPESIDEYIARDGYLGLEKVLFDWTSEQVIEEMKVSGLRGRGGAGFPTWLKWDLARKAAGDENSLSATRTKAIRALTWIDPQLRATPTL

SEQ ID NO: 70485 - DNA, 1296 bp, Unknown
  Obtained from environmental sample
  misc_feature (1)..(1296): n is a, c, g, or t
atggttaaaatgggatttggcgcgcaaagccgcgggcgacgaaaattcgttatctgcaacgcggacgaaggcgatccgggcgcttacatggatcgatccacaattgagggcgacccccactctgtaattgaaggcatgataaccgcgggcaaggcaatcggttcacatcaggggtttgtttatattcgcgccgagtatccgcttgcgattgaacgtttaaaaatagccattaatcaggcgcgcgaatacggactgataggaaaagacatcctaggttccggttttgattttgatatagaaatccgtctcggcgcgggcgcgtttgtctgcggcgaagaaaccgctcttattaaatccgtagaaggcaatcgcggaatgcccgtaccaaaaccgccgtttccggcgaataaaggtttgtggcagaagcctacaatcattaacaatgttgaatcgcttgcgaatgtacccgtcattaccgcgaagggcggcgcgtggcttgctaaaatcggtactgaaaaatccaaaggaacaaaagtattcgcgcttaccggaaaagttaaatattcgggacttgtcgaagttccaatgggcactacgttacgcgaacttgtttacgacgtaggcggcggaattaaagacgacaaaaaatttaagggagtgcagtcgggcggaccgtccggcggtattcttaccgaaaaatctcttgatgttccgatagactttgaatctttggtcgccaacggctcaatgatgggttccggcggtatgatcgtaatggacgaagacgactgcgtagtagacgtatcgcgcttctacatggaattctgcgtcgatgaaagctgcggaaaatgttctccgtgccggattggaaccacgcaaattttaaaaattctggaaaaaatcgccgagggcaggggacatgacgaagaccttgtaaagcttgaagctatcggtatggcgatgacaaaagcgtcgctttgtatgcttggctgtacggcggcaaacccgactatctctactcttaaaaatttccgcgaagaatacatagaacatatacacgataaaaaatgccgctccggcaagtgcagaaaacttgtcaaatacagcattgacgcttcaaagtgtatcggctgcggagcgtgcgcgaaaaaatgtccgggtaactgcattgtcgccgagaacgcgtcaagttatcccgataaaaaacgtccgccttacaggattaataacgctgaatgtataaagtgcggcgaatgtttggtttcatgtaaatttaacgcggtgataaaggcataa

SEQ ID NO: 70486 - protein, 431 aa, Unknown
  Obtained from environmental sample
  DOMAIN (406)...(429): 4Fe-4S binding domain
  misc_feature (1)..(431): Xaa is any amino acid
MVKMGFGAQSRGRRKFVICNADEGDPGAYMDRSTIEGDPHSVIEGMITAGKAIGSHQGFVYIRAEYPLAIERLKIAINQAREYGLIGKDILGSGFDFDIEIRLGAGAFVCGEETALIKSVEGNRGMPVPKPPFPANKGLWQKPTIINNVESLANVPVITAKGGAWLAKIGTEKSKGTKVFALTGKVKYSGLVEVPMGTTLRELVYDVGGGIKDDKKFKGVQSGGPSGGILTEKSLDVPIDFESLVANGSMMGSGGMIVMDEDDCVVDVSRFYMEFCVDESCGKCSPCRIGTTQILKILEKIAEGRGHDEDLVKLEAIGMAMTKASLCMLGCTAANPTISTLKNFREEYIEHIHDKKCRSGKCRKLVKYSIDASKCIGCGACAKKCPGNCIVAENASSYPDKKRPPYRINNAECIKCGECLVSCKFNAVIKA

SEQ ID NO: 70487 - DNA, 1317 bp, Unknown
  Obtained from environmental sample
  misc_feature (1)..(1317): n is a, c, g, or t
atgcgccgcttcaattataatgtgggaagtttggaaaaattatattataaatcaggctttttgatgaaaataaacgaaaaaaatgatttgactaacggaaacattttacaccgtctgttgtatcttgccgtacccatattaggctcgcaaacgcttctaatgttatataacttaaccgatatgttttggttaggccgtttgggcagcaaagaagtagccgcaacaggcgcggtcgggctttatttgtggatgtctgtcgcgtttatgctgttatgcagtgttggggcgagtattggggtatctcaggcatttggagcaaatgatataaataaagctaaatcatatacgcatacaagcctgtttttatgcatggttttcggtttattatacacggcagtaatgcttctttttcgttatcaattaataagtttttttaattttaaggaagaagatgtaaaaaaattagcagaggattacttatccgtcgtatccgtaacaataactcttacttttttatccgcaaccatgggagcggtttttacggcatcaggcaattcccgaactccgtttttatgtaatgtagtcggtacagtaataaatatggtacttgatcctatttttatattttccctcaaacttggcgtattaggggcggcttacgcgacaataatcggacaaaccgttgttttcattatgtttattgtattttttaaaataagcaagaagcgtccttttgaaagcattaaattatttaatgttccaaaatggaatgatattgtatggataattaaaaaagcgctgccggtaggagcggaaagttttctgtttacatttcttgtaatggcaacaacaaggcgtgaagctttttttggagccgaagcgattgcgttaagccgtataggctcgcaaatagaatcacttacatggttagtcggcggcgcttttggcaccgcgttggtttcgttcataggacaaaattacggcgcgaaaaaatggaatcgtatcagcgaaacattcaagatagcctctttagttatgtttctttacggcgcttttgttacgtttgtattggcggtgcccggcaagtatttatttgggttgtttttgcctgatcctgtgttaatagaacgcagtgttttatacctccgtatagttgcaatatgtcaaataccaatgtgcctggaagccgtttcaagcaattccttccgcggtttgggtaatacgctttcacccgctattataaacacaatctgcaatattttacgggtgccgtttgcttatatactgtcaatggaaatatttgggtttgttaaatag

SEQ ID NO: 70488 - protein, 438 aa, Unknown
  Obtained from environmental sample
  DOMAIN (268)...(428): MatE
  misc_feature (1)..(438): Xaa is any amino acid
MRRFNYNVGSLEKLYYKSGFLMKINEKNDLTNGNILHRLLYLAVPILGSQTLLMLYNLTDMFWLGRLGSKEVAATGAVGLYLWMSVAFMLLCSVGASIGVSQAFGANDINKAKSYTHTSLFLCMVFGLLYTAVMLLFRYQLISFFNFKEEDVKKLAEDYLSVVSVTITLTFLSATMGAVFTASGNSRTPFLCNVVGTVINMVLDPIFIFSLKLGVLGAAYATIIGQTVVFIMFIVFFKISKKRPFESIKLFNVPKWNDIVWIIKKALPVGAESFLFTFLVMATTRREAFFGAEAIALSRIGSQIESLTWLVGGAFGTALVSFIGQNYGAKKWNRISETFKIASLVMFLYGAFVTFVLAVPGKYLFGLFLPDPVLIERSVLYLRIVAICQIPMCLEAVSSNSFRGLGNTLSPAIINTICNILRVPFAYILSMEIFGFVK

SEQ ID NO: 70489 - DNA, 822 bp, Unknown
  Obtained from environmental sample
  misc_feature (1)..(822): n is a, c, g, or t
atgaacagactttttataaagacggaaaatgctgaatatcaaattattcaatcgctaaaactaaaccgaataaaacggaataagttacatgaaatatttattgaaggtatagaatgtataaaacaggcgataaattcaaacatagagattacccggataataattaataatatagacactttatcaaattggggaaaaaatgtaatagaacaatataaagacgtaaaaattattgaaatgtcaaataaactgtacaatgaattaactgataaaacaaatccgtctgaaatgttaataacggcaaaaatcaagcctgatacgtttgatgacattcaagaagaaaatccgtttattattttatttgacaggccaagcgattatggaaatttaggctctataattcgttcggcaaacgcttttaacgcggatggaatattcataatcggacatggaatagacatatatgagccgaaagttatcagggcaagcatgggaagcatattttttacaaaaatagtaacgatagaatctatagagacattggttgaatatattaaaaaacaaaaaacaagaaataacatggaaataatcggtactgattcctcgggaactgtatcaatagaagaatataaaataaaaagacctgtaatgattattataggaaatgaggcaaaaggcatgagtgtaaaattaaaggaattatgtgataaaattgtaaggatacccatagaaggaaatgtaaattcattgaatgtgtcatgcgccgcttcaattataatgtgggaagtttggaaaaattatattataaatcaggctttttga

SEQ ID NO: 70490 - protein, 273 aa, Unknown
  Obtained from environmental sample
  DOMAIN (116)...(261): SpoU rRNA Methylase family
  misc_feature (1)..(273): Xaa is any amino acid
MNRLFIKTENAEYQIIQSLKLNRIKRNKLHEIFIEGIECIKQAINSNIEITRIIINNIDTLSNWGKNVIEQYKDVKIIEMSNKLYNELTDKTNPSEMLITAKIKPDTFDDIQEENPFIILFDRPSDYGNLGSIIRSANAFNADGIFIIGHGIDIYEPKVIRASMGSIFFTKIVTIESIETLVEYIKKQKTRNNMEIIGTDSSGTVSIEEYKIKRPVMIIIGNEAKGMSVKLKELCDKIVRIPIEGNVNSLNVSCAASIIMWEVWKNYIINQAF

SEQ ID NO: 70491 - DNA, 1206 bp, Unknown
  Obtained from environmental sample
  misc_feature (1)..(1206): n is a, c, g, or t
ttgtgcatatttataagtaatcgtacaatataccttagggagacagttatgttatcagttgcaataatcggtacgggcaatatttccgtacaacatataaacgggtatcttgcttttccaggtcgttgtaaaattacccgtcttgtcgatattttcccggaaaaggcggaaaagaaaaacgctgatttcaagcttggcgcgaaagtcagcgcgtcccacaaggacattttgaacgcggacgacattgatctcgtgagtatctgcacacctcctttctgccacgcgcaaatcgccgttgactttcttaacgcgggaaaaaatgtgcttgttgaaaaaccgatggccgcctctctggaagaatgcgatgcgatgatcagcgccgcggaaaaaagcggtaaaatgttttccgtaatcgcgcaaaatcgcttccgcgatccaatctccggtttaaaaaaagttctggactcggaattgattggaaaggtggtgcacgcgcaggttgattccctgtggtggcggggacattcctactacgatttgtggtggcgcggcacttgggaaaaagaaggcggcggctgtaccctgaaccacgctgtccatcatattgatatgctgtgctggatgcttgggcttcccaaaagcgtaaacgccgttataagcaacgcttcccatgacaacgcggaagtggaagatgtttccgtcgcggtacttcggtacgagggcgggctgtgctcaaacggcgctctggcgcaggttacaagctctgttattcaccacggcgaagagcagcagcttgtctttcagggggagaaggcgcgcgtttcgtggccctggagagtggcggctaatatcgcccaaaccaacggctttccggcaggggagcagaacacggcgctgataaagcaattagatgattattacggtgctttgccgaagcttgcctatacgctgcacgaagggcagatagatgacgtattgtctgcgcttgagaccggcgcaaagccggcgattagcggcgaggacggaaagcgcacaatagagcttatttccgccatttacaaggccggcacggaacagcggactgtagaactgcccttgcgaaaagacgactctttctacactgttaaaggcattatggagaaggttccccgtttctatcaaaaaaccgtgtctgtgaacgaacagggcggcagtatcatgttttag

SEQ ID NO: 70492 - protein, 401 aa, Unknown
  Obtained from environmental sample
  DOMAIN (151)...(267): Oxidoreductase family, C-terminal alpha/beta domain
  misc_feature (1)..(401): Xaa is any amino acid
MCIFISNRTIYLRETVMLSVAIIGTGNISVQHINGYLAFPGRCKITRLVDIFPEKAEKKNADFKLGAKVSASHKDILNADDIDLVSICTPPFCHAQIAVDFLNAGKNVLVEKPMAASLEECDAMISAAEKSGKMFSVIAQNRFRDPISGLKKVLDSELIGKVVHAQVDSLWWRGHSYYDLWWRGTWEKEGGGCTLNHAVHHIDMLCWMLGLPKSVNAVISNASHDNAEVEDVSVAVLRYEGGLCSNGALAQVTSSVIHHGEEQQLVFQGEKARVSWPWRVAANIAQTNGFPAGEQNTALIKQLDDYYGALPKLAYTLHEGQIDDVLSALETGAKPAISGEDGKRTIELISAIYKAGTEQRTVELPLRKDDSFYTVKGIMEKVPRFYQKTVSVNEQGGSIMF

SEQ ID NO: 70493 - DNA, 546 bp, Unknown
  Obtained from environmental sample
  misc_feature (1)..(546): n is a, c, g, or t
atgactgtccccgcgtcggtattccgtttccagccgcccaaagaggctcaggagatgttgaagaagatggttgacgagcggaaagcggcgagggacggcggcgcgggcgggatggacggagggatgtttcaggacgccggcggcgggagcgggatgatgaaggctgtgatgaaaggcgacggcggcgataggggcggcggacaatttaggatggacggggaacgccgtaaaaacggcggcgacggacgcggcgagggccgtcgtgagggcggtcagggcgggggagggaagaggccgccggcaggcgtcatgggcagccgcggagttttgtggacgttggacgaaaacggcgcgttcaagccggtgttcgtgaagatagggctgagcgacggcgtgacaaccgtagttaccggaatggatgatttgaccgaggggatgaaagttgtggttggagaagtacggagcgacaaggacaagaagccgtcggataagaagaaacagaataatccgttgacgccgggcgggggcgggccgaggaggatgtaa

SEQ ID NO: 70494 - protein, 181 aa, Unknown
  Obtained from environmental sample
  misc_feature (1)..(181): Xaa is any amino acid
MTVPASVFRFQPPKEAQEMLKKMVDERKAARDGGAGGMDGGMFQDAGGGSGMMKAVMKGDGGDRGGGQFRMDGERRKNGGDGRGEGRREGGQGGGGKRPPAGVMGSRGVLWTLDENGAFKPVFVKIGLSDGVTTVVTGMDDLTEGMKVVVGEVRSDKDKKPSDKKKQNNPLTPGGGGPRRM

SEQ ID NO: 70495 - DNA, 1335 bp, Unknown
  Obtained from environmental sample
  misc_feature (1)..(1335): n is a, c, g, or t
ttgcagaatatagccggcgcttattggcgaggcgatgaaaaacgccccatgcttacacgcatttacggaacagcgtgggaaaatcccaaagacttaaaagcccaccttgcgtttcttgaagaagttgaaaaaagagatcaccgccgcttgggcaaagagatggacctttattcgatacacgaagaagccggagcgggacttatatattggcatccgcacggcggcagaatgagagtcgcccttgaggatttttggcggcaggaacattttcgcaacggttacgaaatactttacacgccgcacatcggcaaaagctggctttgggaaacatcggggcatcttggtttttacaagggaaatatgtacagccccatggaaattgacaatcaggattattatataaaaccgatgaactgcccgttccatattttaatttacaataacaaaggacactcttaccgtgatctgccccttcgctgggcggaactcggaacagtctaccgctatgaacgttcaggcgttttgcacggactccttcgtgttcggggcttcacacaagacgacgcccacatcatctgtacgcccgaacaaatggaaagcgagatacgtgaagttttacgtttcagtttaatgatttggaatgttttcggttttaaggaaataaaggcgtaccttgcgaccaaacccgccgaatcggtcggcgagcagagcaaatgggacgccgctttggaaagtttgcgtaacgcaatcagcgccgagggaatgccctacgagattgacgaaggtggcggagcgttttacggaccgaagatcgatattaaaattaaagacgcgctcggaagagagtggcagatgtctacaattcagtttgattttaacgaacccgaacgctttgacatgacatttgtcgataccgacggacagcacaaacgcccctacatgatacaccgcgcgcttttcggcagtatcgaaagatttttcggcgtacttatagaacactttggcggtgcgttccccgtttggatcgctcccgaacaggcggcggttatccccgtttcggaagtgtttaatgaatatgctcaaaaagccgccgccgctcttaaatcgcgcgatttgcgtgtaacggcggagttaggcgacgagcgcatgaacgcaaaaatccgcgactgccaaacgcggaaaattccctatatgcttgttgtaggtcagcgtgaagccgatgaaggaacggtatcaattcgtctgcgcgacggaaaacagcttgaagctatgaagattgaagattttgccgaatatgtacataaaaaaatagagagtaaatctttggagttgtag

SEQ ID NO: 70496 - protein, 444 aa, Unknown
  Obtained from environmental sample
  DOMAIN (346)...(436): Anticodon binding domain
  misc_feature (1)..(444): Xaa is any amino acid
MQNIAGAYWRGDEKRPMLTRIYGTAWENPKDLKAHLAFLEEVEKRDHRRLGKEMDLYSIHEEAGAGLIYWHPHGGRMRVALEDFWRQEHFRNGYEILYTPHIGKSWLWETSGHLGFYKGNMYSPMEIDNQDYYIKPMNCPFHILIYNNKGHSYRDLPLRWAELGTVYRYERSGVLHGLLRVRGFTQDDAHIICTPEQMESEIREVLRFSLMIWNVFGFKEIKAYLATKPAESVGEQSKWDAALESLRNAISAEGMPYEIDEGGGAFYGPKIDIKIKDALGREWQMSTIQFDFNEPERFDMTFVDTDGQHKRPYMIHRALFGSIERFFGVLIEHFGGAFPVWIAPEQAAVIPVSEVFNEYAQKAAAALKSRDLRVTAELGDERMNAKIRDCQTRKIPYMLVVGQREADEGTVSIRLRDGKQLEAMKIEDFAEYVHKKIESKSLEL

SEQ ID NO: 70497 - DNA, 819 bp, Unknown
  Obtained from environmental sample
  misc_feature (1)..(819): n is a, c, g, or t
atggacaggcatgtgaagatactggattttttagcaactaacaaaaccgtaaagatttcccttcttgccgaaatacttgatgtctcaaacgtaacattgcgcaaagatttagatagtctcgaaaaacgtggcataatccgcaagacgcacgggtacgcaagccttgacggcgcagacgatacgggcaaacgcatggcgtttaaccattcaatcaagcgaagaatagccaaagcctcggcgcagttagttgacgaaggcgaaacaataatgctggagtcgggttcatgctgtgcgttattcgccgaagaacttgcccttgccaaaaaaaacgttacgataattaccaattcgatattcatagccaattatgtttgtaaaatgcaaaacataaaaatcatacttctcggcggatattttcagcctgaatctcaagttttggtaggaacaataacgacaaattgcgccgaatcattttttatagacaaattttttctgggcgcagacggatttattgcggggcagggcttcacgggaagggatcatcttcgtgttgaaacagcgttaaaactttcacagcgcgcaaaaaagatttatgtactgacggaagccgaaaaattcaaacgccgtggagcgtacaatttaatcacgctagataaattgacgggcattttcaccgacgacagtatccccaaagacgccgaagcagatttgcaaaagaacaatgtgcaagtttacaaagtgccgtcggtagaggaagttatcaaatggcggcatttccccggtcacccgcctattatgtacaaagagaaagatgagtaa

SEQ ID NO: 70498 - protein, 272 aa, Unknown
  Obtained from environmental sample
  DOMAIN (3)...(53): HTH domain
  misc_feature (1)..(272): Xaa is any amino acid
MDRHVKILDFLATNKTVKISLLAEILDVSNVTLRKDLDSLEKRGIIRKTHGYASLDGADDTGKRMAFNHSIKRRIAKASAQLVDEGETIMLESGSCCALFAEELALAKKNVTIITNSIFIANYVCKMQNIKIILLGGYFQPESQVLVGTITTNCAESFFIDKFFLGADGFIAGQGFTGRDHLRVETALKLSQRAKKIYVLTEAEKFKRRGAYNLITLDKLTGIFTDDSIPKDAEADLQKNNVQVYKVPSVEEVIKWRHFPGHPPIMYKEKDE

SEQ ID NO: 70499 - DNA, 570 bp, Unknown
  Obtained from environmental sample
  misc_feature (1)..(570): n is a, c, g, or t
atgaggcggcgtatcaaaaggagcggcgcatctatgaattttcgccagatcaacgcgaacggaaaaacaaagcggctggaggacagggtaaaaccgtatcaagtcccgttccgccacttatgcaatttaattcagatagcggacggcgatattgaaaaaacactcgccgacatttccgctaacgacagcaatttacagaaagagcaaattccctcgttaaaaacacgagccgagcgggcgaaatactgggtagaaaactgcgcgcctgaagaattccgttttaagttactgccggaaggaagcgcggtaaattcttctttctcggagacggaaaaaaacgctgtgcgcattcttcgcgacgatgttatcctcaatatagaaactttttccgacgataaaatctgctcctcggcgatttacgccgcagcggaaaaagcgggtgttgacggcaaagctctttttaccgccgcttatcaggcgttgattgggaaagatcagggaccgaggcttgcgaattttttaagatcgatagacaagcagaggttgctggggatacttaaaagctattaa

SEQ ID NO: 70500 - protein, 189 aa, Unknown
  Obtained from environmental sample
  misc_feature (1)..(189): Xaa is any amino acid
MRRRIKRSGASMNFRQINANGKTKRLEDRVKPYQVPFRHLCNLIQIADGDIEKTLADISANDSNLQKEQIPSLKTRAERAKYWVENCAPEEFRFKLLPEGSAVNSSFSETEKNAVRILRDDVILNIETFSDDKICSSAIYAAAEKAGVDGKALFTAAYQALIGKDQGPRLANFLRSIDKQRLLGILKSY

SEQ ID NO: 70501 - DNA, 1047 bp, Unknown
  Obtained from environmental sample
  misc_feature (1)..(1047): n is a, c, g, or t
atgggtcagcattcggcacgaggacgcgcttttatttattcatgggacgattacgacgtgttccgtaaagtaccgaaaaatatgccgaaacaacaggagcttgaaaactgtctgcgtattcctatcactatggttcctgatccgtgggagcgggattcaagctatgcccgtcatcacgaagttgatgttgaaagcaaactgccggaagtcgggatttttcctgagtacatttatcaggcggaacgttaccgctcttcccgttacgcgcaaggcataagaaaagcgcttgaaaagagggatgcgcttaaagagattctggacaaattccgggatgaagatcataagattcagggcgaatggtggcctgtcagcgttttttgcgaaaaatgtaataaggacgaaaccgagattgaaggctgggacggtgattgggggttaagttacaagtgtaataagtgcggcaataaggagacgctggacatacgaaacgcaaaaggcgttaagctgtcatggcgaatcgactggccgatgcgctgggaatacgaaaaagttgattttgagcccgccggtaaggatcaccactgccaaggcgggagttttgataccgcgcgtcacgtttgcaaggacgtgtatggttgggacgctcctgtcactttccgctatgattttatcggttccaaggggcatccgggaaagatgtcttcatcgtcaggtaacgtaatcactcttgacaacgtgcttaatgtttacacgccggaagtaacgcgttatttgttcgcgggaacaaggccgaatacggaatttacaatttcatttgatcttgatgtgataaaaatttacgaagactacgacaagaccgaacgtatcgcgtggaaaacagagcaggcaaaagatgaggcggcgtatcaaaaggagcggcgcatctatgaattttcgccagatcaacgcgaacggaaaaacaaagcggctggaggacagggtaaaaccgtatcaagtcccgttccgccacttatgcaatttaattcagatagcggacggcgatattga

SEQ ID NO: 70502 - protein, 348 aa, Unknown
  Obtained from environmental sample
  DOMAIN (7)...(348): tRNA synthetases class I (K)
  misc_feature (1)..(348): Xaa is any amino acid
MGQHSARGRAFIYSWDDYDVFRKVPKNMPKQQELENCLRIPITMVPDPWERDSSYARHHEVDVESKLPEVGIFPEYIYQAERYRSSRYAQGIRKALEKRDALKEILDKFRDEDHKIQGEWWPVSVFCEKCNKDETEIEGWDGDWGLSYKCNKCGNKETLDIRNAKGVKLSWRIDWPMRWEYEKVDFEPAGKDHHCQGGSFDTARHVCKDVYGWDAPVTFRYDFIGSKGHPGKMSSSSGNVITLDNVLNVYTPEVTRYLFAGTRPNTEFTISFDLDVIKIYEDYDKTERIAWKTEQAKDEAAYQKERRIYEFSPDQRERKNKAAGGQGKTVSSPVPPLMQFNSDSGRRY

SEQ ID NO: 70503 - DNA, 603 bp, Unknown
  Obtained from environmental sample
  misc_feature (1)..(603): n is a, c, g, or t
atgaaaatctggtttgccacaaataacgcccataaaaaacaggaacttgaagcggtcttaaacacaaaactttttataccttccgaagaaggtataaaatttaatcccgatgaaacgggaaaaactttttacgaaaattcactgcttaaagcgcgtgagttaaaaaaattgctttccggcaacgacaatcttgttatcgccgatgattccggcctttgcgtagacgctcttgacggcaagcccggcgtgttttcagcgcgttacggcgaggcaaatggaaataaactgacaagcgcgcagaaaaatcttctgcttcttgaagaattaggcgaaacagaaaacagaagcgcgcgttttgtctgtgctatgaccctttatcgtgaaaccgaaaacttttacattgttcaggaaactattgagggggagattgtaaggaagagcggaataaagggggacggcggtttcggctacgaccctattttttggctgccatcctttagccgcacactggcggaactttctgccgatgagaaaaatgagataagccataggggaaaagcagggaaacttgtatctgatatattgttacattttaataaatag

SEQ ID NO: 70504 - protein, 200 aa, Unknown
  Obtained from environmental sample
  DOMAIN (3)...(195): Ham1 family
  misc_feature (1)..(200): Xaa is any amino acid
MKIWFATNNAHKKQELEAVLNTKLFIPSEEGIKFNPDETGKTFYENSLLKARELKKLLSGNDNLVIADDSGLCVDALDGKPGVFSARYGEANGNKLTSAQKNLLLLEELGETENRSARFVCAMTLYRETENFYIVQETIEGEIVRKSGIKGDGGFGYDPIFWLPSFSRTLAELSADEKNEISHRGKAGKLVSDILLHFNK

SEQ ID NO: 70505 - DNA, 1098 bp, Unknown
  Obtained from environmental sample
  misc_feature (1)..(1098): n is a, c, g, or t
ttggtcaagaattcggcacgagaggtcacggaagagaagatgaagtaccgcgacaacgatttctactcgaaaaaacgcgtcaaaatgcttcatgctaccgccgccggggttgacgccgccaacaagcaggtgattctgtctaacggagacgggataaattacgacaaactattggtcgccacgggttcgcaaccgttcgtgccgccgtttgaagggcttgactccgtcacggacaaggttacgtttatgagcctagacgacgcgcggaaattgggcggcatgattaaccaaaacaagcgcgttctgattatcggcgccgggcttatcggccttaagtgcgctgagggaatttcaggcagggtcgcgcttatcacggtgcttgacctcgctccgagaatcttgtccagcatcctcgacgacgacggggcgaagacggttcagggccatctcgaaagcagggggattaagttcaagctctccgccagcaccaagaagtttgagggaaacaccgccgtccttgataacggagataggattgattttgacgttctcgtccttgcggtgggcgtgcgtcccaacacggcgcttctcaaggacatcgcgcaaatagaaaaaggaatcgtcgtagacgaaagatctcaaacgtccgcgccggacatctacgccgccggcgactgtacgcagacgctcgacgtatcgagcggtcagaacaagataatggcgctgttgcccaacgcatatatgcagggcgaatgcgccggaatcaatatggcgaacggcgataaggtgttcgatagggcgataccgatgaacgcgatcgggttcttcggtttgcacgtcgtcacggcgggaaattatatcggggatgtctattcaggcagcggaaaagacgattacaagaaattattttacagtgataataaactgaacggttacatcctcatcggcaatgttgagaaggcgggaatttatacgagcctgatccgtgaacgcacgccgctagactctatagactttgcgcttgtatgcgagaagcccgggcttatggcgttcacaaaagaggatagacagattaaactgggaggcggtgcgtcatga

SEQ ID NO: 70506 - protein, 365 aa, Unknown
  Obtained from environmental sample
  DOMAIN (2)...(231): Pyridine nucleotide-disulphide oxidoreductase
  misc_feature (1)..(365): Xaa is any amino acid
MVKNSAREVTEEKMKYRDNDFYSKKRVKMLHATAAGVDAANKQVILSNGDGINYDKLLVATGSQPFVPPFEGLDSVTDKVTFMSLDDARKLGGMINQNKRVLIIGAGLIGLKCAEGISGRVALITVLDLAPRILSSILDDDGAKTVQGHLESRGIKFKLSASTKKFEGNTAVLDNGDRIDFDVLVLAVGVRPNTALLKDIAQIEKGIVVDERSQTSAPDIYAAGDCTQTLDVSSGQNKIMALLPNAYMQGECAGINMANGDKVFDRAIPMNAIGFFGLHVVTAGNYIGDVYSGSGKDDYKKLFYSDNKLNGYILIGNVEKAGIYTSLIRERTPLDSIDFALVCEKPGLMAFTKEDRQIKLGGGAS

SEQ ID NO: 70507 - DNA, 726 bp, Unknown
  Obtained from environmental sample
  misc_feature (1)..(726): n is a, c, g, or t
atgagcgtattgaacatatcggcgcgtgagcttgactttaaggagctgaacaagcaagtgcgggcggcgacgagcgacgtgcgtatagacgagtgctacggtcagcgttttatcggcagcgcgctgtccggtcggacgatcaccataaacggcacgcccggcaacgcgctcggcgcgtatctcgacggcggcgttatagaggtaaacggcaacgcgcaagacgccaccggcgacacgatgaacgacggcaagatcataatccacggcaacgccggcgacgcgctgggctacgcgatgcgcggcggcaaaatctttgtccagaacaacgccggatacagaaccggcatacacatgaaagagtacaaggataagaaaccggtaatcgtcataggcggtagagtcggtagttttctgggcgagtatctcgccggcgggcttatagtggtgctcggcataaactgcgacgatattcctgtcggcaatttcacgggaaccggtatgcacggcgggaagatttttatcagaacaaataaagatttgtcgaaactgccgaaacaagtcgtaaaagacaaggcctccggcgaggacttgaaggagattgagccatatgtctcagagttcgccggctacttcgccatggacgcggcgtcgcttttgaaagataaattttacgttctgaggcccaacgcgaagaatccgtataagcagttgtatacggcgaattag

SEQ ID NO: 70508 - protein, 241 aa, Unknown
  Obtained from environmental sample
  DOMAIN (4)...(210): GXGXG motif
  misc_feature (1)..(241): Xaa is any amino acid
MSVLNISARELDFKELNKQVRAATSDVRIDECYGQRFIGSALSGRTITINGTPGNALGAYLDGGVIEVNGNAQDATGDTMNDGKIIIHGNAGDALGYAMRGGKIFVQNNAGYRTGIHMKEYKDKKPVIVIGGRVGSFLGEYLAGGLIVVLGINCDDIPVGNFTGTGMHGGKIFIRTNKDLSKLPKQVVKDKASGEDLKEIEPYVSEFAGYFAMDAASLLKDKFYVLRPNAKNPYKQLYTAN

SEQ ID NO: 70509 - DNA, 570 bp, Unknown
  Obtained from environmental sample
  misc_feature (1)..(570): n is a, c, g, or t
ttggaaaacgctttgatagtttcaaactccgagaaaagcgttgcgttctttaccgaaatgcttaacgcggcttcctgcggcgcggtcaccgtgctgaagaccggcgcggaggcgcgacgcgttctttccgaacgcgaattcgatattgtagtaatttacgtcccactgcccgacgaatcgggcgaaagcctttcacggcatattgccgcaaaagatacatcgcaggtcatactcgtcgtaaagaacgaatacttcgacgagatgtgcgcggttaccgaagacgccggcgttctcgtcgtcgcccgccccgttgacagaacgatcttccggtcgtcgctaaggctcgctaaatcgtcacaaggcaaactgaaaaaattgcgctccgagaactgcgatctcaaacagaaaataaaggatatcaagataatagaccgcgcgaagtatatcctaatctcttatctgaagatgagcgaacaggaagcgcaccgatttatcgaaaaacaagcgatggacatgcgagcgacacgcaggtctgtcgcagaagggatactgcggacatatgaaagctga

SEQ ID NO: 70510 - protein, 189 aa, Unknown
  Obtained from environmental sample
  DOMAIN (2)...(114): Response regulator receiver domain
  misc_feature (1)..(189): Xaa is any amino acid
MENALIVSNSEKSVAFFTEMLNAASCGAVTVLKTGAEARRVLSEREFDIVVIYVPLPDESGESLSRHIAAKDTSQVILVVKNEYFDEMCAVTEDAGVLVVARPVDRTIFRSSLRLAKSSQGKLKKLRSENCDLKQKIKDIKIIDRAKYILISYLKMSEQEAHRFIEKQAMDMRATRRSVAEGILRTYES

SEQ ID NO: 70511 - DNA, 1413 bp, Unknown
  Obtained from environmental sample
  misc_feature (1)..(1413): n is a, c, g, or t
atgaaagctgacggaaaactcaacgaagaatgcgcgatctttggcgtcagcctgaactgcgacgtcgcggcggggctaacgtacaacggcctgctcgcattgcagcaccgaggccaagagggagcggggatcgcggtagccaacaaccacaacctcgtatgccacaaggacatagggcttgtaggcgaagtattttccggtgaaaaaatcgagcatatacccaagggccgcgtcgccgtggggcacgcgcgctattcgacgaccggacgcaactccaaagaaaacgtcgggccgttcgtcacagagtacctaaccggcagaatcgcgacggcgcacaacggaaatatcacaaacgcgcaggcgatccgcgacaaactgaacagacgcggcgtccagttccgcgcaaccagcgacagcgaggtgatctcggcgctcatcgcctactacataacgcaggtgaagagagcgctgcccggaataataaaggcggccgaccacctgcgcggggcgttctcgcttatcatagccagcagcaaaaataaacttatcgccgtccgcgacccaaacggattcagaccgctatgtctaggtaagaacgatatgggctacgcggtcgcgtcggaaagttgcgcattggaaatatgcgggtttgaattcgtcagggacgttaaaccgggcgagataatcacaataaaaaacggcgtgataacgtatgagagcataagcctgcacaacaaggaagaggggcgcgggttttgcatatttgaatatgtttacttcgcccgcccggactctgtgcttgacgggctctcgatctatgaggcgcgttacaacatgggcgcgattttggctaaagagtacccggtggacgccgacgtcgtatgcggcgtgccggacagcggcttggtcgcggcaaacggctacagcacggcaagcggtatcccgctagcggatggctttgtcaagaataggtacatcgggcgcagcttcatctatccgactcagacgcagcgcgacagcgccgtgcggcaaaagctgaacccgctgacagcaaacgtaaagggaaaaagggtcgttctcgtcgacgactccatcgtacgcggcacaacctgcgagaagatcataagaagcctcagaagcgccggagccgcggagatccacatgagagtatcgtcgccgccgttccgccacacttgccactacggaaccgacataggcggcgaagataatctcatcgcgaacaaaatggacatagacgatatccgcacaaaattcggcgcggacagtttggggtatataagcatagacgggctgaaaaaagcctgtgaaaaatgcgtcctgccgttttgcacggcctgcttcacaggccacgacgaaacagaagaacgtaccagaaaagatattttcgaataa

SEQ ID NO: 70512 - protein, 470 aa, Unknown
  Obtained from environmental sample
  DOMAIN (264)...(410): Phosphoribosyl transferase domain
  misc_feature (1)..(470): Xaa is any amino acid
MKADGKLNEECAIFGVSLNCDVAAGLTYNGLLALQHRGQEGAGIAVANNHNLVCHKDIGLVGEVFSGEKIEHIPKGRVAVGHARYSTTGRNSKENVGPFVTEYLTGRIATAHNGNITNAQAIRDKLNRRGVQFRATSDSEVISALIAYYITQVKRALPGIIKAADHLRGAFSLIIASSKNKLIAVRDPNGFRPLCLGKNDMGYAVASESCALEICGFEFVRDVKPGEIITIKNGVITYESISLHNKEEGRGFCIFEYVYFARPDSVLDGLSIYEARYNMGAILAKEYPVDADVVCGVPDSGLVAANGYSTASGIPLADGFVKNRYIGRSFIYPTQTQRDSAVRQKLNPLTANVKGKRVVLVDDSIVRGTTCEKIIRSLRSAGAAEIHMRVSSPPFRHTCHYGTDIGGEDNLIANKMDIDDIRTKFGADSLGYISIDGLKKACEKCVLPFCTACFTGHDETEERTRKDIFE

SEQ ID NO: 70513 - DNA, 702 bp, Unknown
  Obtained from environmental sample
  misc_feature (1)..(702): n is a, c, g, or t
atgttttttgatcagtattatttattgttggtagtgcctacgctgattttgtcaatttgggcgcagattacggttaaatcgactttcgctaaatattcaaaaataccgtcttcgcgggcaattacaggcgttgacgcggcgaatcttttgttaaagtcaaataatatcagggacgtaaaagttgagcgtatcgcgggctctcttaccgatcattattcccctatggaaaaagtattacggctttctcagcctgtgttcggctcaacgtcaatcgccgcggtgggagtcgccgcgcatgaagccggacacgctattcaacacgcggtacactggagtcctcttgcgctaagaagcacgcttgtacctgtggcgaatatcggctcaagaatcggtccctggcttgcgataatcggacttggtatttccggtcagtcttcttcaggcattgcgatgatgttattcaatattggaattctgctttttggcggagccgtgcttttttatgtcattaccctgccggtagaaataaacgcatccagaagggcaatagccgttttgcgcgctaataatgtgttaaacgaaaaagaactaaatggcgtaaaaaaagttttaaccgccgcggctttaacttatatcgcttccgcccttaccgcgattgccagtttactgcgtcttattttattatcacgcagaagaaggtaa

SEQ ID NO: 70514 - protein, 233 aa, Unknown
  Obtained from environmental sample
  SIGNAL (1)...(21)
  DOMAIN (5)...(233): Putative neutral zinc metallopeptidase
  misc_feature (1)..(233): Xaa is any amino acid
MFFDQYYLLLVVPTLILSIWAQITVKSTFAKYSKIPSSRAITGVDAANLLLKSNNIRDVKVERIAGSLTDHYSPMEKVLRLSQPVFGSTSIAAVGVAAHEAGHAIQHAVHWSPLALRSTLVPVANIGSRIGPWLAIIGLGISGQSSSGIAMMLFNIGILLFGGAVLFYVITLPVEINASRRAIAVLRANNVLNEKELNGVKKVLTAAALTYIASALTAIASLLRLILLSRRRR

SEQ ID NO: 70515 - DNA, 1608 bp, Unknown
  Obtained from environmental sample
  misc_feature (1)..(1608): n is a, c, g, or t
atggtacagattccctcttcgctcagcagaatcgtctggctgcccgccgaaggagatatgctccgctgggcgctgctggacgatataatgcttacatgggggggatacctgttccccggttacaatgtcagggaaagcatgttattcaaggtaaaccgggacgctgatttttccgttgacgagcgcagggacgaggattttattgaggcaatggcggaggtaatagaaggaagggaaaaatcagcgcctgtcaatatgatcttttctccgggctcaggcaggttaagagacgagttggcgaagcgcttttccctggagagcgacgacctgtacgagcttgaggggcctttcaatcccgggggcttaagcgaattggcgggtgtcgcgggttttgatgaactgcatgaaaaaacctggaaaatatatccggctcccggctttagcgacgaggtttcgatttgggatcgtttaagccagggcgacgttatgctccattttccctaccagtcatttgatcctgtagtccgtttcttccaggaggccgcgtcggatccccaggttatctccattaaaaccgcgctttaccgtacaggcggaggcgcggggacttcccagccggtttcgctcattgtgcgggcgcttgaacaggcggcccttaacggcaagcatgttacggcgcttgtagaactcaaggcccgctttgacgaagagcgtaatatatcctgggcaaaccgcctgggaaaagcgggcgttattgttgtgtacggactttcacatttgaaaattcattccaagatttcgatggttctgcgcagagagaatgatcgcgtaaagcgttatgtgcatctttccaccgggaattacaacgacagaaccgcaaaatattacgaggatatttccctctttacctgccgcgaggatattgcctatgacgcggggcttatttttaatatgctcacaggttattcaatcgtacagacaatgacaaagcttacaatcgcgcctacagctcttaaacgccgttttctggaacttatcgaaagagaagcaaacagggcaaggcaaaagtatcccgctaaaataatggctaaaatgaattctcttaccgatgtcgagattataaaagcgctttacaaagcgtccgaagccggcgtaaaaatttccttgtgtattcgcggcatatgcacattggttcccggcattatcggagtctccgaaaacatccgcgtaatcagcgtcatcgaccactatcttgaacactcaagaatttattacttctccaacgggggtgcggacgaaatttactgcgccagcgccgacttgatgacgcgcaatcttgatcatcgcgtggaaattttattccccatacaggatgaaaaacttcgcgcggaattgtatgatatgcttaacgattatttccgcgataattgtcagtcttctgttttggatagcgaaggcaagtggacgttgctttctcctccggcggaagaaaaacctttccgcgttcagaaagaaatgcttttccgcgcggcaagagacagtgaaaatccgggacccgtaaaacttgaatatacagtgcggcgcagtccgcccgcagacaggagttaa

SEQ ID NO: 70516 - protein, 535 aa, Unknown
  Obtained from environmental sample
  DOMAIN (1)...(512): Polyphosphate kinase
  misc_feature (1)..(535): Xaa is any amino acid
MVQIPSSLSRIVWLPAEGDMLRWALLDDIMLTWGGYLFPGYNVRESMLFKVNRDADFSVDERRDEDFIEAMAEVIEGREKSAPVNMIFSPGSGRLRDELAKRFSLESDDLYELEGPFNPGGLSELAGVAGFDELHEKTWKIYPAPGFSDEVSIWDRLSQGDVMLHFPYQSFDPVVRFFQEAASDPQVISIKTALYRTGGGAGTSQPVSLIVRALEQAALNGKHVTALVELKARFDEERNISWANRLGKAGVIVVYGLSHLKIHSKISMVLRRENDRVKRYVHLSTGNYNDRTAKYYEDISLFTCREDIAYDAGLIFNMLTGYSIVQTMTKLTIAPTALKRRFLELIEREANRARQKYPAKIMAKMNSLTDVEIIKALYKASEAGVKISLCIRGICTLVPGIIGVSENIRVISVIDHYLEHSRIYYFSNGGADEIYCASADLMTRNLDHRVEILFPIQDEKLRAELYDMLNDYFRDNCQSSVLDSEGKWTLLSPPAEEKPFRVQKEMLFRAARDSENPGPVKLEYTVRRSPPADRS

SEQ ID NO: 70517 - DNA, 2058 bp, Unknown
  Obtained from environmental sample
  misc_feature (1)..(2058): n is a, c, g, or t
atgggcaatacggtaaaacttaaaacggaagacctgctgcacaaaatcccgctgcgcataacggacaccaccctgcgcgacgcccaccagtcgctatgggctacccgtatgcgcaccgacgacatactcagcatcgtagacgtaattgacaacgttggctattactccctcgaagcgtggggcggcgcgaccttcgacgtttgcctgcgcttcctgcgcgaaaacccgtgggagcggttgcgcctcatcaaggccaaggccaagaatacgccgctgcaaatgctcctgcgcgggcagaatctcgtgggctaccgcaactacgccgacgacgtcgtggacaggtttgtcgcattggcttgcaaaaacggaatcgacatcttccgcgtattcgacgcgttgaacgatacccgcaacttggaggccgccatcaaggccgtcaaaaagcacggtgcccacgcgcaaggcacgctggcctacacgatttcccccgtccacaccgtagagaagtacgtccagtacgcgaaagaacaagtccagctcggcgtcgattccctatgcgtcaaggacatggccggcatcctctcgccgataatggcggagcgtttggtatcggtccttatcaaagaattggacattcccgttcagctgcactgccacgcgtcgagcggcatggccacccccgcctacgtggagggcgtccgcgccggcgccggagccatcgactgcgccatatcgtcaatggccggaacctcctcgcagccgcccgtggagaccatggcggcgatattctccgagaccaactactccgccggattggacgttgacgcgctggacagggtcgccaagtatttcgccgacctcgccccgcgccgcagtactgcgccgccctccgccgtccccatagaccccggcatcctgatacaccagatacccggcgggatgatctcaaacttccgctcgcagctccaaatgcaaaaggcgctcgacaaactgccgcaggtgctccgggaggtcagccgcgtgcgcgaagacctcggctacccgccgctcgtcacccccacaagccagatcgtcggcacccaggcggttatgaacatcatatcgggcgaacgctacaagatagtgccgaacgaggtgaaggattacgtaaagggattgtacggaaggtctccggtgccgattgacaagagcatgataaagaggatactcggcgacgacaagccgataaactaccgccccgccgataaaatcgccccgatgctcccgaaggccaccgacggcgtagacccgacgctcatcaacgccgaggaggacattctctcctacgtgctgctacccgaaccggcgcttgagtacttcaagtggagggccgcgccagccggagagcgtccggagatcccggccgacgcggagatcagaaaggctaacggcgaggccgcggccaaaggcggcgccgccgaagaggcgcaaacgcccgtatcggcgaatacgccggcgcatgcgtcgtcggcgcggccgtcgccgctacagcttccggtagacggtctggccgccgaactcatcggaaagatagagggcctggtcatagaggagatagtcttccgaaagggagagtcgaccatatccgtaaaatcgcaggccgcgacgcaagcgtccgcggcgaggcagacgttcgatacggccgcggccgttccggtaccgttgccctctttcgtctcgtcgtccgccgcccaacaaataacgcaagcgccgccggcgactcagcaacagcaaccggcgccgcaagtaaatacggacgcgccgccggcgacgccggcggcggcatacaagcaaacgataaaagcgccgatagtcggaaccttttactcgtctccggggccgggaaaacccgcgtttatcaaggagggggacattattgagaagggggcgaaggtgtgcatagttgaggcgatgaagctattcaacgaaatatccgcgccaacgcggtgcaagatagtgaagatattggtagcggacggggccgcggtcgataaggatcagggagtgatttgggattga

SEQ ID NO: 70518 - protein, 685 aa, Unknown
  Obtained from environmental sample
  DOMAIN (611)...(683): Biotin-requiring enzyme
  misc_feature (1)..(685): Xaa is any amino acid
MGNTVKLKTEDLLHKIPLRITDTTLRDAHQSLWATRMRTDDILSIVDVIDNVGYYSLEAWGGATFDVCLRFLRENPWERLRLIKAKAKNTPLQMLLRGQNLVGYRNYADDVVDRFVALACKNGIDIFRVFDALNDTRNLEAAIKAVKKHGAHAQGTLAYTISPVHTVEKYVQYAKEQVQLGVDSLCVKDMAGILSPIMAERLVSVLIKELDIPVQLHCHASSGMATPAYVEGVRAGAGAIDCAISSMAGTSSQPPVETMAAIFSETNYSAGLDVDALDRVAKYFADLAPRRSTAPPSAVPIDPGILIHQIPGGMISNFRSQLQMQKALDKLPQVLREVSRVREDLGYPPLVTPTSQIVGTQAVMNIISGERYKIVPNEVKDYVKGLYGRSPVPIDKSMIKRILGDDKPINYRPADKIAPMLPKATDGVDPTLINAEEDILSYVLLPEPALEYFKWRAAPAGERPEIPADAEIRKANGEAAAKGGAAEEAQTPVSANTPAHASSARPSPLQLPVDGLAAELIGKIEGLVIEEIVFRKGESTISVKSQAATQASAARQTFDTAAAVPVPLPSFVSSSAAQQITQAPPATQQQQPAPQVNTDAPPATPAAAYKQTIKAPIVGTFYSSPGPGKPAFIKEGDIIEKGAKVCIVEAMKLFNEISAPTRCKIVKILVADGAAVDKDQGVIWD

SEQ ID NO: 70519 - DNA, 648 bp, Unknown
  Obtained from environmental sample
  misc_feature (1)..(648): n is a, c, g, or t
gtggggcggcgcgaccttcgacgtttgcctgcgcttcctgcgcgaaaacccgtgggagcggttgcgcctcatcaaggccaaggccaagaatacgccgctgcaaatgctcctgcgcgggcagaatctcgtgggctaccgcaactacgccgacgacgtcgtggacaggtttgtcgcattggcttgcaaaaacggaatcgacatcttccgcgtattcgacgcgttgaacgatacccgcaacttggaggccgccatcaaggccgtcaaaaagcacggtgcccacgcgcaaggcacgctggcctacacgatttcccccgtccacaccgtagagaagtacgtccagtacgcgaaagaacaagtccagctcggcgtcgattccctatgcgtcaaggacatggccggcatcctctcgccgataatggcggagcgtttggtatcggtccttatcaaagaattggacattcccgttcagctgcactgccacgcgtcgagcggcatggccacccccgcctacgtggagggcgtccgcgccggcgccggagccatcgactgcgccatatcgtcaatggccggaacctcctcgcagccgcccgtggagaccatggcggcgatattctccgagaccaactactccgccggattggacgttga

SEQ ID NO: 70520 - protein, 215 aa, Unknown
  Obtained from environmental sample
  misc_feature (1)..(215): Xaa is any amino acid
MGRRDLRRLPALPARKPVGAVAPHQGQGQEYAAANAPARAESRGLPQLRRRRRGQVCRIGLQKRNRHLPRIRRVERYPQLGGRHQGRQKARCPRARHAGLHDFPRPHRREVRPVRERTSPARRRFPMRQGHGRHPLADNGGAFGIGPYQRIGHSRSAALPRVERHGHPRLRGGRPRRRRSHRLRHIVNGRNLLAAARGDHGGDILRDQLLRRIGR

SEQ ID NO: 70521 - DNA, 957 bp, Unknown
  Obtained from environmental sample
  misc_feature (1)..(957): n is a, c, g, or t
ttggttccgttctctgcggagcggctgacgcccgacgaggttcaaaagctgtcgtacagcataatgaacgaggttcagaggaagtcctttgagaataacaaagaggtggacttctccttcggcattcagaatttggcccgtttccgcgccaacgtcttcttgcagaggggctgctgcacggcggcgatccgtcagatccccttcctcatcaagtcgattgaggagctcggcatgccgccggtggtcaagtatctcaccgagcgtccgaacggcttggtgcttgttaccggtcccaccggaagcggcaagagcacgacgctagccgcgatggtcgacaaaatcaacatggagcacgagggacacatcctgaccgtggaagacccgatagagttcgtacaccagcataagaagtgcatcatcaaccaacgcgaggtgaaccaggacacgaagagcttcgcggccgccctgcgtgtggcgctaaggcaggacccggacgtggtgctgataggtgagatgcgcgacctagagacgattcaagccgccctgagcatcgccgagacgggacacttaacgctggccaccctgcacacgaactcggcggcgcagacgatcaaccgcatcatagacgtcttccccgccgacatgaaggagacggtgcgggcgcaactctccatggtgctggagggcatcatcagccaagcgctactcccacgcgtgggcggcggccgcgtgatggcctgcgagatcatggtggccacgatggcggtccgctcgatgatccgcgaagacaaggtacaccaactccaaggcatcatagaaatcggccagcaacacggcatgcaaaccatgaacagccaattagccgccctattcaacagacgcctaatcaccaaaaaagacgctttcgggagaagcccggacccggacgggttgaagaagctgattggggagccgtga

SEQ ID NO: 70522 - protein, 318 aa, Unknown
  Obtained from environmental sample
  DOMAIN (1)...(239): Type II/IV secretion system protein
  misc_feature (1)..(318): Xaa is any amino acid
MVPFSAERLTPDEVQKLSYSIMNEVQRKSFENNKEVDFSFGIQNLARFRANVFLQRGCCTAAIRQIPFLIKSIEELGMPPVVKYLTERPNGLVLVTGPTGSGKSTTLAAMVDKINMEHEGHILTVEDPIEFVHQHKKCIINQREVNQDTKSFAAALRVALRQDPDVVLIGEMRDLETIQAALSIAETGHLTLATLHTNSAAQTINRIIDVFPADMKETVRAQLSMVLEGIISQALLPRVGGGRVMACEIMVATMAVRSMIREDKVHQLQGIIEIGQQHGMQTMNSQLAALFNRRLITKKDAFGRSPDPDGLKKLIGEP

SEQ ID NO: 70523 - DNA, 360 bp, Unknown
  Obtained from environmental sample
  misc_feature (1)..(360): n is a, c, g, or t
ttggtgattaggcgtctgttgaatagggcggctaattggctgttcatggtttgcatgccgtgttgctggccgatttctatgatgccttggagttggtgtaccttgtcttcgcggatcatcgagcggaccgccatcgtggccaccatgatctcgcaggccatcacgcggccgccgcccacgcgtgggagtagcgcttggctgatgatgccctccagcaccatggagagttgcgcccgcaccgtctccttcatgtcggcggggaagacgtctatgatgcggttgatcgtctgcgccgccgagttcgtgtgcagggtggccagcgttaagtgtcccgtctcggcgatgctcagggcggcttga

SEQ ID NO: 70524 - protein, 119 aa, Unknown
  Obtained from environmental sample
  misc_feature (1)..(119): Xaa is any amino acid
MVIRRLLNRAANWLFMVCMPCCWPISMMPWSWCTLSSRIIERTAIVATMISQAITRPPPTRGSSAWLMMPSSTMESCARTVSFMSAGKTSMMRLIVCAAEFVCRVASVKCPVSAMLRAA

SEQ ID NO: 70525 - DNA, 726 bp, Unknown
  Obtained from environmental sample
  misc_feature (1)..(726): n is a, c, g, or t
ttgtgttacgcaacaagcaaaaatccgttaaaagattttacctacggcggcgttattgtaagcaacaccgacatgcactttggtaaaccgatgaatcataacggcaataaccacggcggcataattaaaataaaaggaaaatttttcgttttttatcacaggcacacaaacggcatggatttttgccgccaggcgtgcatggaaccgatagaaataaataaagacggaaaatttgaacaagttaagatgacttcctgcgggccgaacaaggggcctcttgccgggtttggtgaatatccggcttatatcgcgtgcaactttttttccgtaacggaaaacgataaacaagagtgggacttaatccctaagggaaaatggccgcgccgcgactcccgcctgccctttgtctcgcaggacggaagagacggcgacgaagagccgggctttgtaacaaacataaacgacaattacggaataggttttaaattctttgactgcaagggagtaaaacgcgtaaaagtaaaaacccgaggatacaatcgcggcttcttcgaagtaaaaacatcgttagacgaaaacccgcttggaaccatagaaattacatccagcaatatctggaaagattttcaagcagatataacgattccggatggcatacaagcgttatttttcatttataaaggaaccggaagcgcgactcttgggtcttttactctctgtgaataa

SEQ ID NO: 70526 - protein, 241 aa, Unknown
  Obtained from environmental sample
  misc_feature (1)..(241): Xaa is any amino acid
MCYATSKNPLKDFTYGGVIVSNTDMHFGKPMNHNGNNHGGIIKIKGKFFVFYHRHTNGMDFCRQACMEPIEINKDGKFEQVKMTSCGPNKGPLAGFGEYPAYIACNFFSVTENDKQEWDLIPKGKWPRRDSRLPFVSQDGRDGDEEPGFVTNINDNYGIGFKFFDCKGVKRVKVKTRGYNRGFFEVKTSLDENPLGTIEITSSNIWKDFQADITIPDGIQALFFIYKGTGSATLGSFTLCE

SEQ ID NO: 70527 - DNA, 1080 bp, Unknown
  Obtained from environmental sample
  misc_feature (1)..(1080): n is a, c, g, or t
atggaaacttctatttccagtattatctgtatcgccgacatgaatataattcccgctctggatcaggttcttaccgatctggcgcttcccgaagtttttatacagcgcgccaaacagacgtttctccttgacaaacgcggtttcctaggccttcgtcccgtaaccaagcttgatgagagccgcgcgctgatttacaggatgtatgttccggcgatgtatgaagaaagcgtaatgcgccgtattatcgaggcgaccgatctgggattgggcggacgcggaagcattttctcccagcatataggcatcatgaggggaacgcccctttcttttgatatggaaaaactggaaaaatcttgcgaaaaaaaagacaaacttgcccatgaggaacacgcccttatcacctgtacggtttcaagaggatcgggcgaggccttggcgcgggcggtattggaacttggcataggagtgcctgttgttttttacggcacaggcgccggtttaagggacaggttgggacttttaaggataactatcccggtggaaaaagaaatcatctggtttatcgtcccgcgttcagacgccgaactggtggaaaaaaacctggttccgcgcgctaaactggatgtccccggcaacggctttttgtaccgttgttttgtccacgcgcctgtggtaaacctgcgcatcaggcacggagagcgcgctcatgccgcgactatggaacaggttatcgccgctctggacgaggtccgcggttcaaacgattggcgccgtttcggctctcgcaggcacgagcacaagagcggcgaaaaaaagtcggtgcataccagagggcttttctttatcggcgatgaagaggaaattgaattgttccgtaaagtggcgatagaaaacggcgcgcgcggcgctacatttaaccccgttgaaatgcgctcttataaagcatttaagcatgaaaaagccatggaatcaaaatcccgccaactctgcgacataatcaccacatctgtaactgaagaaaaaatctgcgcttctaccgttaaaaacaaacttttgaagaaggtaaaacctgcgtgctaa

SEQ ID NO: 70528 - protein, 359 aa, Unknown
  Obtained from environmental sample
  misc_feature (1)..(359): Xaa is any amino acid
METSISSIICIADMNIIPALDQVLTDLALPEVFIQRAKQTFLLDKRGFLGLRPVTKLDESRALIYRMYVPAMYEESVMRRIIEATDLGLGGRGSIFSQHIGIMRGTPLSFDMEKLEKSCEKKDKLAHEEHALITCTVSRGSGEALARAVLELGIGVPVVFYGTGAGLRDRLGLLRITIPVEKEIIWFIVPRSDAELVEKNLVPRAKLDVPGNGFLYRCFVHAPVVNLRIRHGERAHAATMEQVIAALDEVRGSNDWRRFGSRRHEHKSGEKKSVHTRGLFFIGDEEEIELFRKVAIENGARGATFNPVEMRSYKAFKHEKAMESKSRQLCDIITTSVTEEKICASTVKNKLLKKVKPAC

SEQ ID NO: 70529 - DNA, 1992 bp, Unknown
  Obtained from environmental sample
  misc_feature (1)..(1992): n is a, c, g, or t
gtgaacatttttacgaaattacgagatagtttgtttcccggccgcagagaaaagataaccttgtctttcaaggaatctttttcgctgataaagatttacgcgtttagcaagataaagccgcaatttaaggcggtgttgatggtaagcgtatttctggcggccgttcagtattttgtgctggaaactccgcttaaaaacgcgctttctatagctgtctgcatagcggcggcgattttgggactgtcttttttccttgaaggactttttttggggattatgccccttggcgagcaatgcggaatgagattgccttcaaagataggagctgcggggagtaccgttttttcaattattgtgggaataaccgcaacactggcggaacctgccgtcgccgtgcttcaacagcagggcagcgtaatcccggcgtggaacgcgccgcttttatatcttcttctgaaccgcggcacgtcgtggctggtagccgccattgccgtaggggtgggaatttccgtggtgctgggcgtgtaccgcttcatgttcggctgggctttcaaaccgccggtttttatcattattcccattatcgttgccgtaagctgtatattcgatgaaaatcctattctgcgccctcttgtaaatctcgcgtgggatacgggaggcgcggctacaggcgcggttacagtgccgataattctggccctggggttgggcgtggcgaaaatcgggggcaaaaattccgacacatcagggcttgggcttgtaacgcttgcctcagccctgcctgtggcaagcgtcctttttcttgccgccgtgctgggtcccaaagtgccgtcaccttgtgacgcggcggctttcttttccgcgaatcctgatcaaagggaaaaggcggtttatgtcgcggggggaagagacgaactgtataatatggcggaaaaggccgtctacacaggcgatctttcggccgaagaatttgcgtattgttttcccggacagcaattaattgaaaaaaaagaggcagaacccctgtcggtgtttgctccggaagcgttccttaaatacgccaaatccgcccttttttcggtgcttcctctggcgttagtgctgatcatcgccattggtttatttgcacgcgacagaatctttaacgcagatattgttgtgctgggcattttttttgcggctcttggcatgttcgcgcttaatctgggaatgaccggcggcattacggtcttaagttcagacgccggaagttcccttaaacaaacttacacggaaacgctctatgaaaacagaacggtaacattaaaaggcgtcgattcaaattcgctcattacagtccccggagaattcggaccggatacttatatctgggttcagggtaaaaacgggccgacactggaaaaatttgtcccccaacggcttataggcgacttatatacacatattccgataaaggacgcgatgtcctcaaaatttggaatggtaggcgcgtatgttataatacttgtcattgttttctttttgggattcttcgccattttcgcggaacccgggcttgcggttacagccgtgacagtagaggagatgaccaccggtacttttaagcgttctaaattgataaagatcgcggctatgggcgtaggcggcggcatggtgataggtttcgcgcgggtgctgttcagcaatttgctgccttcaggcgggatccatctttcgtggattctggctccttgctatcttcttgccctgatcctgacaattttcgcgcctgaagatttttcctcgatagcgtgggatgtcgcaggcatcgcgacaggccccatcacagttccaatcattataacttcaggccttggactcggacgcgattcactgcgggctgacggcgctttcggcattgtggcgacggccagcgtatttccgattatcgtaatattaatatcgggcattgttgataaagcgagatcgaagcgcgtgttaagcaggatgtag

SEQ ID NO: 70530 - protein, 663 aa, Unknown
  Obtained from environmental sample
  DOMAIN (465)...(653): Protein of unknown function (DUF1538)
  misc_feature (1)..(663): Xaa is any amino acid
MNIFTKLRDSLFPGRREKITLSFKESFSLIKIYAFSKIKPQFKAVLMVSVFLAAVQYFVLETPLKNALSIAVCIAAAILGLSFFLEGLFLGIMPLGEQCGMRLPSKIGAAGSTVFSIIVGITATLAEPAVAVLQQQGSVIPAWNAPLLYLLLNRGTSWLVAAIAVGVGISVVLGVYRFMFGWAFKPPVFIIIPIIVAVSCIFDENPILRPLVNLAWDTGGAATGAVTVPIILALGLGVAKIGGKNSDTSGLGLVTLASALPVASVLFLAAVLGPKVPSPCDAAAFFSANPDQREKAVYVAGGRDELYNMAEKAVYTGDLSAEEFAYCFPGQQLIEKKEAEPLSVFAPEAFLKYAKSALFSVLPLALVLIIAIGLFARDRIFNADIVVLGIFFAALGMFALNLGMTGGITVLSSDAGSSLKQTYTETLYENRTVTLKGVDSNSLITVPGEFGPDTYIWVQGKNGPTLEKFVPQRLIGDLYTHIPIKDAMSSKFGMVGAYVIILVIVFFLGFFAIFAEPGLAVTAVTVEEMTTGTFKRSKLIKIAAMGVGGGMVIGFARVLFSNLLPSGGIHLSWILAPCYLLALILTIFAPEDFSSIAWDVAGIATGPITVPIIITSGLGLGRDSLRADGAFGIVATASVFPIIVILISGIVDKARSKRVLSRM

SEQ ID NO: 70531 - DNA, 1080 bp, Unknown
  Obtained from environmental sample
  misc_feature (1)..(1080): n is a, c, g, or t
atgagcgattctgcttatctgatattggaaaatggtgcgatttttgaaggtaaattcttcggcgcacatggcaatattacaggtgaaatcgtttttactaccggcatgaccggctatctggaaacccttaccgatcaaagctattacggacaaatcgtccttcaaacatttccccttatcggcaactatggggttatcccccccgattttgaaagcggcggagttggggcaagagcgtacattgtaaaacatccctgtgccactccgtccaatttccgaagtgaaaacgccctcggcgcttttttgaaggagcgcggtattatcgggatgtacggtattgacacgcgcgcccttacaaaaattattcgcaataacggagtcatgaacggtaaaatctgcgacaaacagccgactgaaaaagaccgcgccgaagctaaggcgtattcaatcattaatccgataaaaactgtttcttcgcgtaaacttgctaaagtgcctcccgccgaaaatgcctcgggaaacacccaaaggcgtgtcgcgcttttggactttggcgcaaaacgcgggatagcggctgctcttgcggcgcggaattgcgaagtgtggatattcccgagcgacacgccggcgaaggaaatcttgaaaatgcagccggacggcgtaatgttaagcaacggacccggagaccctgcggatccgggaaacgcgggcattgtcgaaacgatacgcgcacttgaaaaaagcggcataacaatttttggcatctgcatggggcatcagctacttgcttgcgcgaaagggtattataccagaaagttaaagttcggacacaggggagcgaaccagccggtcaaagagacgaaaacagggcaggtttacatcacaagccaaaaccacggttacgaggtagtcgcggacgacagctcttttatcaatgttaacgacggctcatgcgaggggatggactacggcaattcattctctgtgcagttccaccccgaggcgcgcggcgggccgctggacacgtcgtttttattcgagcggtttttagaaaggatggcggcaaatgcctctcgataa

SEQ ID NO: 70532 - protein, 359 aa, Unknown
  Obtained from environmental sample
  DOMAIN (172)...(334): Peptidase C26
  misc_feature (1)..(359): Xaa is any amino acid
MSDSAYLILENGAIFEGKFFGAHGNITGEIVFTTGMTGYLETLTDQSYYGQIVLQTFPLIGNYGVIPPDFESGGVGARAYIVKHPCATPSNFRSENALGAFLKERGIIGMYGIDTRALTKIIRNNGVMNGKICDKQPTEKDRAEAKAYSIINPIKTVSSRKLAKVPPAENASGNTQRRVALLDFGAKRGIAAALAARNCEVWIFPSDTPAKEILKMQPDGVMLSNGPGDPADPGNAGIVETIRALEKSGITIFGICMGHQLLACAKGYYTRKLKFGHRGANQPVKETKTGQVYITSQNHGYEVVADDSSFINVNDGSCEGMDYGNSFSVQFHPEARGGPLDTSFLFERFLERMAANASR

SEQ ID NO: 70533 - DNA, 3690 bp, Unknown
  Obtained from environmental sample
  misc_feature (1)..(3690): n is a, c, g, or t
atgcctctcgataaaaacataaaaaaagttttggtaatcggctccggccccattgttatcgggcaggccgccgaatttgattacgccggaacccaggcatgccgcgtgctgagggaagacgggatcgaaatcgttcttgttaattcaaaccccgccacaataatgaccgacaaaaatatcgctgacaaaatttacattgagcctttaactcttattaccgtaaaacgcataattaaaaaagaacgccccgacagtattttatcgggacttggcggacagacggggctgaccttgtgcatgcagttagcacgcgatggtttccttgataaaatgaacgtgcgcctgcttggttcttcgcctcagacaattgacaaggccgaagacagaaaaattttcaaggaaaccatggaaagcatcggacagcctgtggttccctccgtcatcgcgaccgatgttgaaacggcggtaacgtttgcgaatgaactcggctatcccgtaattgtacgccccgccttcacgctcggcggtacaggcggcggcaatgccgtggacgaagatcgccttcgggagataaccgcaaacggcctcgcgctctcgcccattcatcaggtgttgatagaaaaatcaatcgccggctggaaagaaattgagtttgaagttatgcgcgaccgcgccggcaacgtaatcacagtctgttcaatggaaaacttcgatcctgtcggcatacacacgggcgacagtattgttatcgctccggccgtcactcttgcggacaaggaataccagatgctgcgctccgcctcgcttgacatcatcaaggcgcttggcgtggagggcggctgtaacgttcagcttgcgcttgagcctaacagttttgagtacgcggttatcgaggttaacccgcgcgtgtcgcgttcttcagcgcttgcaagcaaggcgacaggatacccgattgcgaaagtggcgaccaagatcgccataggttacaccctcgacgagattaccaacgcggttaccgggacgacattcgccgcctttgagcccacgcttgattatgttgcggtaaaatttccaaagtggcccttcgataaatttgtgtacgccagcagagaccttggaacccagatgaaagcgactggcgaagtaatgtcaattgcggacacttttgaagaggcgattatcaaagccgtgcgcggcgcggagattgggcttgccagccttgaccttccgcgtcttgccgcgaaaacagacaccgaaattcgcggcctgttaaaaacggtaaccgatgagcggctgtttgtgctgtatgaggcgatcaagcgcggcatcagcgtggacgagctttattcaatcacaaaagtagaccgctggtttttacatggcttaaaaaatatcagagatcgcccgtccttgttcgcttccgcctcgccgttgatttataaaatggtagacacctgcggcggcgaatttgaagcgaagacaccgtacttttattctattaaaaacggttttgaaaacgaagctctgcccttcattcaaaaaagcgagaaactgagggtcgtagttcttggaagcggaccgatacggatagggcaggggatagagtttgattacgcctgtgttcactgcgtgtggacattaagaaagatgggctatgaggttatcgtaatcaacaataacccggaaacagtctcaactgattttgacactgcggacaggctttactttgaaccgcttcacattgacgacgtgatgagcattatcgagacagaaaaacccataggcgttattgtcgcgttcggcggcgggacggccatcaagctgacaaaaaaactttacgaccgcggcgtgagcataataggcacctgcgccgaaagcattgatatctgcgaggacagagaacgttttgacaaactgcttgaacagctgcatgtgaaacgccccaaaggtttcggcgttatgaaggaagagcaagcgcttgacgccgccgataaactcggctatccggtgcttatgcgtccgtcctatgtgcttggcggccagaacatgataatcgctttctcgtccgaagatatccgcgaatacatggaaattattcttcgttcaaaacaggagaaccccgtcctcatcgacaaatacctaagcggacgagagattgaagtggacgcgatttgcgacggcgtcgacacattgatcccaggcatcatggaacatatagagcgcaccggtattcattcgggagacagtatcgcggtttatcccgctttgaatatagacgatgatcttgcgggaaaaatttttgagattacgaaaaaactctgcatggctttgaatgtccgcggccttgtaaatattcaatatgtatattatgagaacgacatctatgtaatagaagtaaacccgcgcgcgtcgcgtacggttccgtacatcagcaaagttaccggcgttcagatgtgcgagattgcgacaaaggtcagcgttgggcagactcttgcctctctcggttatacgtcggggatagcgaagatgccgccttatgtcgcggtcaaagttcccgtcttttcctttgaaaagcttgccggtcttgacactcaccttggccccgagatgaaatccacaggcgaagttttaggtcttggcaagagtcttgaagaagcgcttttcaaagggcttgtcgccgccggttataaaattttaagaggcggcggcgtattgattacagtccgcgacggagataagggagagattgccggcgtcgcggaaaaatttgccaaatgcggtttttccctgcacgctacaaggggaaccgcacgcttccttgaaggcaaaggctttaccgttcacgcgatagacaaaatctgcgacaacgatatggaaaacaccgaaacgcttttggcaagcggaaaaataagctatattatttcaacttcggaaaaaggcagagaccccgcgttggacgatgtaaagctccgcagaaaagcctgctccctgggcgtcccgtgcttaacatcaattgatacggcaaacgcgcttgcggactcactgctttccgattacagcgagataaacacggagcttgtagacataaacgatttaaggagcgcccgtgtacagcttccgtttacaaagatgcacggctgcagcaacgattatatctacatcaactgttttgatttggaaattaattcgcctgaatcgctttgcgttctgcttgccaatccgcacacagggattggaagcgaagggcttgtgtttatattgcgctcatccgtagccgacgcgagaatgaggctgttcaatcttgacggcagcgagggcggaatgggcggcaacgcaatccggtgcgtagcaaaatatctgtttgacaacggtatagtaaaaaaacaaaaaatgcggatagaaaccttaagcggaatcagggaactttttctaacaacaagaaatgaaacggtattgtcggtaaaagtggacatgggccgcgcggaactgcacccctcaaaaattcccgtaaaacttttcggcgagaatgtaatcgcaaggccggtaagaatcggcggcagggaatataagatcacctgtgtttctatgggcaacccccatgccgtagttttctgcgatagaataggaaaacttgacctgcacgaaatcggcccgttgtttgaaatgatccgatgtttccggaaagggtaa

SEQ ID NO: 70534 - protein, 1229 aa, Unknown
  Obtained from environmental sample
  SIGNAL (1)...(23)
  DOMAIN (632)...(827): D-ala D-ala ligase C-terminus
  misc_feature (1)..(1229): Xaa is any amino acid
MPLDKNIKKVLVIGSGPIVIGQAAEFDYAGTQACRVLREDGIEIVLVNSNPATIMTDKNIADKIYIEPLTLITVKRIIKKERPDSILSGLGGQTGLTLCMQLARDGFLDKMNVRLLGSSPQTIDKAEDRKIFKETMESIGQPVVPSVIATDVETAVTFANELGYPVIVRPAFTLGGTGGGNAVDEDRLREITANGLALSPIHQVLIEKSIAGWKEIEFEVMRDRAGNVITVCSMENFDPVGIHTGDSIVIAPAVTLADKEYQMLRSASLDIIKALGVEGGCNVQLALEPNSFEYAVIEVNPRVSRSSALASKATGYPIAKVATKIAIGYTLDEITNAVTGTTFAAFEPTLDYVAVKFPKWPFDKFVYASRDLGTQMKATGEVMSIADTFEEAIIKAVRGAEIGLASLDLPRLAAKTDTEIRGLLKTVTDERLFVLYEAIKRGISVDELYSITKVDRWFLHGLKNIRDRPSLFASASPLIYKMVDTCGGEFEAKTPYFYSIKNGFENEALPFIQKSEKLRVVVLGSGPIRIGQGIEFDYACVHCVWTLRKMGYEVIVINNNPETVSTDFDTADRLYFEPLHIDDVMSIIETEKPIGVIVAFGGGTAIKLTKKLYDRGVSIIGTCAESIDICEDRERFDKLLEQLHVKRPKGFGVMKEEQALDAADKLGYPVLMRPSYVLGGQNMIIAFSSEDIREYMEIILRSKQENPVLIDKYLSGREIEVDAICDGVDTLIPGIMEHIERTGIHSGDSIAVYPALNIDDDLAGKIFEITKKLCMALNVRGLVNIQYVYYENDIYVIEVNPRASRTVPYISKVTGVQMCEIATKVSVGQTLASLGYTSGIAKMPPYVAVKVPVFSFEKLAGLDTHLGPEMKSTGEVLGLGKSLEEALFKGLVAAGYKILRGGGVLITVRDGDKGEIAGVAEKFAKCGFSLHATRGTARFLEGKGFTVHAIDKICDNDMENTETLLASGKISYIISTSEKGRDPALDDVKLRRKACSLGVPCLTSIDTANALADSLLSDYSEINTELVDINDLRSARVQLPFTKMHGCSNDYIYINCFDLEINSPESLCVLLANPHTGIGSEGLVFILRSSVADARMRLFNLDGSEGGMGGNAIRCVAKYLFDNGIVKKQKMRIETLSGIRELFLTTRNETVLSVKVDMGRAELHPSKIPVKLFGENVIARPVRIGGREYKITCVSMGNPHAVVFCDRIGKLDLHEIGPLFEMIRCFRKG

SEQ ID NO: 70535 - DNA, 1809 bp, Unknown
  Obtained from environmental sample
  misc_feature (1)..(1809): n is a, c, g, or t
atgcagcaggaaattcttttaggcataggcggcatccgcgctttacgcgccctgggaatcaatcccgcggcaacccacatgaacgaagggcacgcggcgtttttgggacttgagcgaatccgcgaaataatggatgaaaagggatttacttttgaggaagcgcgcgaggctgtttggccgtcaaatatttttacgacccacactcctgttccggcggggaacgagcgctttgaaattccgatgatggaaaaatatttccgctcatggccgcaggttctgggaatttcatggaaagatttcctgggactgggcaggatttatccgggcgacgagcgcgaaactttctgtatgaccgttctcgctcttaagatggcggcttatgccaacggagtcgcgaaattgcacggagtggtttcccgcgacatgtggaaagggatatggccgggcttgccgttaaatgaaattccgatagggcatgtaacaaacggcgtacactcaagaacatggatttccagcggcatgattgatcttttagacagatacttcggccccagtttcctggacaagcctacagatttgcaaatttgggagcgcatggaccgcatctcggacgaggagctttggcgcacccacgagcgccgccgtgaaaaacttgtcgcctttgtgcgcgagcgtattaacgcgcagtatattcgcacaggagccgcgcggcttaaacaggcggaagacgccctttccccctacgcgctcaccctttgtttcgcccgccggttcgccacttataaacgcggcaacctcctgttacgcgatcccgaacgtttgctgaaactggtaagggatcacgaccgccccattcagttgattttcgccggaaaggcgcacccgcacgatatgccgggcaaagaccttatccgcgaaatagtacactttgcagaaaaatacgacgtatcaagcagaattatatttgtcgagaactacgacatgaacgtcgccaaatatttaacctcaggcggagacgtgtggcttaacaccccgcgccgcccgatggaagcgtccggcaccagcggcatgaaagccgcgatgaacggcgtccttaactgctcgattctggacggctggtgggacgaagcgtactgccccgaagtaggatgggcaataggccacggcgagcagtaccacgacgacaatcttcaggacgatgttgaaagcaaggcgttatacgatcttctggagagggaaataattccgctgttctaccagaggggacgcgacggcctgccccgcgaatggataaaattgatgaaagactgcatgaagaagatagggcagtccatgtcatgccaccgcatgctgatggattactcgaatcagttttatttaccggcgcttaaaaattaccgccgtttcagcaaagacggctatgccgaagccaaatctttggcggcttatttcaacaaactgcagcagtcatggggcaacctgaaaattgtcaagctggaatccaacgcaaaacctgttatgcaccgcggcgacactcttgcggttaccgcctacatcgatcttggcaacattttgcccgaggaagtgcaggtagaactctatcacggcacggtttcaagccagaacaaggaatttgccaacgccgccaagaccgagatgaaatgggtaaagaccgacggaaatctgaatttattccaggttcgcgtagaatgtgttgataccggaatgcagggacatacagtgcgtatactgcccaagcatgacgcgttgattcatccatacaggcccggatttgtgaagtgggcgtaa

SEQ ID NO: 70536 - protein, 602 aa, Unknown
  Obtained from environmental sample
  DOMAIN (1)...(446): Carbohydrate phosphorylase
  misc_feature (1)..(602): Xaa is any amino acid
MQQEILLGIGGIRALRALGINPAATHMNEGHAAFLGLERIREIMDEKGFTFEEAREAVWPSNIFTTHTPVPAGNERFEIPMMEKYFRSWPQVLGISWKDFLGLGRIYPGDERETFCMTVLALKMAAYANGVAKLHGVVSRDMWKGIWPGLPLNEIPIGHVTNGVHSRTWISSGMIDLLDRYFGPSFLDKPTDLQIWERMDRISDEELWRTHERRREKLVAFVRERINAQYIRTGAARLKQAEDALSPYALTLCFARRFATYKRGNLLLRDPERLLKLVRDHDRPIQLIFAGKAHPHDMPGKDLIREIVHFAEKYDVSSRIIFVENYDMNVAKYLTSGGDVWLNTPRRPMEASGTSGMKAAMNGVLNCSILDGWWDEAYCPEVGWAIGHGEQYHDDNLQDDVESKALYDLLEREIIPLFYQRGRDGLPREWIKLMKDCMKKIGQSMSCHRMLMDYSNQFYLPALKNYRRFSKDGYAEAKSLAAYFNKLQQSWGNLKIVKLESNAKPVMHRGDTLAVTAYIDLGNILPEEVQVELYHGTVSSQNKEFANAAKTEMKWVKTDGNLNLFQVRVECVDTGMQGHTVRILPKHDALIHPYRPGFVKWA

SEQ ID NO: 70537 - DNA, 693 bp, Unknown
  Obtained from environmental sample
  misc_feature (1)..(693): n is a, c, g, or t
atgtcaaaacctatcccctctttcaagcatcttgatgttattgcggcgttttttgtctcaattttggttatcagtaacattgcatcttcggcaaaaatcgtcgatgttgggataacactgtttactattccgcttgcttttgacggcggcacacttctgtttccatttgtctatgtgttaggcgacgtgctgaccgaggtttacggttttaaaacggcgcggcgcgttatcctgacaggctttgcggtgatggttcttgccgcgttggtttttttcgtgctgggaatattgccgccggaagcgggatgggaagcggagacaggcgggaatatggcgtttaacgcgatactcggcggaatgagttacggcggcattgtgctcgccagccttgcggcgtatcttgccggggaactgtccaattcgctgatcctttcaaaactgaaggtaataatgaaggggcgcctcctttgggtgcgcaccataggctccacccttgtcggcgaattgcttgattctttgatttttatttttatagcctcacttgcgggcgttttcccatgggaaattttttggtctcttgtgataacaaattatatactaaagtgcgccatagaagcgattgtaacgccgttcacatattggctttccgctttcttaaaacgaaaagaagggattgatgtttatgacgcgtaa

SEQ ID NO: 70538 - protein, 230 aa, Unknown
  Obtained from environmental sample
  DOMAIN (40)...(202): Uncharacterized ACR, YhhQ family COG1738
  misc_feature (1)..(230): Xaa is any amino acid
MSKPIPSFKHLDVIAAFFVSILVISNIASSAKIVDVGITLFTIPLAFDGGTLLFPFVYVLGDVLTEVYGFKTARRVILTGFAVMVLAALVFFVLGILPPEAGWEAETGGNMAFNAILGGMSYGGIVLASLAAYLAGELSNSLILSKLKVIMKGRLLWVRTIGSTLVGELLDSLIFIFIASLAGVFPWEIFWSLVITNYILKCAIEAIVTPFTYWLSAFLKRKEGIDVYDA

SEQ ID NO: 70539 - DNA, 1065 bp, Unknown
  Obtained from environmental sample
  misc_feature (1)..(1065): n is a, c, g, or t
atgaaaagccgatttccctctacgacccgcagtgtccgggcgcaagagcgtaccgcgctcttgcaaaggaacttctgcgccgcgaaggcggaggcaataatggcgcgtaaattcggtcttggaagagggcttgacgccctgctcgataacaacgacgaaaatgacataaaatacgcgccttccgcgcccgggaacagcgagacagatgacgcctctccggcaacatcaccggcatcgacggctccatcggcgcaagcctctcagccgtcaacagggacagtcgaacttcctatcagccaactgattcccaacccgggacagccccgtaaaaaatttgacgaaaccgaattgaacgagcttgccgcctccataaaaacttacggcatcatccagcctgtaatcgccgcgaacgcgggagacggcacttacataattatcgccggagagcgcagaacacgcgccgcgaaacttgccggtcttgagactgtccccgcaatcatacgcgactacaccgatcaaaaaagactggaaatctctcttatcgaaaacatacagcgcacggacttaaaccccatagaagaagcagccgctttcaaaaacctgatggatttttccaatctttcgcaggatgatcttgccgcgcggctgggcaaaaaccgttctactgttgcgaacgccctgcgccttttaaaactgccgatagagattcaaaaaagcattgaagagggaaaggtcagctccggacacgcgagggctctgctttccgtaaccgacgcaaaggcgagggacaaattgtacatggagcttctcgccggggaaatgtccgtcagggagacggagaagaaggcgtcggcgataaacagcgagaatgccaaaggcgataaacccgcgaagaagggaaaagagcgcccggcggaagtggacgcaatggaagagaagtttattgaaaaattgggaaccaaagttgttatagacggggatcaaaacaagggacgcattcttattgactatttttcaatggaagacttagaacggctttatgaaatctttgacggctcgaaataa

SEQ ID NO: 70540 - protein, 354 aa, Unknown
  Obtained from environmental sample
  DOMAIN (94)...(184): ParB-like nuclease domain
  misc_feature (1)..(354): Xaa is any amino acid
MKSRFPSTTRSVRAQERTALLQRNFCAAKAEAIMARKFGLGRGLDALLDNNDENDIKYAPSAPGNSETDDASPATSPASTAPSAQASQPSTGTVELPISQLIPNPGQPRKKFDETELNELAASIKTYGIIQPVIAANAGDGTYIIIAGERRTRAAKLAGLETVPAIIRDYTDQKRLEISLIENIQRTDLNPIEEAAAFKNLMDFSNLSQDDLAARLGKNRSTVANALRLLKLPIEIQKSIEEGKVSSGHARALLSVTDAKARDKLYMELLAGEMSVRETEKKASAINSENAKGDKPAKKGKERPAEVDAMEEKFIEKLGTKVVIDGDQNKGRILIDYFSMEDLERLYEIFDGSK

SEQ ID NO: 70541 - DNA, 738 bp, Unknown
  Obtained from environmental sample
  misc_feature (1)..(738): n is a, c, g, or t
ttggccgagaactacctcggcaatcacatcggcgcttttatggccggagaggggaaaaaagtccttttggtggattttgacgcgcagggcaacctttcaagcggcgtgggcgcaaaacctgtcaagccgggaatctatgaactgctctcgggcgcggcttcttccgacaaggcgattaaaaagacagaggtcgctaacctcgacgttattcccgctgaccacgatttgtccggagcggcggtagaattaatcgaccaaaaagaacggaacttctttttgaaaaaaacccttgctcccataaaagaaaaatacgactacattttaatcgactgccccccaagccttggacaacttaccatgaacggtcttgccgccgccgatttggttcttatccctatgcagtgcgagtacttcgcgatggaaggtttaaatcagcttcttcataccaccaagcgcctgaaagaaaacctgaacccgtctttaagaataggcgggatatttttcaccatgtacgatccacggacgcggctcgccaacgaagtaataaaacaggtaagcgcgcattttaaagataccgttcttgacacgataatcccgcgaaacataaggctctcggaagctccttcttatgaaaagccgatttccctctacgacccgcagtgtccgggcgcaagagcgtaccgcgctcttgcaaaggaacttctgcgccgcgaaggcggaggcaataatggcgcgtaa

SEQ ID NO: 70542 - protein, 245 aa, Unknown
  Obtained from environmental sample
  DOMAIN (9)...(206): CobQ/CobB/MinD/ParA nucleotide binding domain
  misc_feature (1)..(245): Xaa is any amino acid
MAENYLGNHIGAFMAGEGKKVLLVDFDAQGNLSSGVGAKPVKPGIYELLSGAASSDKAIKKTEVANLDVIPADHDLSGAAVELIDQKERNFFLKKTLAPIKEKYDYILIDCPPSLGQLTMNGLAAADLVLIPMQCEYFAMEGLNQLLHTTKRLKENLNPSLRIGGIFFTMYDPRTRLANEVIKQVSAHFKDTVLDTIIPRNIRLSEAPSYEKPISLYDPQCPGARAYRALAKELLRREGGGNNGA

SEQ ID NO: 70543 - DNA, 1176 bp, Unknown
  Obtained from environmental sample
  misc_feature (1)..(1176): n is a, c, g, or t
gtgtgggtgttgctaattttggctatcatcgggggggggctcttcgccttatacacatattacggtaatgacgtgattcccgaaatctccggagtcccggaaatcccggaaatagtcgaaggtgttataagcaagtatgtttccgtgaaagaggcgtccgttaagaagcaggatgagcgtgacaggcggtataaggcaagcggcgtcggcgacggcgagggcaagagcgtaaaaaacgtattgggcggaccggagttctcgaaaagcggtaccgcgcccatacagccggtagcgttgcgcggcgacgacgcgccggaaccgccgcctgcggagatgacgcaatctgccaagccgccgacaccggaagcggaggccgcgccgccgccgcctcctctaccgccgccgccaccacctcctccgctgcctcctccgccgccgcgccggtctttttcaaagacaaacgcgccgacgctgaatttaacggtggagacgacgccgtcaaagaaccaacggacggcgccgcaaccggcggcaagagtcaaatcggagcttccgcccgcggcaagtctcaaatcggcgccgcaaccggcgccaagagtcatatcggagcttccgcccgcggcaagtctcaaaccggcgccgcaaccggcggcaagagttaaatcggagcttccgcccgcggcaagtctcaaatcggcgccgcaaccgtcggcaagagttaaatcggagcttccgccagcggcaagtctcaaatcggcgccgcaaccgtcggcaagggtcaaatcggaactgccgcccgcggcaagtctcaaatcgataccgcaaccggcggcaagcgcccaacttgagcctcctccgccgccgcccaagccgcgcgctacgctgctcctgtcagacgtaaacggccacctatccgaccgttccgatataaacgtaaatatgtcgatagaattgacttacgaggccgacggcgccttacgcgaagaattggaattcaaacaggacatgctgtcgacagtggcaagcgcgatactacgcagacacgaatacggcaacgtaagcacagagtctctgagaaaagatattttagccactttcaacggccaattacacgcgggaaaactaattgccgtggaagtaaaaaaccttcaaatagagcaagtggcggcgaagtaa

SEQ ID NO: 70544 - protein, 391 aa, Unknown
  Obtained from environmental sample
  DOMAIN (35)...(328): Extensin-like region
  misc_feature (1)..(391): Xaa is any amino acid
MWVLLILAIIGGGLFALYTYYGNDVIPEISGVPEIPEIVEGVISKYVSVKEASVKKQDERDRRYKASGVGDGEGKSVKNVLGGPEFSKSGTAPIQPVALRGDDAPEPPPAEMTQSAKPPTPEAEAAPPPPPLPPPPPPPPLPPPPPRRSFSKTNAPTLNLTVETTPSKNQRTAPQPAARVKSELPPAASLKSAPQPAPRVISELPPAASLKPAPQPAARVKSELPPAASLKSAPQPSARVKSELPPAASLKSAPQPSARVKSELPPAASLKSIPQPAASAQLEPPPPPPKPRATLLLSDVNGHLSDRSDINVNMSIELTYEADGALREELEFKQDMLSTVASAILRRHEYGNVSTESLRKDILATFNGQLHAGKLIAVEVKNLQIEQVAAK

SEQ ID NO: 70545 - DNA, 810 bp, Unknown
  Obtained from environmental sample
  misc_feature (1)..(810): n is a, c, g, or t
ttgggcggcggcggaggaggctcaagttgggcgcttgccgccggttgcggtatcgatttgagacttgccgcgggcggcagttccgatttgacccttgccgacggttgcggcgccgatttgagacttgccgctggcggaagctccgatttaactcttgccgacggttgcggcgccgatttgagacttgccgcgggcggaagctccgatttaactcttgccgccggttgcggcgccggtttgagacttgccgcgggcggaagctccgatatgactcttggcgccggttgcggcgccgatttgagacttgccgcgggcggaagctccgatttgactcttgccgccggttgcggcgccgtccgttggttctttgacggcgtcgtctccaccgttaaattcagcgtcggcgcgtttgtctttgaaaaagaccggcgcggcggcggaggaggcagcggaggaggtggtggcggcggcggtagaggaggcggcggcggcgcggcctccgcttccggtgtcggcggcttggcagattgcgtcatctccgcaggcggcggttccggcgcgtcgtcgccgcgcaacgctaccggctgtatgggcgcggtaccgcttttcgagaactccggtccgcccaatacgttttttacgctcttgccctcgccgtcgccgacgccgcttgccttataccgcctgtcacgctcatcctgcttcttaacggacgcctctttcacggaaacatacttgcttataacaccttcgactatttccgggatttccgggactccggagatttcgggaatcacgtcattaccgtaa

SEQ ID NO: 70546 - protein, 269 aa, Unknown
  Obtained from environmental sample
  misc_feature (1)..(269): Xaa is any amino acid
MGGGGGGSSWALAAGCGIDLRLAAGGSSDLTLADGCGADLRLAAGGSSDLTLADGCGADLRLAAGGSSDLTLAAGCGAGLRLAAGGSSDMTLGAGCGADLRLAAGGSSDLTLAAGCGAVRWFFDGVVSTVKFSVGAFVFEKDRRGGGGGSGGGGGGGGRGGGGGAASASGVGGLADCVISAGGGSGASSPRNATGCMGAVPLFENSGPPNTFFTLLPSPSPTPLALYRLSRSSCFLTDASFTETYLLITPSTISGISGTPEISGITSLP

SEQ ID NO: 70547 - DNA, 3135 bp, Unknown
  Obtained from environmental sample
  misc_feature (1)..(3135): n is a, c, g, or t
atgggcttctttgatgtaatcattaaactgatcggcggctccaagcaagaacgagacgttaagaatttaaagccaatcctcgagagcgtgaacgaatttcgcgccgcgacctccgccctctccgacgacgccctaaaggccaagaccgccgagttccgtgagcgcattttcgccggcgagacgctcgacgacctcctcccggaggcctacgccgtcgtgcgtgaggccacccaccgcgtactcggcgaacgcaagaccgtgaccgactcgtccagcggcgagcagatcccgttcatggcccacttcgacgtgcaggtaatgggcgccatcgtcctgcatcagggcaagatatcggagatgaagacgggcgagggcaagacgcaggtggcggctatggcggcgtacctcaacgcgctgagcggcaaaggcgtgcacgtcatcaccgtcaacgactacttggcgcggcgcgacagcgagtggatggggaagatattcggttttctggggttgacggtcggatgcctcgacattaccgagccgcacagccccgagcggagggcggcctacgcttcggatattacctttggcaccaacaacgagttcggcttcgactacctgcgcgacaacatggccggggcgccggagcactgcgtgcagagggagctcaacttcgccatcgtcgacgaggtggacaacatcctcatagacgaggcgaggacgccgctcatcatctccggaccggtcacaaagtccaaccgcgagtacgaggaactaaaaccccgggtggtcaagctggtctccgctcaggcggctctgacgcagaaaatcgtggacgaggccgaggaactgctcaagcaagacggcaaggagtttgaggccggtttcaaactcatggtcatgcacaagggcgcgccgaggaacaagcgtttcatgaagctcataaaggagcagggcgccgctaagtacatgaagatggtggagacggaattcctgcgcgacaagaaattgcacgagattgacgaggagctttactatacaatagacgaatcgggtcacagcgccgaccttaccgaaaaagggcgggtgctggtcggcggaaacaaccccgagtttttcacagtgcccgacctcgcggtgacgctcggcaagatagaccgcgacgaggcgctctccgtacaggagaaagcggagcgcaaagaggcggcccaccgcgagtacgcggagatatcggagcgcatacacagcgtcgggcagttgcttcgcgcctactcgctattcgagaaggacgtcaactatgtggtgcaggacggtcagatactcatcgtagacgagttcaccggccgcatactgcacggacgccgctacagcgaagggctccatcaggcgcttgaggcgaaagagggggtgaaggtcgccggagagaaccagacgctggccaccatcaccttccagaattttttcaagatgtacaacaaactcgccggaatgaccggtaccgccgtcacggaggcggcggagttccacgagatatacaagctcgacgtggtgaccgtccccacaaataggacgcttaaacggatggactacgacgacgaaatatacaagacccaccgcgagaagtacaatgccatcgtgcaggacataagggcgatgaacgagcttggccgcccgtgtttggtcggcacgacgtcaatagagaaatcggaactcctaagccgcatgcttttgcgggccggcgttcagcatgaggtgttgaacgcgaagcagcacgcgaaggaggcggctatagtggcccaagcggggcgtcttggcgcggtgaccatagccacgaacatggccggtcgcggaacggacatagtgctgggcggcaacttcgaggctatggccaatcacgaactgcacaaggagggcgttgaccccgacactatgacgctggaggagaagcgccaaaagttcgccaagctgtttgctctcgtcggcgacgagcacgacaaagtgttgagtttgggcggactgcacatcataggcacggagcgccacgagagccgccgcatagacaaccagctgcgcggacgcgccggacgtcaaggcgaccccgggtcgtcgaagtttttcttgtctatagacgacgaccttatgcgcatattcggcgccgagaggatcaggcttgttatggacaagctcggtacgccggagggcgaggcgataagccacccgtgggtctccaactcgatagccggcgcccagaaacgcgtagaggggcgcaacttcgatatccgcaaacatttaaaagagtacgacgacgtaatgaaccttcagcgtcgcgagatatacgggctgcgccagagaatactgcgcggtgagaatttgaaggacgagatactcgaccagatcgcgagcgccgtgagggacatggtgatgaagtacgcccccgagcgcgtatactccgaggagacgtggaacataaacggcctgcgcgatgaggcgcagaccgcattcggcgtggtgtacgcggctgatgaggctaaagtttcgtcgatgaaccaaaaagagctattcgacgatgtatgggcgcttgtggaggcgcgctatatagagaaggaggtgcgcttcggcgccgaggatatgcgccgctttgagcgcggagtttttctcatggtgatagacgatttgtggaaagatcacctcttcgagatggatcatttgaagggcggcgttcagttcagggcgttcggtcagaagaacccgctctttgagtatcagcgcgaggggttgcagatgttcaaggaactgcgcgccaatatcgcgagggaggtgtcgaattacatattccgcttggagaaggcggagcgccgggtttccgcaaacgcttttgccggggcaagggcggtgcacgacgccgcccagacgctcttcggcggcacgacgacgtcgtcgggcggggaaggggcgtctataaacgttcgtccgagggcgatgccgggggcgacgatgacgacaaataggggaggtggcgaggacgggcgtccggcgcagcagcagccgataagggtgggcccgaaggtagggaggaatgatccttgcccttgcgggagcggtaagaagtataagaattgttgcggacagaattcataa

SEQ ID NO: 70548 - protein, 1044 aa, Unknown
  Obtained from environmental sample
  DOMAIN (1024)...(1044): SEC-C motif
  misc_feature (1)..(1044): Xaa is any amino acid
MGFFDVIIKLIGGSKQERDVKNLKPILESVNEFRAATSALSDDALKAKTAEFRERIFAGETLDDLLPEAYAVVREATHRVLGERKTVTDSSSGEQIPFMAHFDVQVMGAIVLHQGKISEMKTGEGKTQVAAMAAYLNALSGKGVHVITVNDYLARRDSEWMGKIFGFLGLTVGCLDITEPHSPERRAAYASDITFGTNNEFGFDYLRDNMAGAPEHCVQRELNFAIVDEVDNILIDEARTPLIISGPVTKSNREYEELKPRVVKLVSAQAALTQKIVDEAEELLKQDGKEFEAGFKLMVMHKGAPRNKRFMKLIKEQGAAKYMKMVETEFLRDKKLHEIDEELYYTIDESGHSADLTEKGRVLVGGNNPEFFTVPDLAVTLGKIDRDEALSVQEKAERKEAAHREYAEISERIHSVGQLLRAYSLFEKDVNYVVQDGQILIVDEFTGRILHGRRYSEGLHQALEAKEGVKVAGENQTLATITFQNFFKMYNKLAGMTGTAVTEAAEFHEIYKLDVVTVPTNRTLKRMDYDDEIYKTHREKYNAIVQDIRAMNELGRPCLVGTTSIEKSELLSRMLLRAGVQHEVLNAKQHAKEAAIVAQAGRLGAVTIATNMAGRGTDIVLGGNFEAMANHELHKEGVDPDTMTLEEKRQKFAKLFALVGDEHDKVLSLGGLHIIGTERHESRRIDNQLRGRAGRQGDPGSSKFFLSIDDDLMRIFGAERIRLVMDKLGTPEGEAISHPWVSNSIAGAQKRVEGRNFDIRKHLKEYDDVMNLQRREIYGLRQRILRGENLKDEILDQIASAVRDMVMKYAPERVYSEETWNINGLRDEAQTAFGVVYAADEAKVSSMNQKELFDDVWALVEARYIEKEVRFGAEDMRRFERGVFLMVIDDLWKDHLFEMDHLKGGVQFRAFGQKNPLFEYQREGLQMFKELRANIAREVSNYIFRLEKAERRVSANAFAGARAVHDAAQTLFGGTTTSSGGEGASINVRPRAMPGATMTTNRGGGEDGRPAQQQPIRVGPKVGRNDPCPCGSGKKYKNCCGQNS

SEQ ID NO: 70549 - DNA, 516 bp, Unknown
  Obtained from environmental sample
  misc_feature (1)..(516): n is a, c, g, or t
gtgctccggcgccccggccatgttgtcgcgcaggtagtcgaagccgaactcgttgttggtgccaaaggtaatatccgaagcgtaggccgccctccgctcggggctgtgcggctcggtaatgtcgaggcatccgaccgtcaaccccagaaaaccgaatatcttccccatccactcgctgtcgcgccgcgccaagtagtcgttgacggtgatgacgtgcacgcctttgccgctcagcgcgttgaggtacgccgccatagccgccacctgcgtcttgccctcgcccgtcttcatctccgatatcttgccctgatgcaggacgatggcgcccattacctgcacgtcgaagtgggccatgaacgggatctgctcgccgctggacgagtcggtcacggtcttgcgttcgccgagtacgcggtgggtggcctcacgcacgacggcgtaggcctccgggaggaggtcgtcgagcgtctcgccggcgaaaatgcgctcacggaactcggcggtcttggcctttag

SEQ ID NO: 70550 - protein, 171 aa, Unknown
  Obtained from environmental sample
  misc_feature (1)..(171): Xaa is any amino acid
MLRRPGHVVAQVVEAELVVGAKGNIRSVGRPPLGAVRLGNVEASDRQPQKTEYLPHPLAVAPRQVVVDGDDVHAFAAQRVEVRRHSRHLRLALARLHLRYLALMQDDGAHYLHVEVGHERDLLAAGRVGHGLAFAEYAVGGLTHDGVGLREEVVERLAGENALTELGGLGL

SEQ ID NO: 70551 - DNA, 576 bp, Unknown
  Obtained from environmental sample
  misc_feature (1)..(576): n is a, c, g, or t
atgtttgcggatatcgaagttgcgcccctctacgcgtttctgggcgccggctatcgagttggagacccacgggtggcttatcgcctcgccctccggcgtaccgagcttgtccataacaagcctgatcctctcggcgccgaatatgcgcataaggtcgtcgtctatagacaagaaaaacttcgacgacccggggtcgccttgacgtccggcgcgtccgcgcagctggttgtctatgcggcggctctcgtggcgctccgtgcctatgatgtgcagtccgcccaaactcaacactttgtcgtgctcgtcgccgacgagagcaaacagcttggcgaacttttggcgcttctcctccagcgtcatagtgtcggggtcaacgccctccttgtgcagttcgtgattggccatagcctcgaagttgccgcccagcactatgtccgttccgcgaccggccatgttcgtggctatggtcaccgcgccaagacgccccgcttgggccactatagccgcctccttcgcgtgctgcttcgcgttcaacacctcatgctgaacgccggcccgcaaaagcatgcggcttag

SEQ ID NO: 70552 - protein, 191 aa, Unknown
  Obtained from environmental sample
  misc_feature (1)..(191): Xaa is any amino acid
MFADIEVAPLYAFLGAGYRVGDPRVAYRLALRRTELVHNKPDPLGAEYAHKVVVYRQEKLRRPGVALTSGASAQLVVYAAALVALRAYDVQSAQTQHFVVLVADESKQLGELLALLLQRHSVGVNALLVQFVIGHSLEVAAQHYVRSATGHVRGYGHRAKTPRLGHYSRLLRVLLRVQHLMLNAGPQKHAA

SEQ ID NO: 70553 - DNA, 426 bp, Unknown
  Obtained from environmental sample
  misc_feature (1)..(426): n is a, c, g, or t
atgaaaagatttaatttcaaacttcagaaaatccttcggttaaggaaattcagggaagaacaatgtaaaatagagcttgaacaggctttaggcgtccttaacatgatagaaaacgaaattaaagcaaacgcagttaaacgacataatgccgcagctcttaggtttacggatataaatgaagccgggaaatgggacaattacattttaaggctggatcaggaaaccgaacggctgatggaaagagcggcgagcgcgcaaattgttgtcgaggaaaaacgcgccaaatatattgaagcgtcaaaagccctgaaagcgcttgagaaaataaaagaaaaaaaagaaaaagaataccgaaaagaagcggcggacttgcagatggcggaaacagacgatcttactgcggccaggtacgaaacgaaagtataa

SEQ ID NO: 70554 - protein, 141 aa, Unknown
  Obtained from environmental sample
  misc_feature (1)..(141): Xaa is any amino acid
MKRFNFKLQKILRLRKFREEQCKIELEQALGVLNMIENEIKANAVKRHNAAALRFTDINEAGKWDNYILRLDQETERLMERAASAQIVVEEKRAKYIEASKALKALEKIKEKKEKEYRKEAADLQMAETDDLTAARYETKV

SEQ ID NO: 70555 - DNA, 1506 bp, Unknown
  Obtained from environmental sample
  misc_feature (1)..(1506): n is a, c, g, or t
gtggaaaccgcaatttttgaaaaatatcttaataccgctcaacgtaccgatcctataaaatgcgtcggtaaaatagttaatgttaagggtttgttaatagaaagccatggaccgcaggctattatcggagaagtttgcagaattataactcctcgcggcaaaggccagataagagccgaagttgtaggacttagagacgaaatagtccagcttatggcgtttgaggaaacagacgggctggaagtcggagacagagtaatcgccctgggaagccggctggaagtgccggtgtcaaataaacttttaggcagggtgctggacgcgtttggaactcccattgacggcaagggcgatattgacgccgtcgccatgtatcccgctctcgcaagccctcccgatcccttaaaaagaagacggataacagaacgcataacaacaggtatccgcgccatagacgggcttctcgctgtgggcaagggacagcgcctcggtattttctcgggctcaggcgtcggcaagtctacatttctgggcatgattgcgcgtaacacaagcgccgatgtcaacgttgtcgcccttatcggagagcgcggcagggaagtaaacgactttattgaaaacgctttaggacctgaagggcttgcgcgcagtgtattggttgtaacacccggtaattcgccgccacttatgcgtttgcgcggggcttatgtcgctacggcggttgcggaatatttccgcgatcagggcaacgacgtaatgctgatgttcgattccgttacgcgctttgcccgcgctatgagagaaatagggctcgcgtccggggaacctcccgcgcaaaggggctttccgcccagcatgttcgattccatgccgaaacttcttgaaaggtcaggtacttccgacaagggcagtataaccggtttttacacggtgcttgtagacgcagacgatatggacgaacctgtcgctgatactgtccggggtattttggacgggcatatcattctttcgaggaatctggcggaggcttatcattatccgcctattgacgtgctaaaaagtatttcccgtcttgcgtcaacggtagctggacccgcaagcaaaaacgctaccggcataatacgaagaaacatggctacttacgctgaaatggaagattttatcaatataggcgagtacaaaagcggttccaatcccgtggtggacgaggctatagccaaacacatcccgataagggattttcttatacaggatgttgacgaaccttcttcgcttgaggatacccttaccgcaatgtcacaaatagcggaaattcaaataccgcccgaagaaatgactgataataacgcgaaacttgtttccgccgccaaacccgcgcaagttaaaaaagaaaagcaacagccgcaaaatacaaattccgcgcaggataccgccaacgcccttaacagcgtcgccgccctgttctcctcaacgtccggtttgggcggttttggacagattaaataa

SEQ ID NO: 70556 - protein, 501 aa, Unknown
  Obtained from environmental sample
  DOMAIN (25)...(90): ATP synthase alpha/beta family, beta-barrel domain
  misc_feature (1)..(501): Xaa is any amino acid
METAIFEKYLNTAQRTDPIKCVGKIVNVKGLLIESHGPQAIIGEVCRIITPRGKGQIRAEVVGLRDEIVQLMAFEETDGLEVGDRVIALGSRLEVPVSNKLLGRVLDAFGTPIDGKGDIDAVAMYPALASPPDPLKRRRITERITTGIRAIDGLLAVGKGQRLGIFSGSGVGKSTFLGMIARNTSADVNVVALIGERGREVNDFIENALGPEGLARSVLVVTPGNSPPLMRLRGAYVATAVAEYFRDQGNDVMLMFDSVTRFARAMREIGLASGEPPAQRGFPPSMFDSMPKLLERSGTSDKGSITGFYTVLVDADDMDEPVADTVRGILDGHIILSRNLAEAYHYPPIDVLKSISRLASTVAGPASKNATGIIRRNMATYAEMEDFINIGEYKSGSNPVVDEAIAKHIPIRDFLIQDVDEPSSLEDTLTAMSQIAEIQIPPEEMTDNNAKLVSAAKPAQVKKEKQQPQNTNSAQDTANALNSVAALFSSTSGLGGFGQIK

SEQ ID NO: 70557 - DNA, 528 bp, Unknown
  Obtained from environmental sample
  misc_feature (1)..(528): n is a, c, g, or t
ttgacatcggcgcttgtgttacgcgcaatcatgcccagaaatgtagacttgccgacgcctgagcccgagaaaataccgaggcgctgtcccttgcccacagcgagaagcccgtctatggcgcggatacctgttgttatgcgttctgttatccgtcttctttttaagggatcgggagggcttgcgagagcgggatacatggcgacggcgtcaatatcgcccttgccgtcaatgggagttccaaacgcgtccagcaccctgcctaaaagtttatttgacaccggcacttccagccggcttcccagggcgattactctgtctccgacttccagcccgtctgtttcctcaaacgccataagctggactatttcgtctctaagtcctacaacttcggctcttatctggcctttgccgcgaggagttataattctgcaaacttctccgataatagcctgcggtccatggctttctattaacaaacccttaacattaactattttaccgacgcattttataggatcggtacgttga

SEQ ID NO: 70558 - protein, 175 aa, Unknown
  Obtained from environmental sample
  misc_feature (1)..(175): Xaa is any amino acid
MTSALVLRAIMPRNVDLPTPEPEKIPRRCPLPTARSPSMARIPVVMRSVIRLLFKGSGGLARAGYMATASISPLPSMGVPNASSTLPKSLFDTGTSSRLPRAITLSPTSSPSVSSNAISWTISSLSPTTSALIWPLPRGVIILQTSPIIACGPWLSINKPLTLTILPTHFIGSVR

SEQ ID NO: 70559 - DNA, 1221 bp, Unknown
  Obtained from environmental sample
  misc_feature (1)..(1221): n is a, c, g, or t
atgttaaaggccgtattcagaccgcaagaacttgttccgctgcaggagaaaatgctcattgatcctcccacgtctttcgctgatcttgcccatttggcgccgaaagaggaagtcgccgaggatcttgacgatgtcgaggaatacacaggccctacagcggacgatctccgccgtgaagccgaggcgtttaaaacgcaatgggaagaagaaaaagaaagaatgatttccgacgcgaaagcgcaggcggaaaaaattattcaggatgcccaggatactgcccggatagaattacaaagcaaaaccgacgaaggacagtctgtaaaacagcaggcggaagctgacgcgaaaaaaatcattgatgacgcgaataaaaaaatcaaggagatggaaaccgaggtaagaaagactcttgacggtgaacttaaggcggcgcaggacaagggcagggaagagggcaaggattcaggttatgccgaaggcaaggcggaagttgaaaggcttatttcccgcgttcaggtaatgctggagcgcgctcaggataagaggggggagattctcgacgaaacagaaaaggaaataatcgatcttgtattgatgatttcgcgaaaagtaataaaagttctttcggaaaatcaggaaggcgtaattatctctaatgtgatacaggcgcttagaaaggtaaagacaaagggaacatgcattataaaggttaatatggatgatttacagcttgcgacggaacacaaggaagaatttataaaacttgtcgaaggcgtaaaagacattcaaatacatgaagacactaccgttgataagggcggatgtataattgaaaccgatttcggcgagattgacgcccgtatttcaagccagcttgcggaattggaaacaaaaattcttgagttatcgcctattaaatcttcaaaaccgccgattaaccgcgccgtgaatctggaaaacgagttagccgcttctacaagtttgattgataaaatcaagaagaatgaagaaatgtcaaataaagaagacgaagtaaaaagtcagtacgaagaaataaaacaaaaggaagaaaaaaaagataaaaaaaataaagaagaggaacaagcagaagtgtctccggccgtaaacgcggctcttaccgcgtccgccgcgcttgccgcccttgctacaatgggcacaaaaggcagaagggataccgacaaaaaacttcagataacatag

SEQ ID NO: 70560 - protein, 406 aa, Unknown
  Obtained from environmental sample
  DOMAIN (92)...(308): Nodulation protein NolV
  misc_feature (1)..(406): Xaa is any amino acid
MLKAVFRPQELVPLQEKMLIDPPTSFADLAHLAPKEEVAEDLDDVEEYTGPTADDLRREAEAFKTQWEEEKERMISDAKAQAEKIIQDAQDTARIELQSKTDEGQSVKQQAEADAKKIIDDANKKIKEMETEVRKTLDGELKAAQDKGREEGKDSGYAEGKAEVERLISRVQVMLERAQDKRGEILDETEKEIIDLVLMISRKVIKVLSENQEGVIISNVIQALRKVKTKGTCIIKVNMDDLQLATEHKEEFIKLVEGVKDIQIHEDTTVDKGGCIIETDFGEIDARISSQLAELETKILELSPIKSSKPPINRAVNLENELAASTSLIDKIKKNEEMSNKEDEVKSQYEEIKQKEEKKDKKNKEEEQAEVSPAVNAALTASAALAALATMGTKGRRDTDKKLQIT

SEQ ID NO: 70561 - DNA, 633 bp, Unknown
  Obtained from environmental sample
  misc_feature (1)..(633): n is a, c, g, or t
atggcgagacccagacttcgcgctgattttggcttatttggagccgaacaggcctcgattatcctgcaaaacctgccgcatgaagtgcagagcgacgtggcgcgccgtatcgcgactatggacagaacaagcccggaagtattgcgcgaagtagaacgagtacttgaaaagaaactttcgtcgctgtccagcgaagactacaccgcggcgggaggcgttgaaagcatcgttgaaatcctcaaccttgtagaccgcgcgtctgaaaaacagattattgaagcccttgaagacgaagacccggaacttgccgaagagatcaaaaagagaatgttcgtattcgaagacatcgttatgctggacgaccgcgccattcagaaggttatgcgcgaagtggactcccaagaactcgcgaaagcgctcaaatctgtcgactcggaagtacaggacaagattttcaagaatatgtccaagcgcgccgcaagcatgctcaaggaagacatggagtatatggggccggtacgcttgaaagacgtagaagaatcgcagcagaagattgtgtccatcatccgccatttggaggatacgggcgaaatcgtcgtcgcgcgcgccggagaagacgaacttgttgtgtga

SEQ ID NO: 70562 - protein, 210 aa, Unknown
  Obtained from environmental sample
  DOMAIN (92)...(201): FliG C-terminal domain
  misc_feature (1)..(210): Xaa is any amino acid
MARPRLRADFGLFGAEQASIILQNLPHEVQSDVARRIATMDRTSPEVLREVERVLEKKLSSLSSEDYTAAGGVESIVEILNLVDRASEKQIIEALEDEDPELAEEIKKRMFVFEDIVMLDDRAIQKVMREVDSQELAKALKSVDSEVQDKIFKNMSKRAASMLKEDMEYMGPVRLKDVEESQQKIVSIIRHLEDTGEIVVARAGEDELVV

SEQ ID NO: 70563 - DNA, 540 bp, Unknown
  Obtained from environmental sample
  misc_feature (1)..(540): n is a, c, g, or t
atggcggatgatggacacaatcttctgctgcgattcttctacgtctttcaagcgtaccggccccatatactccatgtcttccttgagcatgcttgcggcgcgcttggacatattcttgaaaatcttgtcctgtacttccgagtcgacagatttgagcgctttcgcgagttcttgggagtccacttcgcgcataaccttctgaatggcgcggtcgtccagcataacgatgtcttcgaatacgaacattctctttttgatctcttcggcaagttccgggtcttcgtcttcaagggcttcaataatctgtttttcagacgcgcggtctacaaggttgaggatttcaacgatgctttcaacgcctcccgccgcggtgtagtcttcgctggacagcgacgaaagtttcttttcaagtactcgttctacttcgcgcaatacttccgggcttgttctgtccatagtcgcgatacggcgcgccacgtcgctctgcacttcatgcggcaggttttgcaggataatcgaggcctgttcggctccaaataa

SEQ ID NO: 70564 - protein, 179 aa, Unknown
  Obtained from environmental sample
  misc_feature (1)..(179): Xaa is any amino acid
MADDGHNLLLRFFYVFQAYRPHILHVFLEHACGALGHILENLVLYFRVDRFERFREFLGVHFAHNLLNGAVVQHNDVFEYEHSLFDLFGKFRVFVFKGFNNLFFRRAVYKVEDFNDAFNASRRGVVFAGQRRKFLFKYSFYFAQYFRACSVHSRDTARHVALHFMRQVLQDNRGLFGSK

SEQ ID NO: 70565 - DNA, 1743 bp, Unknown
  Obtained from environmental sample
  misc_feature (1)..(1743): n is a, c, g, or t
ttgcgtgtcgcgttttcatccggcacggtaatgggcttcaccgtaatcggattagggcttttggacttgtcaatatggtttttcctgttgaagtatgtgttttatgcaagtcttgacggagaccccgccaagcagattcagcttatttcttccgcgatgctgaccttcggcatgggcgcttccagtatggccctctttgcccgtgttggcggcggtatctttaccaaggccgccgatgtcggcgcggacctggtcggaaaggttgaggccggaatccccgaagatgatccccgcaatccggcggttattgccgacaacgtaggcgacaacgtaggcgacgtcgcgggtatgggcgccgacctttatgaatcctatgtcggttccattgtcgccaccatggcgctggcggtttcggcgggtcataactttaacggcgcggtggttcccatgctgatggccgctgtcggaacggtagcttccattatcggaactttctttgtacgttgcggagagaaggcggatcaaaagtcactgctgggcgccttgcgcaaaggaacctacatttcttccgctatcatcgctgttgtgtcctatttcgtcattcgtttggcgcttcctgacaaccagggtgtctatttcgcgatattatcgggattgatagccggcgtcctcatcgggttcttcaccgagtattatacttcggatcattacaatcctaccaaagaacttgccgccgcgagcctcaccgggcctgccacgattatcatcgggggaatttctttgggaatgctttctaccctgctgccggtaatcattgtcggcgcttcggtgttgaccagtttctttgtttcaggcgggggaactgatttctctcatggcctgtatggggttggtatttccgcggttggtatgctttctaccctgggtattaccctggcaaccgacgcttacggcccggttgcggataacgccggcggcattgccgaaatgtcacatcttccgcacgaggttcgagaacgcaccgacgctctggattctctgggaaataccactgccgccacaggcaagggtttcgcgatcggttccgcggctctcaccgctctggccctgattgtagcttatcttgacgaagttaaactgtttatagaaagggatggtttgaattttaaattagatcttgatctgaccaatccccctgtactgattggtctgtttatcggcgttatgcttcccttccttttctcatccatgaccatgaacgcggtaggccgtgcggctcagaacatcgtgaaagaagttcgccgtcagtttaaggaaatcaaaggtttgatggaaggcacggcggaagcggactatgccacttgtgtggatatttgtacccgcggcgcccagaaagaaatgatacttcccgccctgactggcattatttcacctattgttgttggattggccctgggggtgaacggcgtggccggtatgctcgccggcgcgacagcatccggctttgttctggcagttatgatggccaactcaggcggcgcgtgggacaacgccaagaagcacattgaaggcggaacccacggcggcaagggcagcgacgcccacaaagcggcggtcatcggcgacaccgtcggcgacccgttcaaagacaccgcgggtccgtcgctcaacatcctcgtgaagctgatcagcgtcgtgtcgctggttatcgtgccgattatcgcggcgattcacgggaagtga

SEQ ID NO: 70566 - protein, 580 aa, Unknown
  Obtained from environmental sample
  DOMAIN (1)...(571): Inorganic H+ pyrophosphatase
  misc_feature (1)..(580): Xaa is any amino acid
MRVAFSSGTVMGFTVIGLGLLDLSIWFFLLKYVFYASLDGDPAKQIQLISSAMLTFGMGASSMALFARVGGGIFTKAADVGADLVGKVEAGIPEDDPRNPAVIADNVGDNVGDVAGMGADLYESYVGSIVATMALAVSAGHNFNGAVVPMLMAAVGTVASIIGTFFVRCGEKADQKSLLGALRKGTYISSAIIAVVSYFVIRLALPDNQGVYFAILSGLIAGVLIGFFTEYYTSDHYNPTKELAAASLTGPATIIIGGISLGMLSTLLPVIIVGASVLTSFFVSGGGTDFSHGLYGVGISAVGMLSTLGITLATDAYGPVADNAGGIAEMSHLPHEVRERTDALDSLGNTTAATGKGFAIGSAALTALALIVAYLDEVKLFIERDGLNFKLDLDLTNPPVLIGLFIGVMLPFLFSSMTMNAVGRAAQNIVKEVRRQFKEIKGLMEGTAEADYATCVDICTRGAQKEMILPALTGIISPIVVGLALGVNGVAGMLAGATASGFVLAVMMANSGGAWDNAKKHIEGGTHGGKGSDAHKAAVIGDTVGDPFKDTAGPSLNILVKLISVVSLVIVPIIAAIHGK

SEQ ID NO: 70567 - DNA, 1308 bp, Unknown
  Obtained from environmental sample
  misc_feature (1)..(1308): n is a, c, g, or t
atgtccacacagataatacaaggcccgaaagggacgcgggacttttacccggaggatatgtcttttctacagcatatctttgactcttggcaccgctcctgccgactctacgggtttgagcagtacgaggggccgatgttcgagcatcttgacctatacacgcagaaatccggcgccgagattgagaagcagctctattcgtttgaggacaagggagggcggcagatcgctttgcggcctgaacttacgcctactttggcccggatggtcgcggcgcaggggacgaacctaaagaggccggtgcggtggtactccatatcgcgcttgttccggtacgagaggatgcagaaggggcggttaagggagttcatacagctgaatatggacatcttgggcgtcgaggacgtgagcgccgacgcggagcttatcgcggcggcggtcgatatgatgagggctttcgggttcgacgagagtgattttaaggcgcgggtgtcgagccggacgcttttggaggagatgtttttggcctgcggagtggggcaagataagttgccgacgctctacgcgttgcttgataagaaaggcaagatcgcgacggaggagtttgaacgcgagcttgcggaggcggttgggagcggggatgtttgcgacaggatcaaggggcttttcaactgcgccggacttgaagatgtggagagattcgcggcgtctatcggagttagcatagattctatcgcccaattaaaaaagctcttttcgctgatcgacgcctacgggcttaaggactacgcggtcttcgacatagggatagtccgaggcttagcttattatacgggaatagtatttgagctatttgacgttcgcggcagtctgcgggcgatagccggcggcgggcgctacgataaattggttggtctatacggcggccccgcgacgccggcggtcggtttcgcggcgggcgacgtggtgctgggtgaattgataagggcaaaatcgttggctccgaaaaaatcgccgcgcagcgacgtctttatcgtatcgatagacgacgacgcgcaaccggaaacgataaaaaccgcgcagcgtttgaggtcggcaaacatatcatgcgaattctcattaaagagctggatgaacgtcggtaagcagttaaaatttgccgacgccgccggttcaaaatacgcgctctttatcggcggcgacgaggcgaaatcgggacaggcgcggttgaaagacttggctacggggaacgaggagttgattgacgcggtgaaattagaggagcggttggtcgatataataagttga

SEQ ID NO: 70568 - protein, 435 aa, Unknown
  Obtained from environmental sample
  DOMAIN (342)...(433): Anticodon binding domain
  misc_feature (1)..(435): Xaa is any amino acid
MSTQIIQGPKGTRDFYPEDMSFLQHIFDSWHRSCRLYGFEQYEGPMFEHLDLYTQKSGAEIEKQLYSFEDKGGRQIALRPELTPTLARMVAAQGTNLKRPVRWYSISRLFRYERMQKGRLREFIQLNMDILGVEDVSADAELIAAAVDMMRAFGFDESDFKARVSSRTLLEEMFLACGVGQDKLPTLYALLDKKGKIATEEFERELAEAVGSGDVCDRIKGLFNCAGLEDVERFAASIGVSIDSIAQLKKLFSLIDAYGLKDYAVFDIGIVRGLAYYTGIVFELFDVRGSLRAIAGGGRYDKLVGLYGGPATPAVGFAAGDVVLGELIRAKSLAPKKSPRSDVFIVSIDDDAQPETIKTAQRLRSANISCEFSLKSWMNVGKQLKFADAAGSKYALFIGGDEAKSGQARLKDLATGNEELIDAVKLEERLVDIIS

SEQ ID NO: 70569 - DNA, 1491 bp, Unknown
  Obtained from environmental sample
  misc_feature (1)..(1491): n is a, c, g, or t
atggtaataaaaccgacactcgaagaagcgagacaaatcgcgaagtccgacggcggcaaatacagcgtcgtaccgatctgcaccgagctcttcgccgacaccgccacgccgatatgcgtgctgagaaaactgaaagccgtcagccggcactgcttcatcctcgaaagcgccgaggacacgaaaaactggggcaggtacacattcttgggcttcgacccatccagcaagattacctgcatagacggcgcaatgaagatcaccgcgccggacgggagcgtaacgtcctttcaaacggataatccgaacaagcatatacaggagatgttggatcaatacagaagcgtaaaaatcgaaggcctcccccacttcaccggcgggcttgtgggctacttcgcctacgactacgcgaaatacgccgagccgacgctaaagttagacgcccgcgacgaggagcattttcaggacgtagaccttatgctcttcgacaaggttatcgcttttgaccattataggcagaagatcgttctgatagcaaatatcggcatcgagaatattgatacggagtacgagcgcggagcaggggcgcttgagcggctgaaaaatttaatagagagcggcacgtcggaaccgatagcgccggtgaatttgaaatcggaattaaaagccctctttacaaaagaggaattttgcgcgatggtggataaggccaagtggcacataaaggagggcgatatttttcaggtggtgctctccaaccgttttgaggccgattttgacggcagtctcttcgacgcctaccgcgtgttgcggacgataaacccgtcgccgtacatgttctatttcagcgggagcgatctggagatcgccggcgcgtcgccggagactctagtgaagctgaaagacggcaaactctacaccttcccgctggccggtacgcgtccgcgcggcgctacggaggaggaggacgtggcgctcgaaaaaggtctgcttgcggatgagaaagaattggcggaacacaatatgctggttgacttagggcgcaacgacctgggcaaaatcagcaagttcggctccgtatccgttgaaaagtatatgtcgatactgcgtttctcccacgtcatgcacataggctccacggtaagcggcgacatcatagacggcaagaccggcttagacgcgataaacgccgtactgcctgccggcacgctatccggcgcccctaaaatccgcgccatgcaaatcataaatgaacttgaacggtgcaaacgcggcgtctacggcggcgcgatcggctacttagacttcaccggtaatatggacacctgcattgccataagaatcatctacaagaggggcggcaaagtcttcatccgctccggcgccgggatagtggccgacagcaacccggaaacggaataccaagaatgcgtaaataaatccacggcggtgaaaaacgcgctcacgcagtccgcgggaggaattgacaaatga

SEQ ID NO: 70570 - protein, 496 aa, Unknown
  Obtained from environmental sample
  DOMAIN (26)...(176): Anthranilate synthase component I, N terminal region
  misc_feature (1)..(496): Xaa is any amino acid
MVIKPTLEEARQIAKSDGGKYSVVPICTELFADTATPICVLRKLKAVSRHCFILESAEDTKNWGRYTFLGFDPSSKITCIDGAMKITAPDGSVTSFQTDNPNKHIQEMLDQYRSVKIEGLPHFTGGLVGYFAYDYAKYAEPTLKLDARDEEHFQDVDLMLFDKVIAFDHYRQKIVLIANIGIENIDTEYERGAGALERLKNLIESGTSEPIAPVNLKSELKALFTKEEFCAMVDKAKWHIKEGDIFQVVLSNRFEADFDGSLFDAYRVLRTINPSPYMFYFSGSDLEIAGASPETLVKLKDGKLYTFPLAGTRPRGATEEEDVALEKGLLADEKELAEHNMLVDLGRNDLGKISKFGSVSVEKYMSILRFSHVMHIGSTVSGDIIDGKTGLDAINAVLPAGTLSGAPKIRAMQIINELERCKRGVYGGAIGYLDFTGNMDTCIAIRIIYKRGGKVFIRSGAGIVADSNPETEYQECVNKSTAVKNALTQSAGGIDK

SEQ ID NO: 70571 - DNA, 354 bp, Unknown
  Obtained from environmental sample
  misc_feature (1)..(354): n is a, c, g, or t
ttgcaccgttcaagttcatttatgatttgcatggcgcggattttaggggcgccggatagcgtgccggcaggcagtacggcgtttatcgcgtctaagccggtcttgccgtctatgatgtcgccgcttaccgtggagcctatgtgcatgacgtgggagaaacgcagtatcgacatatacttttcaacggatacggagccgaacttgctgattttgcccaggtcgttgcgccctaagtcaaccagcatattgtgttccgccaattctttctcatccgcaagcagacctttttcgagcgccacgtcctcctcctccgtagcgccgcgcggacgcgtaccggccagcgggaaggtgtag

SEQ ID NO: 70572 - protein, 117 aa, Unknown
  Obtained from environmental sample
  SIGNAL (1)...(25)
  misc_feature (1)..(117): Xaa is any amino acid
MHRSSSFMICMARILGAPDSVPAGSTAFIASKPVLPSMMSPLTVEPMCMTWEKRSIDIYFSTDTEPNLLILPRSLRPKSTSILCSANSFSSASRPFSSATSSSSVAPRGRVPASGKV

SEQ ID NO: 70573 - DNA, 372 bp, Unknown
  Obtained from environmental sample
  misc_feature (1)..(372): n is a, c, g, or t
ttggcgttcaaggatgaaatccaggctttactaaacaaaataatcaacgacaatgtaggcggaaattacaacgatgacgtgctaaaatcggctctgcctgagttgattaaaaagtgggctgataaagaaggcggcgatctttcggtcattttaccggaaggcgagctttccagactgcaaggcttttttaatgaaaaacttaaaagcgaactttcaaagggcgtggagttaaaatccaaccgcaagttagcttccggtttcagaatttcaaataaagaaggttctgtttactacgatttttcgtcggaagcggtcgcaaaacaactgtcggcttatttgaacccaaaactggcggaactcttaaaaaaataa

SEQ ID NO: 70574 - protein, 123 aa, Unknown
  Obtained from environmental sample
  misc_feature (1)..(123): Xaa is any amino acid
MAFKDEIQALLNKIINDNVGGNYNDDVLKSALPELIKKWADKEGGDLSVILPEGELSRLQGFFNEKLKSELSKGVELKSNRKLASGFRISNKEGSVYYDFSSEAVAKQLSAYLNPKLAELLKK

SEQ ID NO: 70575 - DNA, 558 bp, Unknown
  Obtained from environmental sample
  misc_feature (1)..(558): n is a, c, g, or t
gtgagatcatactattactttattgcccagcttccttctttgatttacgaacaaaaaccgcctatgtcttccgctcattttaaagagttagccgctgatttgctggaagacagcgatttgaaagtaatggattatctttcctttaacgacgtattctccgaaaaaggtaattgcgcttttgtaaaaaactggaaaaactgggaacgcgctttaaaattaaaccttgcaaaagagcgggcgataaagttaaagaaagatgttcagctaacggacattccgttttttccgcaggaagccgctattacagccgtcaaagcagttgacgaaaaatctccgttggacggcgaaattttactggataaagcgcgctggagcgcaatagactcaatcgccggcagcgattattacagcgtgaataatatttacgcttattatttaaaattattacttcttgaaagaagacaatcttttaatacagagaaaggatttgcagaatataaaactttgtacgctgaaattttaaaaagcgcgcaaaattccccgggggaaactaaatga

SEQ ID NO: 70576 - protein, 185 aa, Unknown
  Obtained from environmental sample
  misc_feature (1)..(185): Xaa is any amino acid
MRSYYYFIAQLPSLIYEQKPPMSSAHFKELAADLLEDSDLKVMDYLSFNDVFSEKGNCAFVKNWKNWERALKLNLAKERAIKLKKDVQLTDIPFFPQEAAITAVKAVDEKSPLDGEILLDKARWSAIDSIAGSDYYSVNNIYAYYLKLLLLERRQSFNTEKGFAEYKTLYAEILKSAQNSPGETK

SEQ ID NO: 70577 - DNA, 1761 bp, Unknown
  Obtained from environmental sample
  misc_feature (1)..(1761): n is a, c, g, or t
atgattggaacaaaaggattagtgacgggcgttaacggtaacatggtaagcgtccgttttgacggagatgtctccatgaacgaggtcggctatgtaaaagtcgccgataaacggctgaaaagcgaagtaatcagaattcgcggcgaaatcagccaacttcaggtctttgaaattaccaaaggtatttctatcggcgatgaagttgaatttacaggggatatgttatccgtcgaacttggtcccggtcttcttggacaggtttatgacggtcttcaaaaccccttgccccagttggcgcaagccgccggatactttctggaaaggggcgtttatcttgacgctctgcctgtatcaaatacatggcaatttacgcccaaggtaaaaccgggcgataaagtggaaagagccgacactctgggaacagttccggaaggctcctttacgcacagaatcatggttccctttaacctctacggaagctatacagtttcctgggtaaaagaagcgggaacatacaatatccgtgaaacaatcgcggaattaaaagacgaaaaaggaaacgccattcctgtaaagctcagcttccgctggcctgtaaaaagggcggttgactgctacgaggaacgccttaaacccacagagcctatggttacccgcgtccgccttatcgacacattcttccctgtagcgcgcggcggaacttactgtatccccggtcctttcggcgccggaaaaacagttctccagcaaattacaagccgttttgcggacgtagacattgtaatcgtagccgcctgcggtgagcgcgccggcgaagtcgtggaaaccttaaaagaattccccgaattaaaagacgaaaaaacaggccgttccctcatggaaagaacaatcattatttgtaatacatcttcaatgcccgtcgccgcgcgcgaagcttccgtatacacggctgtaacgctcgccgaatattacaggcagatgggtttgaacgtcctcttgcttgcggactccacaagccgctgggcgcaggcaatgcgcgaaatgtcagggcgcttggaagaaatccccggtgaagaagcgttccccgcttacatggaatctacaatcgccagcttctacgaaagagccggtatcgtccgcctgcgcgacggcagtttaggctccgtcacaatcggcggaacagtaagccccgcgggcggtaactttgaagaaccagtaacgcaggcgacattaaaagtcgtaggcgcgttccacggtctttcccgcgaacgttccgacgcgcgcaagttccccgccattcacccgcttgattcatggtcgaagtacaaaggaatcatcgacggcgaaaaagtagcctacgcgcatggttttatgcgccgcagttccgaagttgaacagatgatgaaggtcgtcggcgaggaaggaacaagcatagaagactacattattttccttaagggcgatttaatcgacgccgtatacttccagcagaactcgtttgacgaagtagacgcggcagtaaaacccgaaagacagaaatatgtttttgccaaattgttgtttattcttggttcaaaatttacttttgcggacaaaaatgaagcgcgttcatggtttaacaaactcaggcaaaaattcctcgattacaacggaagccaatggaagagcgatcgttttgacaaacttgagtccgaaattgaatcggctgtaaagagtcaatcacagggtcttgataagaccgccgaaaaaataatttactag

SEQ ID NO: 70578 - protein, 586 aa, Unknown
  Obtained from environmental sample
  DOMAIN (8)...(72): ATP synthase alpha/beta family, beta-barrel domain
  misc_feature (1)..(586): Xaa is any amino acid
MIGTKGLVTGVNGNMVSVRFDGDVSMNEVGYVKVADKRLKSEVIRIRGEISQLQVFEITKGISIGDEVEFTGDMLSVELGPGLLGQVYDGLQNPLPQLAQAAGYFLERGVYLDALPVSNTWQFTPKVKPGDKVERADTLGTVPEGSFTHRIMVPFNLYGSYTVSWVKEAGTYNIRETIAELKDEKGNAIPVKLSFRWPVKRAVDCYEERLKPTEPMVTRVRLIDTFFPVARGGTYCIPGPFGAGKTVLQQITSRFADVDIVIVAACGERAGEVVETLKEFPELKDEKTGRSLMERTIIICNTSSMPVAAREASVYTAVTLAEYYRQMGLNVLLLADSTSRWAQAMREMSGRLEEIPGEEAFPAYMESTIASFYERAGIVRLRDGSLGSVTIGGTVSPAGGNFEEPVTQATLKVVGAFHGLSRERSDARKFPAIHPLDSWSKYKGIIDGEKVAYAHGFMRRSSEVEQMMKVVGEEGTSIEDYIIFLKGDLIDAVYFQQNSFDEVDAAVKPERQKYVFAKLLFILGSKFTFADKNEARSWFNKLRQKFLDYNGSQWKSDRFDKLESEIESAVKSQSQGLDKTAEKIIY

SEQ ID NO: 70579 - DNA, 1296 bp, Unknown
  Obtained from environmental sample
  misc_feature (1)..(1296): n is a, c, g, or t
atggacaaagtatatagcaagattgaatcaataacaggaagcgttattaccgtcaaggctgacggcattcgctacggagacttggcggaagtcgacacggtattcggcacatctcttgccgaggtaaacaggcttaacggtgataccgtatcgcttcaggttttcgcgggcggtcgcggtatctccacaggcgatacagtgcgctttcttggacgccccatgcaggttgcgtactcagaaaaccttatgggcagggtgttcacaggttccggtaaaccgcgcgataacggtcccgaattaacagacaataaaatcccgataggcggaccttcagtaaatccgtctcagcgtattattccgcgcaagatgatccgcaccggtatcccgatgatcgatctgttcaacacattggtagtttctcagaagctgccgattttctccgtatccggcgagccgtacaacgagcttcttgcgcgtatcgccatgcaggcggaagttgacgtaatcatcctcggcggaatgggcttaaagtacgacgactatcttaactttaaagataccctggagcagggcggatccctttccaaaacggtcatgtttgtgcataccgctgccgacccgaccgtagagtgcctgatgatcccggatatgagcctggctgtggccgaacagttcgccctgcagaacaaggacgtgctggttctcctcaccgacatgacgagctttgccgacgcgatgaaggaaatagccatttcccaggaacaggtgcccagcaaccgcggctaccccggcgatctctacagccagttagcctcccgttacgaaaaagccgttgactttgagacggctggttccatcactgttctgggcgtaaccacaatgcccggcgacgacgttacccaccctgtgccggacaataccggttacatcacggaagggcagtactacctgcgcggcgggcgtatcgagcccttcggttccctttcccgccttaagcagcaggtgaacggcaaaacccgcaaggatcaccgcgcgctcatggacgggatgataaaactctattcggcttacaaggatacgctggaaaagaaatcaatgggctttaatatgactgcctgggacgggaagctgctccagtacggcgagcgttttgaaaaagagatgatggacctttccgtgaacattccgctggaaagggcccttgatttgggctgggaaattttggcggactgctttaaaagcgatgaaaccggcctccgttcggagctcatcaacgagttctggccaaaaaaataa

SEQ ID NO: 70580 - protein, 431 aa, Unknown
  Obtained from environmental sample
  DOMAIN (8)...(71): ATP synthase alpha/beta family, beta-barrel domain
  misc_feature (1)..(431): Xaa is any amino acid
MDKVYSKIESITGSVITVKADGIRYGDLAEVDTVFGTSLAEVNRLNGDTVSLQVFAGGRGISTGDTVRFLGRPMQVAYSENLMGRVFTGSGKPRDNGPELTDNKIPIGGPSVNPSQRIIPRKMIRTGIPMIDLFNTLVVSQKLPIFSVSGEPYNELLARIAMQAEVDVIILGGMGLKYDDYLNFKDTLEQGGSLSKTVMFVHTAADPTVECLMIPDMSLAVAEQFALQNKDVLVLLTDMTSFADAMKEIAISQEQVPSNRGYPGDLYSQLASRYEKAVDFETAGSITVLGVTTMPGDDVTHPVPDNTGYITEGQYYLRGGRIEPFGSLSRLKQQVNGKTRKDHRALMDGMIKLYSAYKDTLEKKSMGFNMTAWDGKLLQYGERFEKEMMDLSVNIPLERALDLGWEILADCFKSDETGLRSELINEFWPKK

SEQ ID NO: 70581 - DNA, 603 bp, Unknown
  Obtained from environmental sample
  misc_feature (1)..(603): n is a, c, g, or t
atggcaaaaataaagctcaccaagaatgagcagaaaaagcagaaagacagcctcaagaggtttcagcgctacctcccgaccctgatgctgaaaaaacagcagcttcaggcggaaatccgcgtagtagatatccggacagcggaagtgcgggcgacaagagaaaagatagacgcaagtattaaaaagtgggttgctgttttcggccaggagggggtgtttgctccggatgtactgcggatcaccaagatggtggctggagaaggaaacgtcgccggtgtagccattccggtttttgaaagcgtcgagtttgaagtaagcgattatgacattgtggtaaaacccctttggcttgacatcgcggtggataacatgaagaaaattctcttttatgatctgcaactgcggtgccttgaagagcaacagcgccgtttaaggaaggaactccagactaccagtcagcgggtgaacctctttgaaaagatcaagattcctgaggccgtggccaatatcaagaagattgccgtgtatttgggcgatcagcaaactgcggctgtggtacggggcaaaatttccaagcggggcatggagagggcaggatcatga

SEQ ID NO: 70582 - protein, 200 aa, Unknown
  Obtained from environmental sample
  DOMAIN (2)...(196): ATP synthase subunit D
  misc_feature (1)..(200): Xaa is any amino acid
MAKIKLTKNEQKKQKDSLKRFQRYLPTLMLKKQQLQAEIRVVDIRTAEVRATREKIDASIKKWVAVFGQEGVFAPDVLRITKMVAGEGNVAGVAIPVFESVEFEVSDYDIVVKPLWLDIAVDNMKKILFYDLQLRCLEEQQRRLRKELQTTSQRVNLFEKIKIPEAVANIKKIAVYLGDQQTAAVVRGKISKRGMERAGS

SEQ ID NO: 70583 - DNA, 561 bp, Unknown
  Obtained from environmental sample
  misc_feature (1)..(561): n is a, c, g, or t
atgcgtatctcgtgcgtgatgatcgacagcggaggcatagatactacgaccgatacggtgtatgcctatacgattaaacatgaatatcctgaacgggtatttgctgtgaaaggtagtagccaagcggataagcctatatttaatcgagctacccgcaacacgcgcaaccggtgcgctttatttattgttggcgtagacaaggccaaagaattaatctacgctcgcctaaaaattgaagaacctgggccggggtactgtcattttccgagcgacggagccgcagggtataccgctcaatacttcgccggtttgatatgcgaacgccggatgataaagtatctcaacggttaccgaaagttatactggtggaagcccaaagaggcccgaaacgagccgcttgacctacgggtatataacctgaacgccataagatacctcaatccgaattgggatgttctcgaaaaaaggtacgcaaaaccggccaaaacagacgccacacctacggccaaagacaaggccaaaaccgcctatgtacgccgctccgagggtatcacgatataa

SEQ ID NO: 70584 - protein, 186 aa, Unknown
  Obtained from environmental sample
  misc_feature (1)..(186): Xaa is any amino acid
MRISCVMIDSGGIDTTTDTVYAYTIKHEYPERVFAVKGSSQADKPIFNRATRNTRNRCALFIVGVDKAKELIYARLKIEEPGPGYCHFPSDGAAGYTAQYFAGLICERRMIKYLNGYRKLYWWKPKEARNEPLDLRVYNLNAIRYLNPNWDVLEKRYAKPAKTDATPTAKDKAKTAYVRRSEGITI

SEQ ID NO: 70585 - DNA, 765 bp, Unknown
  Obtained from environmental sample
  misc_feature (1)..(765): n is a, c, g, or t
gtgatgggtgcgactagcgggggggtatgcgtttatgtccacgctggcgtttcaatccacgcacccgtgatgggtgcgaccaaactcggagttaagttgcacatgctgggattgcgagtttcaatccacgcacccgtgatgggtgcgaccaatagggggtgcccgtactgtcttgttaaagacagtttcaatccacgcacccgtgatgggtgcgacagggcgtacggcggggttttaacccgccgatgtgctgtttcaatccacgcacccgtgatgggtgcgacaaaattatctttttttaacgtcttaccaccgcgtgtttcaatccacgcacccgtgatgggtgcgactaatatccaacgcgtcgttgagatactccccgatatcgtttcaatccacgcacccgtgatgggtgcgacgagtaaactaaaccggggcggaaacggccccaaggtttcaatccacgcacccgtgatgggtgcgacagaggagagcctaaagtcgcgagcagatgcaaacggtttcaatccacgcacccgtgatgggtgcgacttggaacctgtctcggaactttttgcccaatcaggtttcaatccacgcacccgtgatgggtgcgaccgatacgcccatgcctggcctgatggtcaatgttcagtttcaatccacgcacccgtgatgggtgcgacaggtcaccggctatatgtccaaaaccacacaacttgtttcaatccacgcacccgtgatgggtgcgaccgacgccgataa

SEQ ID NO: 70586 - protein, 254 aa, Unknown
  Obtained from environmental sample
  misc_feature (1)..(254): Xaa is any amino acid
MMGATSGGVCVYVHAGVSIHAPVMGATKLGVKLHMLGLRVSIHAPVMGATNRGCPYCLVKDSFNPRTRDGCDRAYGGVLTRRCAVSIHAPVMGATKLSFFNVLPPRVSIHAPVMGATNIQRVVEILPDIVSIHAPVMGATSKLNRGGNGPKVSIHAPVMGATEESLKSRADANGFNPRTRDGCDLEPVSELFAQSGFNPRTRDGCDRYAHAWPDGQCSVSIHAPVMGATGHRLYVQNHTTCFNPRTRDGCDRRR

SEQ ID NO: 70587 - DNA, 570 bp, Unknown
  Obtained from environmental sample
  misc_feature (1)..(570): n is a, c, g, or t
gtgcgtggattgaaacctgattgggcaaaaagttccgagacaggttccaagtcgcacccatcacgggtgcgtggattgaaaccgtttgcatctgctcgcgactttaggctctcctctgtcgcacccatcacgggtgcgtggattgaaaccttggggccgtttccgccccggtttagtttactcgtcgcacccatcacgggtgcgtggattgaaacgatatcggggagtatctcaacgacgcgttggatattagtcgcacccatcacgggtgcgtggattgaaacacgcggtggtaagacgttaaaaaaagataattttgtcgcacccatcacgggtgcgtggattgaaacagcacatcggcgggttaaaaccccgccgtacgccctgtcgcacccatcacgggtgcgtggattgaaactgtctttaacaagacagtacgggcaccccctattggtcgcacccatcacgggtgcgtggattgaaactcgcaatcccagcatgtgcaacttaactccgagtttggtcgcacccatcacgggtgcgtggattgaaacgccagcgtggacataa

SEQ ID NO: 70588 - protein, 189 aa, Unknown
  Obtained from environmental sample
  misc_feature (1)..(189): Xaa is any amino acid
MRGLKPDWAKSSETGSKSHPSRVRGLKPFASARDFRLSSVAPITGAWIETLGPFPPRFSLLVAPITGAWIETISGSISTTRWILVAPITGAWIETRGGKTLKKDNFVAPITGAWIETAHRRVKTPPYALSHPSRVRGLKLSLTRQYGHPLLVAPITGAWIETRNPSMCNLTPSLVAPITGAWIETPAWT

SEQ ID NO: 70589 - DNA, 318 bp, Unknown
  Obtained from environmental sample
  misc_feature (1)..(318): n is a, c, g, or t
ttgggaagtcgcggacacgctgacctacacggctgtttcaatccacgcacccgtgatgggtgcgacacagatatgagatacatggtttttcgccatacgggtttcaatccacgcacccgtgatgggtgcgacagagccgcgcgcggacaaattgcacgtcagcatggtttcaatccacgcacccgtgatgggtgcgacaatgtttggcacgagctccgagacgggaaagccgtttcaatccacgcacccgtgatgggtgcgacgaaaggaatgctcgctccggcactcgttacaccgtttcaatccacgcacccgtga

SEQ ID NO: 70590 - protein, 105 aa, Unknown
  Obtained from environmental sample
  misc_feature (1)..(105): Xaa is any amino acid
MGSRGHADLHGCFNPRTRDGCDTDMRYMVFRHTGFNPRTRDGCDRAARGQIARQHGFNPRTRDGCDNVWHELRDGKAVSIHAPVMGATKGMLAPALVTPFQSTHP

SEQ ID NO: 70591 - DNA, 516 bp, Unknown
  Obtained from environmental sample
  misc_feature (1)..(516): n is a, c, g, or t
atgcgcctgatatcgaacttcctcaaagacaacaagacgaaggacgaggagataaagaacgctctggcggccggcgacataaagctggcgcaccgtttggcgcacaccctcaaaggcgtagccggccttgtggcgcaacccggtctgcagagcgcctcctacgttatagaaaacgctctaaactccggcgataccgacaccgcctcaaaaggcttggggaagctctcggaggagttgaagaagtcattggcggaactgaccgcaatctcagattccgcgcaaaagcaggaagcgcccaagacggaaccggcggtaacgctcgacaagtccgaggccttggaactgatagaaaagctacgcgtgttattagagaacggcgattccgactgcatgagcctgatagacggtctgcgttcaataccggaatccaagaagttgatagagcaggtggaggattatgattttgaaccggcattgcaaacgcttgaggaaataaaaaagagtctggagggttga

SEQ ID NO: 70592 - protein, 171 aa, Unknown
  Obtained from environmental sample
  DOMAIN (2)...(85): Hpt domain
  misc_feature (1)..(171): Xaa is any amino acid
MRLISNFLKDNKTKDEEIKNALAAGDIKLAHRLAHTLKGVAGLVAQPGLQSASYVIENALNSGDTDTASKGLGKLSEELKKSLAELTAISDSAQKQEAPKTEPAVTLDKSEALELIEKLRVLLENGDSDCMSLIDGLRSIPESKKLIEQVEDYDFEPALQTLEEIKKSLEG

SEQ ID NO: 70593 - DNA, 936 bp, Unknown
  Obtained from environmental sample
  misc_feature (1)..(936): n is a, c, g, or t
ttgacaaggaatatggatttatccaacgagcctaagaaacttagcatactaatcgttgacgacgagaagtcgaacatcgatgtgcttagccatatactcaaggataagtacaaactctacattgccaaaaacggcgagggcgcgctcaaaatcgcccgcgacaacctgcccaacctcatcctcctcgacgttatcatgccggacatggacggttttgaggtattggccgaactcaagaagtccgagctaacgagcaagataccggtcatcttcataacggggcaggacagcaaagaggcggagatcaacggtctcaacaagggcgcggtggattacataacgaagccgttccacagcatgatagtggaggctcgtgtcaatacacacatgaagctcgtggagcagatgcgcataatagagcgtatgagcataatggacgaactgaccgacctgcccaacaggcgttacttcaacgaccaattggccagagagtgggggcgagccatcagggaaacgctatcgataagcctccttataatagacgtcgataagttcaaagtgtacaacgataccttcggccacccgcagggcgacactctcttgcgcacggtggcgggcgtgttcaaggagtcgctgaagcgtccggccgatttcgtggcccgctggggcggcgaggagttcataatgctgctgccgggttccgatttggagggcgccgtaaatgtggcggagagggtgcggtcgtcggtggaggccacaatcataccgtgcatagacggcacgtccacgagcgccacggtgagcataggcgtcaactccgagcgccctataatacacctgccggcggcggggttcgtctccagggcggacaaggcgctgtacgaggcgaaagagtcgggaaggaataggatctgtgtttataaggacgggatgtag

SEQ ID NO: 70594 - protein, 311 aa, Unknown
  Obtained from environmental sample
  DOMAIN (14)...(127): Response regulator receiver domain
  misc_feature (1)..(311): Xaa is any amino acid
MTRNMDLSNEPKKLSILIVDDEKSNIDVLSHILKDKYKLYIAKNGEGALKIARDNLPNLILLDVIMPDMDGFEVLAELKKSELTSKIPVIFITGQDSKEAEINGLNKGAVDYITKPFHSMIVEARVNTHMKLVEQMRIIERMSIMDELTDLPNRRYFNDQLAREWGRAIRETLSISLLIIDVDKFKVYNDTFGHPQGDTLLRTVAGVFKESLKRPADFVARWGGEEFIMLLPGSDLEGAVNVAERVRSSVEATIIPCIDGTSTSATVSIGVNSERPIIHLPAAGFVSRADKALYEAKESGRNRICVYKDGM

SEQ ID NO: 70595 - DNA, 2637 bp, Unknown
  Obtained from environmental sample
  misc_feature (1)..(2637): n is a, c, g, or t
ttgaaatcgtcatccattcgtaaattcgccgcgcttctgtcgtcagccgtattgatactgataagccccgccgccgttcaaccggcggcggcggactcaaatctcttccccgtccccgatgtcataaaaagcaacgtggccttttggatacgcatatacacggaggtatccctgcaggaggggcttctgcacgaccgtgattatccgcaggtggtctacgagaagattgcgaacggcgacaggaccggaaaaaaactcggcgagctcattgaccagcgccgaaagatctatatcgacgccatcaacgccgtgagggactcggcgccggccaagtggaatacggaggcgaaacgggtggcggagctctttaagctggcgccggagggggcgatcgcgggcgccgaggagcgcatccgtcaccaaggcggccaacgcgaacgcttcaggctggggttgtctcgatcaacgatgtacttggacacgatatccgccatattaaagagaaacggcgtcccggatgagttaaaatacctgccgcacgtggagtcgtcattcgacgccgaggcctactccaaagtgggcgcggcggggctgtggcagtttatgcgctcaaccggcaaactctacatgaaggtagactacatgttcgacgagcgccgcgaccccatcatctcgaccaacgccgcggcgaagtttctgaaggcaaactacgacatgctgggcgcctggccgctggcgatcaccgcctacaaccacggccccaacggcatacgcggcgccgtggagaagctgggcacccgcgacatagcaatcatcctgcagaaacacgagagcgcctccttccgcttcgcctcaaagaacttctacagctgcttcgtggccgtgttgcagataatggagaagccggacaagtacttcaaggacgtcaagtactatcccaagttttcggcgaccgggctcaaactgccgttcgcgattaggccggacgcgttatgcaagtcgctcggcatatccgaagaggatttcaaaacgctcaatccgagcctgcgccctgtggtattttcgcaaaagaaaccgattccggcaggctacaatgtaaacgtgcccggcagcataagcacggaggcggccgtcgccgccctgaaccgcacccccataccgatgcgggccacgccgaaagaagcggcggaggcggagacggagggctattatactatagtaagcggcgacaaccttgcgggcatagcgaagcgattgggcgtgcagatgagcgatctagccgcggtgaacaacatcacgaattcgagcaagatacaggttgggcaggtgcttttgataccgtccggcggagaggcgggattgggatggggggcgacaatcacggcatcaatgtctaaacctgcgcctgcatccgcaccggcaaaggcggggacggccgataccgttaagacggcggccgcgtccgcaaaacccgcgacaattacgacgccggccggcactgcggtcgataccgcaaaaaccgttattgcgtctaaacccgtatcgatgacggtatcggttaataccgcgaagacaggggcggtcgataccgccatcaacacggcgaacaccgtatcgatagatgccgcgaaaaaagtttcggcgtctatcgatacggttaagattgtcaatatatacgcgcccgcaaaatcaacagaaccggcattgctaaataatcttcgggtaacgataaagtccccgtctttcgagcgtaccgcgccgccggcggcgcttgtacagacaccgccggcatcaacgcctcccgcattaacgcaaactgtactaacacagcctgcattgacgactccgaccgtatcgacaccgccgcccgtattaacatcatccgtaccgccgatacaaccggtatcgacgccgcccgtattaacgccgtccgtaccgcctatacaaccggtatcgacgccgcccgtatcaacgccgtccgtaccgcctatacaaccggtatcgacgccgcccgctatcgccatagcaccggcaccggcaccggcgcccatcgacaccgccaccgccaagccggcaaagatcaacccgtcggtcaaacccgaccccgaccccacattcaacgccgacgtctacgatctcggcatgaccgtggccccgggcggctccagcgtccgcatccgcgtctcggtcgacgagtccatcgggcgcttcgccgagtggatgcgggtcaatatcagcgatatccgcaccgccaacaacatgaccgagaacgaggcgctgcagctcggcgcgttcatctccatacccatacgctcgtcaacgaacatcaagcgcttcgaggtcaaccgcctgcagtaccacttggctatagaggaggacttcttcgcgaacttcaacgttacggactttgagaagcggacggtcaagccgggcatcaacctatggaagatatgccgggaggcgcagatccccatgtggctcttgaagaagtacaacagggggataaacttctacgccatgcagcccggcagcaccctttggatacccaaggtaggcgccaaggacgaggtcaacagcgccgggaacgaggtagacccggcgatatcggaggcggaggaaccggcggacgggcaataa

SEQ ID NO: 70596 - protein, 878 aa, Unknown
  Obtained from environmental sample
  SIGNAL (1)...(26)
  DOMAIN (160)...(273): Transglycosylase SLT domain
  misc_feature (1)..(878): Xaa is any amino acid
MKSSSIRKFAALLSSAVLILISPAAVQPAAADSNLFPVPDVIKSNVAFWIRIYTEVSLQEGLLHDRDYPQVVYEKIANGDRTGKKLGELIDQRRKIYIDAINAVRDSAPAKWNTEAKRVAELFKLAPEGAIAGAEERIRHQGGQRERFRLGLSRSTMYLDTISAILKRNGVPDELKYLPHVESSFDAEAYSKVGAAGLWQFMRSTGKLYMKVDYMFDERRDPIISTNAAAKFLKANYDMLGAWPLAITAYNHGPNGIRGAVEKLGTRDIAIILQKHESASFRFASKNFYSCFVAVLQIMEKPDKYFKDVKYYPKFSATGLKLPFAIRPDALCKSLGISEEDFKTLNPSLRPVVFSQKKPIPAGYNVNVPGSISTEAAVAALNRTPIPMRATPKEAAEAETEGYYTIVSGDNLAGIAKRLGVQMSDLAAVNNITNSSKIQVGQVLLIPSGGEAGLGWGATITASMSKPAPASAPAKAGTADTVKTAAASAKPATITTPAGTAVDTAKTVIASKPVSMTVSVNTAKTGAVDTAINTANTVSIDAAKKVSASIDTVKIVNIYAPAKSTEPALLNNLRVTIKSPSFERTAPPAALVQTPPASTPPALTQTVLTQPALTTPTVSTPPPVLTSSVPPIQPVSTPPVLTPSVPPIQPVSTPPVSTPSVPPIQPVSTPPAIAIAPAPAPAPIDTATAKPAKINPSVKPDPDPTFNADVYDLGMTVAPGGSSVRIRVSVDESIGRFAEWMRVNISDIRTANNMTENEALQLGAFISIPIRSSTNIKRFEVNRLQYHLAIEEDFFANFNVTDFEKRTVKPGINLWKICREAQIPMWLLKKYNRGINFYAMQPGSTLWIPKVGAKDEVNSAGNEVDPAISEAEEPADGQ

SEQ ID NO: 70597 - DNA, 912 bp, Unknown
  Obtained from environmental sample
  misc_feature (1)..(912): n is a, c, g, or t
ttgaatgtggggtcggggtcgggtttgaccgacgggttgatctttgccggcttggcggtggcggtgtcgatgggcgccggtgccggtgccggtgctatggcgatagcgggcggcgtcgataccggttgtataggcggtacggacggcgttgatacgggcggcgtcgataccggttgtataggcggtacggacggcgttaatacgggcggcgtcgataccggttgtatcggcggtacggatgatgttaatacgggcggcggtgtcgatacggtcggagtcgtcaatgcaggctgtgttagtacagtttgcgttaatgcgggaggcgttgatgccggcggtgtctgtacaagcgccgccggcggcgcggtacgctcgaaagacggggactttatcgttacccgaagattatttagcaatgccggttctgttgattttgcgggcgcgtatatattgacaatcttaaccgtatcgatagacgccgaaacttttttcgcggcatctatcgatacggtgttcgccgtgttgatggcggtatcgaccgcccctgtcttcgcggtattaaccgataccgtcatcgatacgggtttagacgcaataacggtttttgcggtatcgaccgcagtgccggccggcgtcgtaattgtcgcgggttttgcggacgcggccgccgtcttaacggtatcggccgtccccgcctttgccggtgcggatgcaggcgcaggtttagacattgatgccgtgattgtcgccccccatcccaatcccgcctctccgccggacggtatcaaaagcacctgcccaacctgtatcttgctcgaattcgtgatgttgttcaccgcggctagatcgctcatctgcacgcccaatcgcttcgctatgcccgcaaggttgtcgccgcttactatagtataa

SEQ ID NO: 70598 - protein, 303 aa, Unknown
  Obtained from environmental sample
  misc_feature (1)..(303): Xaa is any amino acid
MNVGSGSGLTDGLIFAGLAVAVSMGAGAGAGAMAIAGGVDTGCIGGTDGVDTGGVDTGCIGGTDGVNTGGVDTGCIGGTDDVNTGGGVDTVGVVNAGCVSTVCVNAGGVDAGGVCTSAAGGAVRSKDGDFIVTRRLFSNAGSVDFAGAYILTILTVSIDAETFFAASIDTVFAVLMAVSTAPVFAVLTDTVIDTGLDAITVFAVSTAVPAGVVIVAGFADAAAVLTVSAVPAFAGADAGAGLDIDAVIVAPHPNPASPPDGIKSTCPTCILLEFVMLFTAARSLICTPNRFAMPARLSPLTIV

SEQ ID NO: 70599 - DNA, 783 bp, Unknown
  Obtained from environmental sample
  misc_feature (1)..(783): n is a, c, g, or t
atgcttgccaaaaccgcggcggaagtgaagattcggctgcccattcacctgaaaatcgacaccggcatgggcagaatgggctgtaaacctgccgaagcccctgttttagcgaggcaaatcgcctgttttcccgccttagagtatgccggaaccgccacccacctggccgtgtcggattccgcggccccgcaagacatggcctacacggaacaacagattgccggattcaaggaagcgctggagcgaatacgggctgaaggcgttgatcccggcattgttcacgccgcgaattcgggcgcggttgtcctgcaccctgatgcctggtttgacatgatacggccgggcattatcctgtacgggtacaatcccgcggaaaccctttccccagaggtaaagccggtaatggaactgcggaccaatgtcgccctgatcaagcgggtgaaaaaaggcgaaactgtttcttacggccgcacctggacagcgcctcatgacacggcaatcgccgttttgccggttggctatgccgacggcctgccccgccttgtaagcaataaatggcaggccgtgatcaacggcaaaacgtatccgcttgcgggccggatttgcatggatcaatgcatggcggatcttgggcccgacacaaatgtgcgccgctgggatgaagcgtcaattttcggcgggcccgcgccggacgccggaatcctcgccggaagaatcgggaccatcccctacgagattacctgtaatatcaacaaacgggtaccaagggtgtacgaatcttaa

SEQ ID NO: 70600 - protein, 260 aa, Unknown
  Obtained from environmental sample
  DOMAIN (1)...(124): Alanine racemase, N-terminal domain
  misc_feature (1)..(260): Xaa is any amino acid
MLAKTAAEVKIRLPIHLKIDTGMGRMGCKPAEAPVLARQIACFPALEYAGTATHLAVSDSAAPQDMAYTEQQIAGFKEALERIRAEGVDPGIVHAANSGAVVLHPDAWFDMIRPGIILYGYNPAETLSPEVKPVMELRTNVALIKRVKKGETVSYGRTWTAPHDTAIAVLPVGYADGLPRLVSNKWQAVINGKTYPLAGRICMDQCMADLGPDTNVRRWDEASIFGGPAPDAGILAGRIGTIPYEITCNINKRVPRVYES

SEQ ID NO: 70601 - DNA, 345 bp, Unknown
  Obtained from environmental sample
  misc_feature (1)..(345): n is a, c, g, or t
gtgatcctccttgtaaaaagcgattcttttaattcggtatccgccgcatgcgaggcggacggcgttctgaccatcgcaaaaccggtggaccaatctcttatgtggggcgcgctgtccctggccagatcaattcaaaacagactaaaacggatgcggactgaaaacacgcagcttaaacaaaacattgaggacatacgcattattaaccgcgcaaaattaattttaatttccgctctgagcatgaccgagcaggaagcgcaccgctatatcgaaaaacaggcgatggacatacgttcctcccgaagattcgtcgcggaagagatacttaaacgatatgaaaattaa

SEQ ID NO: 70602 - protein, 114 aa, Unknown
  Obtained from environmental sample
  DOMAIN (54)...(109): ANTAR domain
  misc_feature (1)..(114): Xaa is any amino acid
MILLVKSDSFNSVSAACEADGVLTIAKPVDQSLMWGALSLARSIQNRLKRMRTENTQLKQNIEDIRIINRAKLILISALSMTEQEAHRYIEKQAMDIRSSRRFVAEEILKRYEN

SEQ ID NO: 70603 - DNA, 1815 bp, Unknown
  Obtained from environmental sample
  misc_feature (1)..(1815): n is a, c, g, or t
atgtgcggcatttttggttatatcggaactcaggacgccgtccccattatagtcgagggtttaaaaaaacttgaataccggggctatgactcggccggaatagcggtttacggtcaaaacgggatgggcgttgtaaagcagaaggggcgcctgacggccctggaggcgcggctggcggaacagcccctggccggccgcatagggatcggccatacccgctgggccacgcacggggagccgtcggacgtaaactcccatcctcacgtggggagcaaaaacaaaatagccgttgtccataacggtataattgaaaactataagcagttaaaggaacgccttgagcactggggcgtgaatttcgcctcacaaaccgacagcgaggtaatcgcgcagctcgccgaacattattataccggggatttgctggatacgatcatccatgtctcaaacgctctggaaggatcttacgcgttagggatcatgtgcgttgacgatcctgacatccttatcgccgtcaaaaaagacaatccccttatcatcggcgaatcgtcccacgggaattttatcgcttccgacgtgcccgccgtattaaagcatacgaacaaggtttattaccttaacgacaaggaaattgtcgtactgcggaaaaacagcgttcaattttttaatcttgacaaagaaccgcttgaaaggcgggcggaaacaataacatggaatattgacagcgcggaaaagggcggctatccgcatttcatgcttaaggagatcatggagcagccaaagatactccgtgataccattaattccgcggtaaaatccgacagctataaaaacatttttgataatcttgatattacgcgctttaacaagatcgtgataagcgcctgcggctcggcttacaacgccggggttgtcgccaggtacgtgtttgaaaagctgtgcaggtttccctcggtggaagcggagcttgccagcgagttccggtacaaggacgccgttattgacgaaaaaacgctggttattctgatcagccagtcgggagaaaccgcggatactatcgcggcgatgcgggaagcaaagcgcaaaggcgccgccaccctgtctatcgtcaatgttgtcggcagcactatcgccaaagaatcggactactgcctgtttacggcggcgggcccggagattgccgtggcgacgacaaaggctttttcggcccagcttgtgctgttgtatattctcgcgatacgcttcgccgccgggtcggggaaattatcgaaggaaaaggagcgcgagctgttagctgaaatcgaagccatccccgaaaaaacggcgggtttgcttaaacagacggacgctgttcaaatgtacgcttccacctgcgtcggatacaagagcatcttttttatcggcagaaatattgattacgccatcgcgctggaaggctcgcttaaactcaaggaaatctcctatattcactccgaagcttacgcgggaggcgagctgaagcacggcactatttcgctggttgagcaggacacgctggtcgtcgccatctccaactgcgccccgctgtacggcaaaattatgagcaacgcggagcaggtgataagccgcggcgcgaaagtactgcttataggcagctgcccggaagcgaaaccggacgacaaactcttccatatcgctttgccggaaagccttgatttgttttccccttccctgtcggttattgtcttgcagcttttcagctattatgtggccgcgaacaagggtttggacatagacaaaccgcggaatttggcaaaaagcgttaccgttgaatag

SEQ ID NO: 70604 - protein, 604 aa, Unknown
  Obtained from environmental sample
  DOMAIN (2)...(193): Glutamine amidotransferases class-II
  misc_feature (1)..(604): Xaa is any amino acid
MCGIFGYIGTQDAVPIIVEGLKKLEYRGYDSAGIAVYGQNGMGVVKQKGRLTALEARLAEQPLAGRIGIGHTRWATHGEPSDVNSHPHVGSKNKIAVVHNGIIENYKQLKERLEHWGVNFASQTDSEVIAQLAEHYYTGDLLDTIIHVSNALEGSYALGIMCVDDPDILIAVKKDNPLIIGESSHGNFIASDVPAVLKHTNKVYYLNDKEIVVLRKNSVQFFNLDKEPLERRAETITWNIDSAEKGGYPHFMLKEIMEQPKILRDTINSAVKSDSYKNIFDNLDITRFNKIVISACGSAYNAGVVARYVFEKLCRFPSVEAELASEFRYKDAVIDEKTLVILISQSGETADTIAAMREAKRKGAATLSIVNVVGSTIAKESDYCLFTAAGPEIAVATTKAFSAQLVLLYILAIRFAAGSGKLSKEKERELLAEIEAIPEKTAGLLKQTDAVQMYASTCVGYKSIFFIGRNIDYAIALEGSLKLKEISYIHSEAYAGGELKHGTISLVEQDTLVVAISNCAPLYGKIMSNAEQVISRGAKVLLIGSCPEAKPDDKLFHIALPESLDLFSPSLSVIVLQLFSYYVAANKGLDIDKPRNLAKSVTVE

SEQ ID NO: 70605 - DNA, 720 bp, Unknown
  Obtained from environmental sample
  misc_feature (1)..(720): n is a, c, g, or t
atgaacattgcggcgcacaaccttgatttcaaggaattaaacagccggataagaaccgcgaaagaggccgtctgcatagacggctgcttcgggcaaaggtttatcgggagcggcatgaccggcaagaacctgacgattaacggaacgccggggaacgcgttaggcgcttattttaacggcgcggccattacggtaaacggcaacgcgcaggacgccgtcggcgacaccatgaatgacggcgagattatcattcacggcagcgcgggcgacgcgctcggctacgccatgcggggcggaaagatatttgtccgcgacaacgcgggatacagagttggcattcacatgaaagaatacaaggaaaaaaagccggtaatcgtcatcggcggcagggcgggcagctttttgggcgaatacctcgccggcgggatcattgtagtgctgggcataggctgccatcacgagatccccgtctggtattttacgggaaccggaatgcacggcggaaaaatttttgtcagaaccgacaaagagcttacttcgcttccggcgcaggtcgtcgaggatgtagccactgataatgatctgagcgaaatcgcgccgtatgtcggcgagtttgcgggttattttggcatggacgcccagcagcttctgaaagacagattttacgtgctgaggcctaacgcgaaaaacccgtataaacagttgtatacggcgaattag

SEQ ID NO: 70606 - protein, 239 aa, Unknown
  Obtained from environmental sample
  DOMAIN (1)...(209): GXGXG motif
  misc_feature (1)..(239): Xaa is any amino acid
MNIAAHNLDFKELNSRIRTAKEAVCIDGCFGQRFIGSGMTGKNLTINGTPGNALGAYFNGAAITVNGNAQDAVGDTMNDGEIIIHGSAGDALGYAMRGGKIFVRDNAGYRVGIHMKEYKEKKPVIVIGGRAGSFLGEYLAGGIIVVLGIGCHHEIPVWYFTGTGMHGGKIFVRTDKELTSLPAQVVEDVATDNDLSEIAPYVGEFAGYFGMDAQQLLKDRFYVLRPNAKNPYKQLYTAN

SEQ ID NO: 70607 - DNA, 1110 bp, Unknown
  Obtained from environmental sample
  misc_feature (1)..(1110): n is a, c, g, or t
ttgcgcgaaggcgccgtcaatgtcatgggcaacggcatggtgatcgatatagagcatctctgcggcgaggttaagacgctcaaggaaaaaggcattaatataacccccgacaacctgaaaatcagcgataaggcctttatatgcatgccgtatcacaagaagcaggatatactggaagaggaacggcttgccgacaagaaatacggctccacccgcaggggtatagcgccggtgtacggcgacaaatatatgaaaaaagggctgaggatcggcgatctgaccgattccaaaaccctgaaacaaaaactcacggacatcatcgaatggaaaaatattacgcttaacggatattcgggcgcaaccggcgcggccggggtgaatgtaaataatattttaaactggctggatgaattcggtacgccgttcttcccttttatcacggatacgacggattacctgcactcggccataaaagccaaaaaagacatcctgttcgaggcgcagctcggcgcgttacgcgacattgactacgggatttatccttacaccacctcgtctcatacgattgccgcctacgcgaccgcgggcgcggggattccgggcaaaaaactcgacagcgtaatcggcataatgaaagcgtattcaagctgcgtgggcgaaggccccttcgccgtcgaaatgtccggcgacgaggccgcggctctgcgcgaggcaggggccgaatacggcgcggcgacgggcaggccgcgcagggtaggcgggtttgacgtgccggcgagccgctacggcgttcaggttcagggcgccgatgaaatcgccctgaccaagctggacgtgctcgcgtacctcgataaaatacccgtctgcaccgcctatgagattgacggggcaaaaaccagccgcttcccctcgggcagcgcgctgatgagggcgaagcccgtaatcgaatatctggacggctttaaaaccgacatatcaaaatgccgtaaagtgaaagatttgccgaacacggcgattaaatatatcaagttcattgaagacgccgtcggctgccgcattaaatacgtgtctgtcggggccgggcgcgaagattatgtgcagatgaactga

SEQ ID NO: 70608 - protein, 369 aa, Unknown
  Obtained from environmental sample
  DOMAIN (1)...(367): Adenylosuccinate synthetase
  misc_feature (1)..(369): Xaa is any amino acid
MREGAVNVMGNGMVIDIEHLCGEVKTLKEKGINITPDNLKISDKAFICMPYHKKQDILEEERLADKKYGSTRRGIAPVYGDKYMKKGLRIGDLTDSKTLKQKLTDIIEWKNITLNGYSGATGAAGVNVNNILNWLDEFGTPFFPFITDTTDYLHSAIKAKKDILFEAQLGALRDIDYGIYPYTTSSHTIAAYATAGAGIPGKKLDSVIGIMKAYSSCVGEGPFAVEMSGDEAAALREAGAEYGAATGRPRRVGGFDVPASRYGVQVQGADEIALTKLDVLAYLDKIPVCTAYEIDGAKTSRFPSGSALMRAKPVIEYLDGFKTDISKCRKVKDLPNTAIKYIKFIEDAVGCRIKYVSVGAGREDYVQMN

SEQ ID NO: 70609 - DNA, 792 bp, Unknown
  Obtained from environmental sample
  misc_feature (1)..(792): n is a, c, g, or t
atgcgtgaaggatcggttattaccggcaatacaggcggcggggtgtctgtatatgagggaacctttaccatgagcggcggggaaatctccggtaataccgcttcctcctcctccggcggcggggtgtatgtgggtggtggaacctttaccatgagtggcggggcaatctccggtaataccgcttcctactacggcggcggggtgtatgtgggcagtggaacctttaccatgagcggcggggaaatctctggcaataccggctcctcctccggcggcggggtgtatgtgggtagcggaacctttaccatgagcggcggggaaatctctggcaataccgccagagactacggcggtggggtgcgtgtggacagtggaacctttaccatgagcggcggggaaatctccggcaataccgcctcctcctacggcggcggggtgtatgtgaagagtatagaatctcttaccggtactggaattagaggagcctcttttacgatgagcggtggggaaatctccggcaataccgcctcctcctacggcggcggggtgtatgtgtggatggatagtggaagtagtggaacctttaccaaaacaggcagcggaactatttacggttttactgacggcaataccaaaagtaatgtggtaaaagacagttccggcgttgttcaaaataaccggggtcatgcggtatatgtatcaggcgtttttagaaaccgcagggaaactaccgccgggccgtggatgaatctggattcggaagttgatggcgcggcaggaggatgggaatag

SEQ ID NO: 70610 - protein, 263 aa, Unknown
  Obtained from environmental sample
  misc_feature (1)..(263): Xaa is any amino acid
MREGSVITGNTGGGVSVYEGTFTMSGGEISGNTASSSSGGGVYVGGGTFTMSGGAISGNTASYYGGGVYVGSGTFTMSGGEISGNTGSSSGGGVYVGSGTFTMSGGEISGNTARDYGGGVRVDSGTFTMSGGEISGNTASSYGGGVYVKSIESLTGTGIRGASFTMSGGEISGNTASSYGGGVYVWMDSGSSGTFTKTGSGTIYGFTDGNTKSNVVKDSSGVVQNNRGHAVYVSGVFRNRRETTAGPWMNLDSEVDGAAGGWE

SEQ ID NO: 70611 - DNA, 855 bp, Unknown
  Obtained from environmental sample
  misc_feature (1)..(855): n is a, c, g, or t
gtgaaagattttgacagggtttttaacgcggcaaacggatacgaagtattaaaagccaacaacaacacacttgccgagcagctttactcagccaggcagtttatcaccgaaggcgtggaatatctcctgatcgccggtgccgactctaatggctggaccagtgttcttactgaggccaaaaacgccggcgttaaagtgttactgtttgaccgtatgctcaatgttgatccaagcctttatgaggtcgccgttgtttctgatatgagaaaagagggcgagaccgccgtcgcatggctcaagtcattgaaccttccccaatacaatatcatccacattcaaggccagatcggatccgacgcccagattggccgctcagggccccttcaagaggcgatcgatgctaacagtagctggaggttagtgcgccgcggtacgggcggcgacacatggagcggcgatgaggcaaagaaggttgtagaagccgccattgctgcaagagaaagttttaacgtcatctatgccgaaaacgacggcatggccgaaggcgcgatgaaagcgctgcaggctgccggcattacccacggtgtcaatggagatgtaaaaatcatgggctttgacaccaacaagtatgccctcaggtatgtccttaatggggactggaacttttctggtcaatgcagccccttcaaggcggacgctattgaaggatttatcaagaaacttcaggccggtcaatctttgggtctaactggcgacaagaaagttattgatgaagagacatactttgccaatccgaatccgggtggtaaagtaatcactcaagcggacgttgacaaatacggacttggtgattaa

SEQ ID NO: 70612 - protein, 284 aa, Unknown
  Obtained from environmental sample
  misc_feature (1)..(284): Xaa is any amino acid
MKDFDRVFNAANGYEVLKANNNTLAEQLYSARQFITEGVEYLLIAGADSNGWTSVLTEAKNAGVKVLLFDRMLNVDPSLYEVAVVSDMRKEGETAVAWLKSLNLPQYNIIHIQGQIGSDAQIGRSGPLQEAIDANSSWRLVRRGTGGDTWSGDEAKKVVEAAIAARESFNVIYAENDGMAEGAMKALQAAGITHGVNGDVKIMGFDTNKYALRYVLNGDWNFSGQCSPFKADAIEGFIKKLQAGQSLGLTGDKKVIDEETYFANPNPGGKVITQADVDKYGLGD

SEQ ID NO: 70613 - DNA, 393 bp, Unknown
  Obtained from environmental sample
  misc_feature (1)..(393): n is a, c, g, or t
gtgtacatattttccgtggaaaatagccggcagttagaaagacaatggccgcatcacaaccggtctctgccgaaaatttcgcaggacggacgggacggcgatgaagaacctgggtttatgacaaatattgcggacaattacggtattggttttaaatattttgattgcaaaggaatcaaacgtattaaaataaaaacgcgcggttacaataacggcgtctttcatgttaaaacaaaatgggacggcgagtctttagcgcgtataaaaattgaatacagcaatatttggacggaatattcttcagatataaaccttccggacggaatatacgcgctttactttatttataaaggtaacggatacgcttctatggcttcctttactttggaataa

SEQ ID NO: 70614 - protein, 130 aa, Unknown
  Obtained from environmental sample
  misc_feature (1)..(130): Xaa is any amino acid
MYIFSVENSRQLERQWPHHNRSLPKISQDGRDGDEEPGFMTNIADNYGIGFKYFDCKGIKRIKIKTRGYNNGVFHVKTKWDGESLARIKIEYSNIWTEYSSDINLPDGIYALYFIYKGNGYASMASFTLE

SEQ ID NO: 70615 - DNA, 1191 bp, Unknown
  Obtained from environmental sample
  misc_feature (1)..(1191): n is a, c, g, or t
atggacaaagaagagattatagaattaatcagagcaggctcatttgatattttaaaattgaaacctctgattatcgatatgaatacggcggacatcgccgagatctccgaagaattggacaaagaaaataaaatcagattattcaggattctgccaaaagcaatagcgtcggaagtttttgcctacatggacagcgatcaacagcagattgttgttgaggcgcttaccgatacggaaataggcgaaatcatgaacaaacttttcatggacgacgccgtagactttatcgaagaaatgccggcaaatatagtaaagcgcgtattaaaaaatgttccacctgaaaaacgaaaactaatcaataattttttacagtatccggatgattccgcaggcagtcttatgacaacagaatatgtcgatctgcgtgaagacgagacagtacacaaagcgtttgacactatccgcagtacaggtcttaacaaagagacaatttacaactgttatgtgatacgcaaagatcgtgttcttgtaggttctatttccgcaaaaacccttatgcttgccaaaccccggcagcgtataggcagcctaatggacactaaccttgtttacgcgcacacaaccgacgaccaggaagccgtcgccgaacaatttaaaaaatattcattgttggcaatgcccgttgttgacaaagagcagaggcttgtgggaattataactgtagacgacattgtagacgttatcgtagaggaaagcacggaagacatcgaaaagatgaacgcccttgccccgtctgacgatccgtatcttaaaacaggcgttttacgtcttgccagaaaccgtattctttggctcttggtgttgatgctttccgcaaccattacaggcataatcatttccaattttgaagcgggacttgccgctttacccattcttgtcgcttttatcccaatgctcatggatacaggcggcaacgccggctctcaatcttcaactcttatcattcgcggtatggcgataggtgaaatcaccccaaaagatattatcagaattgtatggaaggaagtgcgtgtaggattattatgcggactagccctcggaacaataaattttatacgcatttatttaatgaacgggcaaaatcttatgttatgcgtcacagttacgctgtccgtatgtgtacaattataa

SEQ ID NO: 70616 - protein, 396 aa, Unknown
  Obtained from environmental sample
  DOMAIN (315)...(396): Divalent cation transporter
  misc_feature (1)..(396): Xaa is any amino acid
MDKEEIIELIRAGSFDILKLKPLIIDMNTADIAEISEELDKENKIRLFRILPKAIASEVFAYMDSDQQQIVVEALTDTEIGEIMNKLFMDDAVDFIEEMPANIVKRVLKNVPPEKRKLINNFLQYPDDSAGSLMTTEYVDLREDETVHKAFDTIRSTGLNKETIYNCYVIRKDRVLVGSISAKTLMLAKPRQRIGSLMDTNLVYAHTTDDQEAVAEQFKKYSLLAMPVVDKEQRLVGIITVDDIVDVIVEESTEDIEKMNALAPSDDPYLKTGVLRLARNRILWLLVLMLSATITGIIISNFEAGLAALPILVAFIPMLMDTGGNAGSQSSTLIIRGMAIGEITPKDIIRIVWKEVRVGLLCGLALGTINFIRIYLMNGQNLMLCVTVTLSVCVQL

SEQ ID NO: 70617 - DNA, 1455 bp, Unknown
  Obtained from environmental sample
  misc_feature (1)..(1455): n is a, c, g, or t
atgttaccaacattaataaaatacattctcacgcagtccccgcagtctcaggaagtggagatttcgggctgggtcaggacaaagagggatatgaaaaatcttgtctttgtggaagtaaacgacggttcttgctttgccggtattcaatgtacttttgacagaggtgcgggaattgacgagcggacggaagcctctctcgcctctctttctacgggcgcttccgttaaaatcggcgggaagctgataccttcgcccgcttcaggacaggctgtggaaattgcggctgtgtctttgcatgttttcggcgacgcccctgccgaagccgtcggcgatacgcaggcttatccgcttcaaaaaaagcggcactctttggaatttctccgtgagattgcgcaccttcgcccgcgtaccaatacttttggagcagtagcccgtcttagaagccgattggcgttcgctattcacaagtattttcaggagagggattttcattaccttcatacgccgattatcacggcgggagattgcgaaggcgcgggagcgatgtttcaggtaacgacgctcgatcttgaagccgccgccaaacaatttgcggggaaagcgaataacggacaaacggaagcgatagattactccaaagattttttcggcaagaaaacatttttaacggtttcaggtcagcttgaaggggaaacctacgcgacggcagtctcacgcatttatactttcggtcccactttccgcgcggagaactcaaacacagtccgccaccttgcggaattctggatggtagagcctgaagtcgctttcgccgaattaaaagacgatatggagttagcggaagattttttgaaatatgtttttaacgccgctttgaacgaatgcgccgatgaacttactttttttgacgcccatatcgaaaaaggaataatcgaaaatctgcggcaggtagctggagcgaaatttgcgcatatcacttatactgacgccgttaaagagttggaaaaagcagtcgccgcaaagagcgatattttcgaatttaaaccaagttggggctgcgatttacagagcgagcatgaaagatttttaacggaaaaagtagccggcggtcccgtaattgttacggattatccaaaggaaataaaagctttttacatgaagttaaacgacgacggcaagacagtgcgggcgatggacgttcttgtccctcggttaggtgaaattatcggcggctcacagcgtgaagacagttacgataaacttgtcaatcgcatgaatgaactcggcttaaaaaaagaagattatcattggtatcttgatcttcgccgttacgggtcagtgcctcattctgggttcggtcttgggtttgaaagacttattcagtatgtttcaggtatggcgaatatccgtgatgttattccctatccgcgcgcggtggggcaggctgaattttaa

SEQ ID NO: 70618 - protein, 484 aa, Unknown
  Obtained from environmental sample
  DOMAIN (19)...(101): OB-fold nucleic acid binding domain
  misc_feature (1)..(484): Xaa is any amino acid
MLPTLIKYILTQSPQSQEVEISGWVRTKRDMKNLVFVEVNDGSCFAGIQCTFDRGAGIDERTEASLASLSTGASVKIGGKLIPSPASGQAVEIAAVSLHVFGDAPAEAVGDTQAYPLQKKRHSLEFLREIAHLRPRTNTFGAVARLRSRLAFAIHKYFQERDFHYLHTPIITAGDCEGAGAMFQVTTLDLEAAAKQFAGKANNGQTEAIDYSKDFFGKKTFLTVSGQLEGETYATAVSRIYTFGPTFRAENSNTVRHLAEFWMVEPEVAFAELKDDMELAEDFLKYVFNAALNECADELTFFDAHIEKGIIENLRQVAGAKFAHITYTDAVKELEKAVAAKSDIFEFKPSWGCDLQSEHERFLTEKVAGGPVIVTDYPKEIKAFYMKLNDDGKTVRAMDVLVPRLGEIIGGSQREDSYDKLVNRMNELGLKKEDYHWYLDLRRYGSVPHSGFGLGFERLIQYVSGMANIRDVIPYPRAVGQAEF

SEQ ID NO: 70619 - DNA, 1305 bp, Unknown
  Obtained from environmental sample
  misc_feature (1)..(1305): n is a, c, g, or t
gtgatcaagatagagactactacggaaaccatagaaagtaaaggcggactgatccttgccgggaaaatcgcgaagagagccgggcttgcggccataaaaagcctgattgtaaagaatgcgggaattattatagccagcatgttcggcctatttgtggaagggaaaagcgattttgaaagcatgggggaaaaacgggaaagcctgtttttcaaagaggcgcttgggctgccttgcgtgtacgcgaaagaaacggtaaggctttaccttgggaagatggcggaagacgccgacgggattatcgaacagttaagggaaagctccacaaagataatatgccaagcgccgctgcacgggctttggatacaggggaaacactatcttcctgtggatgtcgacacggcagcaatggacaactcgaagacaaagaaagaaggggtgagccggacgtaccgggggtttgacgggtttcatcctataatggcgtatgtagggaaagaagggtacctgctggactgtgaattgcggcccggcagccagcactgccagaatgggacagttgaatttatcgaagggttaatgggacggcttgggggcataaaaccaggcgggcgtttattgttccgcctggacagcggcaacgattccttcgatacccttaaagccgtgacagggaaagggcgttattgcatcgtaaaacggaacaaacgaagggaaaacgacgaaaaatggcttaaaagggccaaacggcacgggaaacgggttgtgtcaaggaaaggaaaaaaagtctggataggaaccgtgcggatgcaccctcagagaaaggatgaagcccttgaggacgtcatatgcgtgttcgaggttatagaacggaagaccgacagccaggggaaccgatacttgtttccggaaatagaggtaaacagctggtggacgaaccttggctgcggggcagagaaagtgatggaactgtatcacggccatgccacaagcgagcagtttcacagcgaactgaaaagcgacatgggagttgagcggcttccgtccgggaagtttgcggtaaacaaaatagtgctggcagtggcgatgaatgcatataacgcgctgaagatgctcggccaaaaatccatagggaagggaaacggcaaaaaggtgaaacgcaggcggctgggaaaggtaatccgagatttgatatgcgttgcgggaaaattagtaaagcatggcagggaactgatattcaaaattaacgagaaagatcccatgctgccggcgtttttgaggctgaatgctttgttgggctgcccgtag

SEQ ID NO: 70620 - protein, 434 aa, Unknown
  Obtained from environmental sample
  DOMAIN (126)...(367): Transposase DDE domain
  misc_feature (1)..(434): Xaa is any amino acid
MIKIETTTETIESKGGLILAGKIAKRAGLAAIKSLIVKNAGIIIASMFGLFVEGKSDFESMGEKRESLFFKEALGLPCVYAKETVRLYLGKMAEDADGIIEQLRESSTKIICQAPLHGLWIQGKHYLPVDVDTAAMDNSKTKKEGVSRTYRGFDGFHPIMAYVGKEGYLLDCELRPGSQHCQNGTVEFIEGLMGRLGGIKPGGRLLFRLDSGNDSFDTLKAVTGKGRYCIVKRNKRRENDEKWLKRAKRHGKRVVSRKGKKVWIGTVRMHPQRKDEALEDVICVFEVIERKTDSQGNRYLFPEIEVNSWWTNLGCGAEKVMELYHGHATSEQFHSELKSDMGVERLPSGKFAVNKIVLAVAMNAYNALKMLGQKSIGKGNGKKVKRRRLGKVIRDLICVAGKLVKHGRELIFKINEKDPMLPAFLRLNALLGCP

SEQ ID NO: 70621 - DNA, 816 bp, Unknown
  Obtained from environmental sample
  misc_feature (1)..(816): n is a, c, g, or t
atgaaaaggaaaccggggagattcaaaaactggtttcccttttatcaaatgaaaactactgcaaaattcaggaaaggcttggcaaaaagaggcttgaggaatggctttacttgtcttttcaccggcgggcccggcactggaaagaccgagacagcctatcagattgcccgccaaaccggacgcaatataatggcggtgaatatagccgaaacaaaaagcatgttttttggtgaaagcgaaaggaagataacagaaatcttcgccaattacagggcggctgtaaataattccaaaatcgctccaattctattgttcaacgaagcggatggaattatcggcaaacgcctggaacttcattcttttagccgggctgtcgatcaggcggaaaacagcattcagaatatcattctacaggaaatagaaaacctttcgggtattttgattgccacgaccaacttaacgcaaaacatggacagcgcctttgacaggcgttttctttataaaatatcttttgacagaccttgtgcccatggacgtaaagacatctggaacgccttgctgcctgaattgccggaggaattggttgttgaactatccgggaaatttgaactgacaggcgggcaaattgaaaacatcgcgcgcaagattaacgttgacgagatactaagcggatgcacatctttggatactctgctgcagtactgcaaagacgaggttgatagcggctttaacgcttctaaaatgatagggtttaattcgcaatcaccgagccagccatcctccgtccactgccaacgtatagccgttaatgtatga

SEQ ID NO: 70622 - protein, 271 aa, Unknown
  Obtained from environmental sample
  DOMAIN (37)...(222): ATPase family associated with various cellular activities (AAA)
  misc_feature (1)..(271): Xaa is any amino acid
MKRKPGRFKNWFPFYQMKTTAKFRKGLAKRGLRNGFTCLFTGGPGTGKTETAYQIARQTGRNIMAVNIAETKSMFFGESERKITEIFANYRAAVNNSKIAPILLFNEADGIIGKRLELHSFSRAVDQAENSIQNIILQEIENLSGILIATTNLTQNMDSAFDRRFLYKISFDRPCAHGRKDIWNALLPELPEELVVELSGKFELTGGQIENIARKINVDEILSGCTSLDTLLQYCKDEVDSGFNASKMIGFNSQSPSQPSSVHCQRIAVNV

SEQ ID NO: 70623 - DNA, 507 bp, Unknown
  Obtained from environmental sample
  misc_feature (1)..(507): n is a, c, g, or t
gtggacattgtggtaaacaacgccgggatcatcaaacggaacgacgcggtggactttaccgaagccgaatgggacgatgtaatcaacatcaacctaaaaacggtgttttttatgtgccaggccgcggcccggcagtttatcaaacaaaattcaggcggcaaaatcattaacatcgcctccatgctctcctaccagggaggcatccgggttccgtcctacacagcctccaaaagcggggtaaaggggatcaccatgctcatggcaaacgaatgggccaaacataacatcaacaccaacgcaatcgcccccggctacatggctaccgataacacgtcggctctccggcaggacgcggatcgcagcgccgccatactggatcgcattcccgccggacgctggggtactcctgacgatgtagcgggcgtggcggtgttccttgcatcgccggcagcttcatacattaacggctatacgttggcagtggacggaggatggctggctcggtga

SEQ ID NO: 70624 - protein, 168 aa, Unknown
  Obtained from environmental sample
  misc_feature (1)..(168): Xaa is any amino acid
MDIVVNNAGIIKRNDAVDFTEAEWDDVININLKTVFFMCQAAARQFIKQNSGGKIINIASMLSYQGGIRVPSYTASKSGVKGITMLMANEWAKHNINTNAIAPGYMATDNTSALRQDADRSAAILDRIPAGRWGTPDDVAGVAVFLASPAASYINGYTLAVDGGWLAR

SEQ ID NO: 70625 - DNA, 954 bp, Unknown
  Obtained from environmental sample
  misc_feature (1)..(954): n is a, c, g, or t
ttggaacgcgaacttgaattcgaaaaacccgtggccgaactcgaaaaggccatagagaagctcaagagctcggccgccgagagcaagggcgatttcggcccgcaaatagccgaactcgaaaggaagtgcgaggagcgtaagagggagatatacgacaccctctccccctggcagaccgtgcaggtcgcgaggcatcccaaacgtccggtgctctacgactacatatctcttatattcaaggatttcgtagaactgcacggcgacaggcgcttcggcgacgacagggcgctgatcggcggcttcgccacgctcgatacccagaaggttatgctcataggacacagcaaaggcaaaaatatagaggagaacgtaaggcgcaacttcggaatggcaaagccggagggctaccggaaagcgctgcgtcttatgcgtttggccgaaaaattcaacgtgcccgtagtctccttcatagacaccgcgggcgcctaccccggcttagacgccgaacagcgcggccaagccgaagccatagcgagaaacctgacggaaatggccaaattagaaattcccatagtagccttagtaaccggcgaaggcggcagcggcggcgcgctaggcataggcgtggcggattccgtgctgatgctctcaaacgccgtatactcggtaatatccccggaaggttgcgcctccatcctatggcgagacgcctcatactcggcccaagccgccgagagcctgaaaattaccgcaaaatcattattatcactgggagtgatagacgaaatagtaaaagaacccgccggcggcgcccacagcaaccaccaagccgcagccgacgcgataaaggcggtagtgctgaaacacttgaaaaaattaataccgttatcaccgcagaaattgatacagaggagattcgagaagttttcggagatggggaagtttactaagtag

SEQ ID NO: 70626 - protein, 317 aa, Unknown
  Obtained from environmental sample
  DOMAIN (3)...(147): Acetyl co-enzyme A carboxylase carboxyltransferase alpha subunit
  misc_feature (1)..(317): Xaa is any amino acid
MERELEFEKPVAELEKAIEKLKSSAAESKGDFGPQIAELERKCEERKREIYDTLSPWQTVQVARHPKRPVLYDYISLIFKDFVELHGDRRFGDDRALIGGFATLDTQKVMLIGHSKGKNIEENVRRNFGMAKPEGYRKALRLMRLAEKFNVPVVSFIDTAGAYPGLDAEQRGQAEAIARNLTEMAKLEIPIVALVTGEGGSGGALGIGVADSVLMLSNAVYSVISPEGCASILWRDASYSAQAAESLKITAKSLLSLGVIDEIVKEPAGGAHSNHQAAADAIKAVVLKHLKKLIPLSPQKLIQRRFEKFSEMGKFTK

SEQ ID NO: 70627 - DNA, 840 bp, Unknown
  Obtained from environmental sample
  misc_feature (1)..(840): n is a, c, g, or t
atgggctggtttacaaaaaagtcgaaagagccgaccgccaaaaagcagcatcagcatgacgagatttggattcgctgccagtcctgctcggcgcacgtgttcaagcaagacttcttaaacaacgtcagcgtctgccccaagtgcggctggcacggcaagctgaccgcctacgagcgcatcggcatcacgctcgacagcgggacgttcaaggagatgttcgagaccatacgcccgtgcgacccgttgcagttcgtcgacggcaaggggccttacggcgagaaggcggaaacggcgcgcgccaagaccaagctcaacgagtcggtggtgaccggcaccggaaagataaacggtctcgaggtcgccgtgagcgttatggactttcgctttttgggcggcagcctcggctccggaaccggcgagaagatactccaaggcgccaactacgcctacgaccaccgcatcccctacgtcatattttcggcgtcgggcggcgcccgtatgcacgaggggatactgtcgctcatgcagatggccaagacctgcgccggcgtggcgcggctggacgagcggcggattccgttcatctccgtgctgaccgacccgacgacgggcggcgtctccgcctcctacgcgatggtgggcgacgtaaacattgccgaacccggggcgctaatcggcttcgccggcaggcgggtgatcgagcagaccatcaagcagaaactgccggaagactttcaaaccgccgaattcgtgatggagcacggttttctggacgctatcgtgcatagacgggatatgaagaacacactgcaccgtatactttcatactataataggtga

SEQ ID NO: 70628 - protein, 279 aa, Unknown
  Obtained from environmental sample
  misc_feature (1)..(279): Xaa is any amino acid
MGWFTKKSKEPTAKKQHQHDEIWIRCQSCSAHVFKQDFLNNVSVCPKCGWHGKLTAYERIGITLDSGTFKEMFETIRPCDPLQFVDGKGPYGEKAETARAKTKLNESVVTGTGKINGLEVAVSVMDFRFLGGSLGSGTGEKILQGANYAYDHRIPYVIFSASGGARMHEGILSLMQMAKTCAGVARLDERRIPFISVLTDPTTGGVSASYAMVGDVNIAEPGALIGFAGRRVIEQTIKQKLPEDFQTAEFVMEHGFLDAIVHRRDMKNTLHRILSYYNR

SEQ ID NO: 70629 - DNA, 723 bp, Unknown
  Obtained from environmental sample
  misc_feature (1)..(723): n is a, c, g, or t
ttggattcgctgccagtcctgctcggcgcacgtgttcaagcaagacttcttaaacaacgtcagcgtctgccccaagtgcggctggcacggcaagctgaccgcctacgagcgcatcggcatcacgctcgacagcgggacgttcaaggagatgttcgagaccatacgcccgtgcgacccgttgcagttcgtcgacggcaaggggccttacggcgagaaggcggaaacggcgcgcgccaagaccaagctcaacgagtcggtggtgaccggcaccggaaagataaacggtctcgaggtcgccgtgagcgttatggactttcgctttttgggcggcagcctcggctccggaaccggcgagaagatactccaaggcgccaactacgcctacgaccaccgcatcccctacgtcatattttcggcgtcgggcggcgcccgtatgcacgaggggatactgtcgctcatgcagatggccaagacctgcgccggcgtggcgcggctggacgagcggcggattccgttcatctccgtgctgaccgacccgacgacgggcggcgtctccgcctcctacgcgatggtgggcgacgtaaacattgccgaacccggggcgctaatcggcttcgccggcaggcgggtgatcgagcagaccatcaagcagaaactgccggaagactttcaaaccgccgaattcgtgatggagcacggttttctggacgctatcgtgcatag

SEQ ID NO: 70630 - protein, 240 aa, Unknown
  Obtained from environmental sample
  misc_feature (1)..(240): Xaa is any amino acid
MDSLPVLLGARVQARLLKQRQRLPQVRLARQADRLRAHRHHARQRDVQGDVRDHTPVRPVAVRRRQGALRREGGNGARQDQAQRVGGDRHRKDKRSRGRRERYGLSLFGRQPRLRNRREDTPRRQLRLRPPHPLRHIFGVGRRPYARGDTVAHADGQDLRRRGAAGRAADSVHLRADRPDDGRRLRLLRDGGRRKHCRTRGANRLRRQAGDRADHQAETAGRLSNRRIRDGARFSGRYRA

SEQ ID NO: 70631 - DNA, 768 bp, Unknown
  Obtained from environmental sample
  misc_feature (1)..(768): n is a, c, g, or t
atggcggcggttctcgcgaaagggaaaacaattttgactaacgccgcgagcgaaccgcatgtgcaggatttgtgcaaaatgttagccgcaatgggcgctcaaattgaggggatcggctccaatatagttacaattaccggagtggataaactttcaggctgtgattttgaaatcggcgctgactttatggaagtgggctcctttatcggtcttgccgccgtaaccggcggagacctgcacatagaaggcgctcatcctcaggatatgcgccccgcaaaaatagcgttcgggaaattgggcattgtttgggcgcatgagggaacggttatccatgtgccgaaaaatcagagtatggaagtaaaccatgacctcggcggtatgattccaaaaatagacgacgccccttggcccggcttcccgcccgatcttatcagcataataatcgtagtggcaacacagataaagggcactgtgttggttcacgaaaaaatgtatgaatcgcgaatgttctttgtggataaacttatcggcatgggagcgagaattgtgttatgcgatccgcatcgcgccgttatttcaggaccggcaaaactccacggttcggaattgataagccccgatgtgcgcgcggggatgtccatgctgattgccgctatgtgcgccgagggcaagagcgttatacgcaatgtttaccagattgagcgcggttatgagcagttggcggcaagactttccagccttggcgcgaatatcgtaaggaatgattga

SEQ ID NO: 70632 - protein, 255 aa, Unknown
  Obtained from environmental sample
  DOMAIN (1)...(244): EPSP synthase (3-phosphoshikimate 1-carboxyvinyltransferase)
  misc_feature (1)..(255): Xaa is any amino acid
MAAVLAKGKTILTNAASEPHVQDLCKMLAAMGAQIEGIGSNIVTITGVDKLSGCDFEIGADFMEVGSFIGLAAVTGGDLHIEGAHPQDMRPAKIAFGKLGIVWAHEGTVIHVPKNQSMEVNHDLGGMIPKIDDAPWPGFPPDLISIIIVVATQIKGTVLVHEKMYESRMFFVDKLIGMGARIVLCDPHRAVISGPAKLHGSELISPDVRAGMSMLIAAMCAEGKSVIRNVYQIERGYEQLAARLSSLGANIVRND

SEQ ID NO: 70633 - DNA, 1113 bp, Unknown
  Obtained from environmental sample
  misc_feature (1)..(1113): n is a, c, g, or t
ttgaggcgcggcgtggaaataattatactgactgcttttgttgtgcttttcttccttgtcattatgattcttgtaaaattgtattcaaataaaaccgcggactactccgcgcagatgattgacctaaaaaaccaaataaacgaattaaaaaccaaacagcttgaaagtcagcaggcttcacaattccagcaaacaaaatttatttccgatactctggataaacttaacggtcaaatacagcaaaagttagctgccatggatcagaatctcaactctaatcaaagcaatattacaaaacaactttcaagttccaatcaaataatcggcgatatacacaataaactcggctctttggaaacaacggcgaaaaatattcaggatataggcaaggatatatcgtcactgcagaatattttgcaggctccaaaactgcgcggaaacctaggcgagtatcttttggaagacctgcttaaacagatattcccaagcgcaaattacgggattaaacacagttttaagaatgggactcaggtggacgcggtaattaaacttggcgataatattgtccccgttgattccaagttcccgctggaaagttttcaaaaatttattgccgcggataatgacgaaagcaaaaaatctttcagaaaagattttatttccagcgttaaaaaacgcgtcgatgaaatagcggtaaaatatatcaaccccgccgaaggaacatatgatttcgcgattatgtacattcccgccgaaaatgtttactatgaaacgattataaacgattcctttaccaacaaagattatgagttgttaaactacgctatggaaaaacacgttattcctgtttcacctaacagtttttacgcgtaccttatggcgatttccttcggtttaaagggtcttacgattgaacaggaagccaaaaccatacttggagacatagcgcaagttcaggacaggtttggaaaattcttcacggattacagtcttgtgggaaagcacatatcaaacgcgttgggcaaatacaacgattcagcaaaaagcgcggaaaagttaaatgatcagatgggaagactcacggggcaaaaaacggaacttattgaaggataa

SEQ ID NO: 70634 - protein, 370 aa, Unknown
  Obtained from environmental sample
  DOMAIN (87)...(370): RmuC family
  misc_feature (1)..(370): Xaa is any amino acid
MRRGVEIIILTAFVVLFFLVIMILVKLYSNKTADYSAQMIDLKNQINELKTKQLESQQASQFQQTKFISDTLDKLNGQIQQKLAAMDQNLNSNQSNITKQLSSSNQIIGDIHNKLGSLETTAKNIQDIGKDISSLQNILQAPKLRGNLGEYLLEDLLKQIFPSANYGIKHSFKNGTQVDAVIKLGDNIVPVDSKFPLESFQKFIAADNDESKKSFRKDFISSVKKRVDEIAVKYINPAEGTYDFAIMYIPAENVYYETIINDSFTNKDYELLNYAMEKHVIPVSPNSFYAYLMAISFGLKGLTIEQEAKTILGDIAQVQDRFGKFFTDYSLVGKHISNALGKYNDSAKSAEKLNDQMGRLTGQKTELIEG

SEQ ID NO: 70635 - DNA, 1122 bp, Unknown
  Obtained from environmental sample
  misc_feature (1)..(1122): n is a, c, g, or t
atggaaacttcgatttcatgtattatttgtattgccgacatgaatatagttcccgctctggagcaggcgcttaccgaacttgctcttcccgaagtttttgttcagcgcgccaaacaaacatttctgcaggacaaacgcgattttcttggactgcgtcccattaccaaacttgatgaaagccgcgcgctgatttacagaatgtatgtccccgcggtgtatgaagagagcgttatgcgccgtatcatcgaggcgactgatcttggaatgggcggacgcggcagtattttttcccagcacatcggcattttaagagggacgcctctttcttttgacatggaaaaacttaatactctttgcgaaaaaaaggaaaaactttatgttgaggaacacgcccttatagcttgtacagtttccagaggatcaggcgacgcgcttgctcagacaatattggaacttggtatcggcgtacccgttgtttttttcggaacaggcgcggggttaagggacagattagggcttatgaggataaccattccgatagaaaaagaaatcatctggtttcttgtttcccgttccgacgcggatttagttgaaaaaagcataattccgcgcgccaatcttgacgttcccggcaacggctttttgtaccggtgttttgttcacgcgccgatagtaaacctgcggataagacacggagcgcgcgttcatgccgcaactatggaacaagtaattgccgcgttagacgaagttcgcggttcaaacgattggcgccgtcttggatcgcgtaagcgcgagcacaagagcggcgagggaaaatccattaatacaaggggacttttctttatcggcgacgaagcggaaattgaattattccgtaaagaggctatagaatgcggggcgcggggcgcgacttttaatcatgttgagatgcgctcatacaaagttacgcaagaaaaagccatgcaatcaaaatcccgccaactctgcgacattatcaccacttcggaaaccgaagaaaaaatacgcctttccgccataaaaaacggtctttttgttgaaggtaaaacctgcgtacttaaaagcttcaatgtggaaatgcctactattattcataagagatag

SEQ ID NO: 70636 - protein, 373 aa, Unknown
  Obtained from environmental sample
  misc_feature (1)..(373): Xaa is any amino acid
METSISCIICIADMNIVPALEQALTELALPEVFVQRAKQTFLQDKRDFLGLRPITKLDESRALIYRMYVPAVYEESVMRRIIEATDLGMGGRGSIFSQHIGILRGTPLSFDMEKLNTLCEKKEKLYVEEHALIACTVSRGSGDALAQTILELGIGVPVVFFGTGAGLRDRLGLMRITIPIEKEIIWFLVSRSDADLVEKSIIPRANLDVPGNGFLYRCFVHAPIVNLRIRHGARVHAATMEQVIAALDEVRGSNDWRRLGSRKREHKSGEGKSINTRGLFFIGDEAEIELFRKEAIECGARGATFNHVEMRSYKVTQEKAMQSKSRQLCDIITTSETEEKIRLSAIKNGLFVEGKTCVLKSFNVEMPTIIHKR

SEQ ID NO: 70637 - DNA, 1638 bp, Unknown
  Obtained from environmental sample
  misc_feature (1)..(1638): n is a, c, g, or t
gtgggaatcaccgcgacgctggcggaaccggcggtcgccgtactgcagcggcagggcagtgttatacccgcgtgggacgcgccgcttttgtatcttcttctaaacagaggtacgtcgtggctggtcgccgccatcgctatcggggtggggctttccgtagtgctgggcgtttaccgcttcatgttcggttgggcttttaaaccgcctgtatttatcattattcccgctattgtcgccgttagctgcatattcgatgaaaatccgatactgcgcccgcttgtaaatcttgcgtgggataccggaggcgcggcgacgggcgcggttacagtgccgattattctcgcccttggtttgggagtggtgaaaataggcggcaaaagttccaacgcttccgggcttgggctggtaacgctcgcgtccgctctgcctgttgcaagcgttctttttcttgccgccatgctcggtcccaaagttccgtcgcccggcgacgcaatgtctttcttttccaccgacccggaacagagatcaaaggcggtctatgtcgcgggcaacagcgaagagctttataatatggcgttaatggcggtttcctcaggtgatctttcaaccgaagagtttgagatttgttttcccgaacgacggttagctgaaaatcaggaaattgaagaaccgtcggtgtttgctccgcaggcgttttttggatacgcaaaagccgctcttcttgcggtactgcctcttgggttggttctgatcatcgctattggattaatcgcccgcgacagaatttttaacgccgatattgtcgcgcttggaatattattcgcctctctgggaatgtttgcgcttaatttggggatgacgggtggtattacagtcctaagttctcaagcgggaaattctctcaagcagacttacactgaaacgcttaacgaaaataaaaccgtaacagtgcgcggcgtctatgaaaattcgcttattaccgttccgggagaaaacggaccggaaacgtatatctgggttcaatggaaagacaaaccaacccttgaaaaatttgttcctatgcggcttaacggcgacagttatacccatattcccataaaagacgcaatgtcttcaaagtttggaataatcggcgcgtacattataatacttgtcattgttttctttcttggatttttcgctatttttgcggaacccggactagccgttactgccgtcaccgtagaagaaatgaccaccggtacttttaagcgttcaaaattgatagctattgcggctatgggcgtaggcggcggcatggtgattggtttcgcgcgtgtgctgttcagtaatatgctgcctgcgggaggcatacatctttcgtggattctcgctccttgttatgccattgctttgattctgacaatattcgcgccggaagatttttcttcgatagcgtgggacgttgcgggaattgccacaggtcctatcacagttccaatcattataactacgggacttggactcggaaacgattcactgcgcgctgacggcgctttcggcattgtggcgacggcgagcgtttttccgattatcgtaattcttatatcgggtattatcgataaagcgagatcaaagcgcgtgttaaggaatttttag

SEQ ID NO: 70638 - protein, 545 aa, Unknown
  Obtained from environmental sample
  DOMAIN (336)...(535): Protein of unknown function (DUF1538)
  misc_feature (1)..(545): Xaa is any amino acid
MGITATLAEPAVAVLQRQGSVIPAWDAPLLYLLLNRGTSWLVAAIAIGVGLSVVLGVYRFMFGWAFKPPVFIIIPAIVAVSCIFDENPILRPLVNLAWDTGGAATGAVTVPIILALGLGVVKIGGKSSNASGLGLVTLASALPVASVLFLAAMLGPKVPSPGDAMSFFSTDPEQRSKAVYVAGNSEELYNMALMAVSSGDLSTEEFEICFPERRLAENQEIEEPSVFAPQAFFGYAKAALLAVLPLGLVLIIAIGLIARDRIFNADIVALGILFASLGMFALNLGMTGGITVLSSQAGNSLKQTYTETLNENKTVTVRGVYENSLITVPGENGPETYIWVQWKDKPTLEKFVPMRLNGDSYTHIPIKDAMSSKFGIIGAYIIILVIVFFLGFFAIFAEPGLAVTAVTVEEMTTGTFKRSKLIAIAAMGVGGGMVIGFARVLFSNMLPAGGIHLSWILAPCYAIALILTIFAPEDFSSIAWDVAGIATGPITVPIIITTGLGLGNDSLRADGAFGIVATASVFPIIVILISGIIDKARSKRVLRNF

SEQ ID NO: 70639 - DNA, 567 bp, Unknown
  Obtained from environmental sample
  misc_feature (1)..(567): n is a, c, g, or t
atgaataacgtgagcttttttaagaaattaacggataatctgtttccccgccggaaagaaaagataaccctgtcttttaaggaatcgttttcgctgataaaaatttatgcgtttggcaagatacagccgcagttcaaggcggtattgatggtaagcgtattccttgcggctattcaatattttgtgctgggaacgccgcttcaaaacgcgctttccatagttatatgcgtagccgctgcgattttggggttgtcttttttccttgaggggctttttttgggtatcatgcccctcggcgatcaatgcggaatgaaactgccgtcaaagatcggcnngcggcggggagttaccagttttctcaattatcgtgggaatcaccgcgacgctggcggaaccggcggtcgccgtactgcagcggcagggcagtgttatacccgcgtgggacgcgccgcttttgtatcttcttctaaacagaggtacgtcgtggctggtcgccgccatcgctatcggggtggggctttccgtagtgctgggcgtttaccgcttcatgttcggttgggcttttaa

SEQ ID NO: 70640 - protein, 188 aa, Unknown
  Obtained from environmental sample
  misc_feature (1)..(188): Xaa is any amino acid
MNNVSFFKKLTDNLFPRRKEKITLSFKESFSLIKIYAFGKIQPQFKAVLMVSVFLAAIQYFVLGTPLQNALSIVICVAAAILGLSFFLEGLFLGIMPLGDQCGMKLPSKIGXRRGVTSFLNYRGNHRDAGGTGGRRTAAAGQCYTRVGRAAFVSSSKQRYVVAGRRHRYRGGAFRSAGRLPLHVRLGF

SEQ ID NO: 70641 - DNA, 600 bp, Unknown
  Obtained from environmental sample
  misc_feature (1)..(600): n is a, c, g, or t
atgggagcagtacagacagccaattcccccagttttgattccgtttgggctattttggatagggttagcaaaaagcaagaagaaactgatcggattgttaaggaagtagccgaactccataaagaatatgaacaggaaaggaagaaagacaaggcggagttcaatgaaaggcttgggaattatatcaatcttttcggcgatttcactgaatatacgatggctcccaaattgcgtgagaaatttgcggagattgggcttgattttcccaaagcaaatcgaaattccaatgttaaggataaagttaataatatttttcttgaaactgacgttatgcttgaaaatggcgataaagcaatgatggttgaaataaaaacccaacttactgttgaacgcataaataaacatattgaacgccttgaaaaaatgcgtaaatatgccgatttgcacggggacaagcggacatttttgggtgctgtcgcaggggtggtagtgtcggacaatgtaaaaaagtacatattaaaacagggctttttcgccatagaaccaactggagattcttttactattatttgtccaaataataagcctaaagaatggtaa

SEQ ID NO: 70642 - protein, 199 aa, Unknown
  Obtained from environmental sample
  misc_feature (1)..(199): Xaa is any amino acid
MGAVQTANSPSFDSVWAILDRVSKKQEETDRIVKEVAELHKEYEQERKKDKAEFNERLGNYINLFGDFTEYTMAPKLREKFAEIGLDFPKANRNSNVKDKVNNIFLETDVMLENGDKAMMVEIKTQLTVERINKHIERLEKMRKYADLHGDKRTFLGAVAGVVVSDNVKKYILKQGFFAIEPTGDSFTIICPNNKPKEW

SEQ ID NO: 70643 - DNA, 2763 bp, Unknown
  Obtained from environmental sample
  misc_feature (1)..(2763): n is a, c, g, or t
atgacgttcccgtacgtcgtggagtcagaccttcatctctacgcgaattggaagccgtctgaggaggggtcgaaaaattacacggtaaagttcgatcccaacggcggcacgtttaccgccggaacgcaaacggagttcttagtacccgccggcgacaagctcgtgtctttccccacgcccgcgttgagcggcgattaccactttgacgggtggtatacggcgcccacgggcggcacgaaagtaacgacgagcgcgacgttcgacaagaacacaacgctctacgcccagtggaagccgctctacgtgataacgttcaaagctggcgacggcgccaccgcttccaaggcgagcgaccggaccggccccgacgggaagttggcctctttgcccaccgcgacaaagagcgggttcactttcaacggctggtacacgtcgtcttcgggcggtgagaagataacgatgggcacggagtttacctcgaacaccgaggtttacgcacagtggataaacgaggttagcgtcgtctacacgataacgttcaacgccaacggcggctcggtctcgccgtccacaggcacgaccgccggcgaggggacgctagcggtattgcctatgccaacgagaaccaactacgctttcgcgggctggtacacgacggctgtaggtggaactcgggtaacggaaagcacggtgttcccatctaacacgactatcttcgcccattggacgcagctctacacggtgacgttcaacgccgacggcggctcggtctccccgtcgtcagcgaagacggacgccgacggaaaattggcgattgacctgcctgtgcctactaaagcgaacaacgtctttgacggatggtacacggcgaagactaccggcggtttggaggtaacggagagcatggtgttcaccgcgaacacgactatctacgcccgttggacgcagctctacacgataacgttcaacgccaacggcggaacggtttctccggcgtccgctagggcggaggttgacgggaaattggagtctctgcccacacccgcgcgggctggttacgacttcgacggctggtacagtacgtcggcggctaccggcggcacggagataacggagagcacggcgttcaccgcgaacacgaccatctacgcccgttggacgttattaaagtacacgataacgtttgacccgagcggcggcactgtttcagtagagtccggcgtaaccggagcgggcggcaagctggcgtctctgccaacccctgcggcgagaatcggatacaacttcggcggttggtacacgtcggcggacggcggtacgaaggtggagacaagcacggtgttcacagcggacgttacaatctacgcccgttggacgcttataagttacgcgataacgtactctctcggcggcggaacggccacccccgccaatccgacgagttacaacatcgaaacgtcggatattacgctgaacgctccggtcagagccgcttacgagttcgacggctggacggggtctaacggcacggtcaagcaggcggacgtaactattccgcagggtagcaccggcgcgaagagctacaccgcgaactggacggcgcttatattcaatataactttcgacgccaacggcggcagaggattgacgacctcgacggcgaagacggcggtgggaggaaaactctcgtctctgcccacgcctacgagggatgaatacgctttcgacggttggttcaccggcgacggcgtcaaggtgacgacgagcacggtgtttgaggaggacgcgacaatttacgcccagtggtcggttgttcgcaagattacgttcgacgccgacggcggcactgttctacccgcgtccgccaatacagtgtcgggcggaaaactcgcctctctgccgacccctgcgaaaaaggattacaccttcataggctggtacaccgccgagacaggcggcgagcgggtgacggcgaacacggtgtttgacgacgacgcgaccatctacgcccgttggccgctggtaacgtacaccatagcctacatactaaacggcggcacggtaacgccccccaacccgacaagttacaccgccgagactccggacatcacgctaaacaacccgataagaggcggctaccgtttcgacggatggacaggatcgaacggcgacgacccgcagacgcaagtggtaatcccgcgaggaagttccggcgcgaaaacctatatagcgaattggacgcccgccgcctacgtcatatacttcgacctaaactacggcgacaatccccccaccgagtccgcgagaacaaccgcggcgacaggcaggttagcgtctctgcccacgcccgaaagagagggctacgtcttcgaaggctggtacaccgagtgggccgacggcgcgggagaaaaagtaacgacaaccacagtattctacaacgacgcgacagtctacgcccgctggtcgcttgtaaagccgttgaagcgcaagattccagtagtcataacgctaggccccaaccccgtgaagtcaagcggcgaagcggcgatttacttgacaagcggcaaagcggtcaaaggcaagttgtcaatctttaacgccgtaggcggaaaagtaggtactgtaaaagtcagcggtattaaaaagattggtacatggaaagtaggtgatgtcgccgagggtgtgtacatagtaaaaggtgtgttgacggatggggatggcgagagggttagggtgtcgttattggttggggttgttaaataa

SEQ ID NO: 70644 - protein, 920 aa, Unknown
  Obtained from environmental sample
  misc_feature (1)..(920): Xaa is any amino acid
MTFPYVVESDLHLYANWKPSEEGSKNYTVKFDPNGGTFTAGTQTEFLVPAGDKLVSFPTPALSGDYHFDGWYTAPTGGTKVTTSATFDKNTTLYAQWKPLYVITFKAGDGATASKASDRTGPDGKLASLPTATKSGFTFNGWYTSSSGGEKITMGTEFTSNTEVYAQWINEVSVVYTITFNANGGSVSPSTGTTAGEGTLAVLPMPTRTNYAFAGWYTTAVGGTRVTESTVFPSNTTIFAHWTQLYTVTFNADGGSVSPSSAKTDADGKLAIDLPVPTKANNVFDGWYTAKTTGGLEVTESMVFTANTTIYARWTQLYTITFNANGGTVSPASARAEVDGKLESLPTPARAGYDFDGWYSTSAATGGTEITESTAFTANTTIYARWTLLKYTITFDPSGGTVSVESGVTGAGGKLASLPTPAARIGYNFGGWYTSADGGTKVETSTVFTADVTIYARWTLISYAITYSLGGGTATPANPTSYNIETSDITLNAPVRAAYEFDGWTGSNGTVKQADVTIPQGSTGAKSYTANWTALIFNITFDANGGRGLTTSTAKTAVGGKLSSLPTPTRDEYAFDGWFTGDGVKVTTSTVFEEDATIYAQWSVVRKITFDADGGTVLPASANTVSGGKLASLPTPAKKDYTFIGWYTAETGGERVTANTVFDDDATIYARWPLVTYTIAYILNGGTVTPPNPTSYTAETPDITLNNPIRGGYRFDGWTGSNGDDPQTQVVIPRGSSGAKTYIANWTPAAYVIYFDLNYGDNPPTESARTTAATGRLASLPTPEREGYVFEGWYTEWADGAGEKVTTTTVFYNDATVYARWSLVKPLKRKIPVVITLGPNPVKSSGEAAIYLTSGKAVKGKLSIFNAVGGKVGTVKVSGIKKIGTWKVGDVAEGVYIVKGVLTDGDGERVRVSLLVGVVK

SEQ ID NO: 70645 - DNA, 1338 bp, Unknown
  Obtained from environmental sample
  misc_feature (1)..(1338): n is a, c, g, or t
gtggacagcgtaatcgccgcgtctaccgccatagacaagatagacaaggcggtgctggactgccagatagcggagcttgaccgccgcatatcgttacagctggacgagatactccacgcgccgcagtttcagcggttggagtcgatctggcgcagcttggattttctcgtacagaggactgatttccggaagaatgtgaagctcaacatcctagacgtctccaaagaggagttggcggaggactttgaggacgtccccgagactatccaatctgggctgtacaagcacgtctacacggacgagtacgacacgccgggaggcgaaccctacgcggcgatgatcagcgatttcgagttcgactccggcgcggccgacgtttcgctgttgcaggaattatcaaaagttgccgcggcgtgccactgcccgttcataggggcggcaacctctaagtttttcgccaaggataaggccgttgacctcactaagatagaggatttgcacaactacatggaacgctcggagtttttgcgatggaactcgtttaggagcaccgaggacagccgctatgtgggcctcacgctcccgcgtttctcattgcgtctgccgtacgggccggacacgctgccggtcaaggagttcgtgtacagggagaatgtggccgggcccggcagcgacaaatacctatggggcggcgcgtctttcgcgtttgcctccaatatggttcgatcattcatagataacggttggtgtgttcagattcgcggtcctgaagcgggaggaaaggtagacaacctgccggtacatgtatttgatgccggacgcgggacggaggtgaagataccaaccgaaattttaattccagaaacccgggagttcgagttcgcccaagaggggttcattcccctctctttctacaagaacagggactacgcctgcttcttctcggcgaactcggcccagaggccgcaggagtttgaaagtccgatagttacggccaacatgcgcatcaactctcggctgccctacattttcctgatatcgcgcatcgcccactacctgaaagtaatccaacgcgaaaacatcggatcgacaaaaagccgtaaggtgttacaagaggagttgacgaggtggataaagaagttggtcacggagatgaaagacccggggccggagcttatagccacgcaccctttaaaagacgccgatgtggatgtgagcgagatagaggacaacccgggcttcttcagggtcagcctatcggtcattccgcactttcagatagaggggatagacataaatctgtcgcttgtgtcgaaattgcctaaagggaaggagtga

SEQ ID NO: 70646 - protein, 445 aa, Unknown
  Obtained from environmental sample
  DOMAIN (2)...(442): Protein of unknown function (DUF877)
  misc_feature (1)..(445): Xaa is any amino acid
MDSVIAASTAIDKIDKAVLDCQIAELDRRISLQLDEILHAPQFQRLESIWRSLDFLVQRTDFRKNVKLNILDVSKEELAEDFEDVPETIQSGLYKHVYTDEYDTPGGEPYAAMISDFEFDSGAADVSLLQELSKVAAACHCPFIGAATSKFFAKDKAVDLTKIEDLHNYMERSEFLRWNSFRSTEDSRYVGLTLPRFSLRLPYGPDTLPVKEFVYRENVAGPGSDKYLWGGASFAFASNMVRSFIDNGWCVQIRGPEAGGKVDNLPVHVFDAGRGTEVKIPTEILIPETREFEFAQEGFIPLSFYKNRDYACFFSANSAQRPQEFESPIVTANMRINSRLPYIFLISRIAHYLKVIQRENIGSTKSRKVLQEELTRWIKKLVTEMKDPGPELIATHPLKDADVDVSEIEDNPGFFRVSLSVIPHFQIEGIDINLSLVSKLPKGKE

SEQ ID NO: 70647 - DNA, 4671 bp, Unknown
  Obtained from environmental sample
  misc_feature (1)..(4671): n is a, c, g, or t
atggccgagagggaacggcacaccgtatttaacacttatgataatggaacgatgattgcgtgggccgatccgccggcgcctaaaacatacaaggcgcatacgtctagggatattatctctctgcccgcgtcggcaaaggcggtatgggaactaagcgacgaggataaggcgggtattaaatatgcaaacggcgcggtgacgggttttattgtgattgatggaattacggtggatacggcggctaggacgcaaatagccaagcccaaggttacaaacaacaacctcgtctacaataaagaagagcaatcggcggggatagcggcgagcgcggacggcgtgtataccgtgacagacgataaaaagacaaacgcgggtgattacacagcgagggtagttttgatagacagagagcattattggtggagtgacggcacggacgacgattttatattggattggtcgataaaaccggcgccgggaatattcaaatctcatgttccggatccggtggaggcgacatattcgaccggactgacgctcaatgatgtgccattgacggccggttatgagtgggttgctccgaaaactactcctttgagcgtcgcggatagcggtaaaagtttcgcggcggcctacaccgaaagcagtaactacaccgcggccaacgggaatattaaggtgagtgttaaaaaggcggcgggaacattcaaaccttataacgcggtgacggtaacgtatgcggccggactgacgctcaacggtgtggctttgtcgtcgtctgcttatgcttgggttgctccggctacccctttgagtgtcgcggatagcggtacaagtttcgaggcggcctacaccgaaccaagcaataactacatcgcggcaaacggatatattaccgtgaacgtgaaaaaggcggcgggaacgttcaaagctcataacgcggtgacagtgacgtatgtgaccgggctgacgctcaaagatgtgccgttgacggccggttatgcttggacggctcaaactaccgctttgagcgccgcggatagcggcaaaagtttcgcggcgacctataccgacccaagcaataactacaccgcggcaagcgggaatattaccgtgaacgtgaaaaaggcggacggcttaaccgcaacccccaagaccatacagatttccagcgatagtacgggaaccaagagctttagcctctcttcctcctcccttggcctgaacaaaaacgactacggcagcggcacattgagttacacgttaggaacatttgccaatgccggtagcgtcttagccgccgcgcccacgctttccggttccggaacaagcttgaactacaagggcgccggcaagacgagcggcacggctacgcaggttatcaatatcaaaagccgaaactacaccgacatcgccgtcgtcatcacctttgaggctaagtccggacccacttacgccgttacggtaaacaaaggcaccggcgacggcgattacacggtgggcgcatcggtaaccgtcaccgccgacgactctaccgcgtcgggcagagcctttgacaagtggacgatacagaccaccggggtaactgtcgcgaacgtcaacgcgaaaagcacgacgtttatcatgccggccaaagatgtgacggtcacggcgacgtacaaagacagcacctatacgataacgtacaataatcttaacggcgccgccaattcgaataagacaagctatacggtaaagaccgagacttttacgcttagcaatcccaccagaaacggttacgcattcgcgggttggaccggagccaacgggacgaacccgcagatatccgtatctattgagaaagggagcgtcggcaacaaaatctatactgcgaattggacgcctgtcacttacacgatatcgtacacccttggcgacggcggggtagaaccgtccaatccgaatcctagaacctatacgatagagaccgagtcctttacgctcagagaaccgaccaaaaccggttacacattcacgggttggacggggtccaacggtacgaccaagcaaacaaccgtaatcgtttcgaaaggaagcaccggtgatagaaattataccgcgaattggactgttaccgtctacacggtcacgttcaacgtcaacggcagcggcggcgcggtcagcccgacatccctcaagaccgacgccaacggtaagctcgactctttgccgacgccgacgagaagcggttacgcgttcatcggttggttcacggcggcggacggcggcgaggcggtgatgccgagtaagttgtacagcgcaaataccaccatacatgcccattgggcgcctgtctacacgataacgttcaacgtcaacggtagcggcggcacggtcagcccgcagtcagccaagaccggcgccaacggtaagctggactctttgcccacgccgaagcggaacaattacgcgttcaacggttggtacacggcgacggcggggggcgaggcggtaactattaatacgcagtttaccgaaaataagaatatctatgcccaatggtcgcaaatctacacggtaacgttcaacgttaacggtgccggcggcgctgttacccctacgtccgcccagaccggcgccggcggtaagctcgcctctttgcctaagccgacgagaagcggttacgcgtttagcggttggttcacggttacggcggcgaccggcggcgcggaggtaacggcgagcacggtgttcgacaagaatacgactatttatgcgcggtggacggtttcgtacacgataaaattcaacgccggcggcggtacggttacccctgattccgccaagaccggcgccaacggcaagctcgattctttgcctaagcctacgagaagcggttacgcgttcaacggttggttcacgacggcgacgacgggcggcgatacggtaacgattaatacggcgttcaccgagaatacgactgtctacgcgcggtggacgcgtacgcacacggtaacgttcaacgccagcggcggcacggtcactccggcgaccggtacgaccggcgccggcggtaggctcgcgtcgttgcccgtaccgacgagaaccggttacaaatttgccgggtggtatactacggccgcgacgggcggtgcggaggtaacgacgaacacggtcttcaccgagagcacggttatctacgcgcggtggacggtcgttacatacacgataatattcaacgctgccggcggcacggtcaccccgacgtccgccgcgaccgtaagcggcggcgtgctcgcctctttgcccacgccgacggcgaaacccggttactcgtttagcggatggtatacggcggaaacgggcggtacgcaggtaaccgcaagcacggtattcaacgctgacgccgtaatctacgcgcagtgggcgcctataagttacacgataacgtatgctctaaacggcggaaccgcaacgcccgcaaatccgacgagctacactattgagacagcggagattaaattgaataatccaaccaggacgaactacatatttgaaggttggacggaagctaacggcgcggccaagcaaaaggacgtctctattccgctgggaagcaccggcaacaagagctataccgcgaattgggcgtccactgtctacactataaaattcgacgtcaacggggatacgaagctgacgccggattccgcaaagacggcggcgggcggaaagctcgtctccctgcctgcggttacgaccacgagggagggctatgttttcgacgggtggttcacggaggcgaccggcggtgaaaaggtgacgacggccacggtgttcgacggcgacgcgacggtctacgcccagtggtcgcctatctacacggtgacgttcgacgccaacggcggcacggtagcgccggcgaccgccaatactggggcgggcgggaagctcgcctatttgccaacgcctactctggcgaattataccttaatcgggtggtacacggcgaaggagggcggtacgctggtaacgacaaacacggcgtttgacgccgatacggtcgtttacgctcggtggtcgcagttcacacatgctaaagtgacgtttagcgccgtggccaacggaacgcttacggctaccgtagacggttccgcgattgtctcgggcgattctgtggatatcggtaaggatattgtgttcacggctacccctaacaatgggtacggcgcggcgcattggacggtcaacgggaaggcggtcgccgactccgtctttacgtatgtgctcgcggggctttcgaacgcgatagcgatcggggtgtcgtttgatttggcgcccatatccgtgacgtcgcctaagcgtgagattccggtcggtgcggctaccggggaggtcgccgtagcgcctgttaaggcgccctccggtgtcttaacggtcggcccgaatccgattaaggccggcggcgacgtggctatttactggagcggcagcaaggcggtcagcggcaaattgccggtatttgacgctgtcggcggaaaggtcgcctatgtaaatgtcaacggcgtcaagaaaatcggcacgtggagggtcggcgatatcgccgagggcacctatctggtcaggggtgtgctgacggacaaagacggcgtcaagatcagggtatcggcgttggttggcgtcgtgaggtag

SEQ ID NO: 70648 - protein, 1556 aa, Unknown
  Obtained from environmental sample
  misc_feature (1)..(1556): Xaa is any amino acid
MAERERHTVFNTYDNGTMIAWADPPAPKTYKAHTSRDIISLPASAKAVWELSDEDKAGIKYANGAVTGFIVIDGITVDTAARTQIAKPKVTNNNLVYNKEEQSAGIAASADGVYTVTDDKKTNAGDYTARVVLIDREHYWWSDGTDDDFILDWSIKPAPGIFKSHVPDPVEATYSTGLTLNDVPLTAGYEWVAPKTTPLSVADSGKSFAAAYTESSNYTAANGNIKVSVKKAAGTFKPYNAVTVTYAAGLTLNGVALSSSAYAWVAPATPLSVADSGTSFEAAYTEPSNNYIAANGYITVNVKKAAGTFKAHNAVTVTYVTGLTLKDVPLTAGYAWTAQTTALSAADSGKSFAATYTDPSNNYTAASGNITVNVKKADGLTATPKTIQISSDSTGTKSFSLSSSSLGLNKNDYGSGTLSYTLGTFANAGSVLAAAPTLSGSGTSLNYKGAGKTSGTATQVINIKSRNYTDIAVVITFEAKSGPTYAVTVNKGTGDGDYTVGASVTVTADDSTASGRAFDKWTIQTTGVTVANVNAKSTTFIMPAKDVTVTATYKDSTYTITYNNLNGAANSNKTSYTVKTETFTLSNPTRNGYAFAGWTGANGTNPQISVSIEKGSVGNKIYTANWTPVTYTISYTLGDGGVEPSNPNPRTYTIETESFTLREPTKTGYTFTGWTGSNGTTKQTTVIVSKGSTGDRNYTANWTVTVYTVTFNVNGSGGAVSPTSLKTDANGKLDSLPTPTRSGYAFIGWFTAADGGEAVMPSKLYSANTTIHAHWAPVYTITFNVNGSGGTVSPQSAKTGANGKLDSLPTPKRNNYAFNGWYTATAGGEAVTINTQFTENKNIYAQWSQIYTVTFNVNGAGGAVTPTSAQTGAGGKLASLPKPTRSGYAFSGWFTVTAATGGAEVTASTVFDKNTTIYARWTVSYTIKFNAGGGTVTPDSAKTGANGKLDSLPKPTRSGYAFNGWFTTATTGGDTVTINTAFTENTTVYARWTRTHTVTFNASGGTVTPATGTTGAGGRLASLPVPTRTGYKFAGWYTTAATGGAEVTTNTVFTESTVIYARWTVVTYTIIFNAAGGTVTPTSAATVSGGVLASLPTPTAKPGYSFSGWYTAETGGTQVTASTVFNADAVIYAQWAPISYTITYALNGGTATPANPTSYTIETAEIKLNNPTRTNYIFEGWTEANGAAKQKDVSIPLGSTGNKSYTANWASTVYTIKFDVNGDTKLTPDSAKTAAGGKLVSLPAVTTTREGYVFDGWFTEATGGEKVTTATVFDGDATVYAQWSPIYTVTFDANGGTVAPATANTGAGGKLAYLPTPTLANYTLIGWYTAKEGGTLVTTNTAFDADTVVYARWSQFTHAKVTFSAVANGTLTATVDGSAIVSGDSVDIGKDIVFTATPNNGYGAAHWTVNGKAVADSVFTYVLAGLSNAIAIGVSFDLAPISVTSPKREIPVGAATGEVAVAPVKAPSGVLTVGPNPIKAGGDVAIYWSGSKAVSGKLPVFDAVGGKVAYVNVNGVKKIGTWRVGDIAEGTYLVRGVLTDKDGVKIRVSALVGVVR

SEQ ID NO: 70649 - DNA, 567 bp, Unknown
  Obtained from environmental sample
  misc_feature (1)..(567): n is a, c, g, or t
gtgcagaatgtgtatttggaggttttcatggtcgcccaaatacagatgccaaagaaacggctcgccgagctggagagatacagggactccaagttcagcggccaggagttcaagcggttcctctgcctgtggatgagggcggagcaggggctgccgactacggcgatagcgacggccaccggcttccacgaggccaccgtcaggatcgtccagcgggacttcatagacaggggcatgggcgccatcattggcgtcggcagcggcgggaggcgccgccagctcatggctccggacgaggaggcggcgttcntgaagggcttctgcaaggcggcccgcgacgccccgctgctcaccgccggggcggtcagggcggccttggagaaaaagctggggcggcgagtccaccagtccaccgtctaccggatgctggagcgcaacggctggaggaaggtggtcccgcgccccagccacccggagcagagcaaggaggcggccggggccttcaaaaagggggctgcgcagaagcggtggccaaggcgcgtggggaagccaaaaagaggaaaatga

SEQ ID NO: 70650 - protein, 188 aa, Unknown
  Obtained from environmental sample
  misc_feature (1)..(188): Xaa is any amino acid
MQNVYLEVFMVAQIQMPKKRLAELERYRDSKFSGQEFKRFLCLWMRAEQGLPTTAIATATGFHEATVRIVQRDFIDRGMGAIIGVGSGGRRRQLMAPDEEAAFXKGFCKAARDAPLLTAGAVRAALEKKLGRRVHQSTVYRMLERNGWRKVVPRPSHPEQSKEAAGAFKKGAAQKRWPRRVGKPKRGK

SEQ ID NO: 70651 - DNA, 636 bp, Unknown
  Obtained from environmental sample
  misc_feature (1)..(636): n is a, c, g, or t
gtggatgagggcggagcaggggctgccgactacggcgatagcgacggccaccggcttccacgaggccaccgtcaggatcgtccagcgggacttcatagacaggggcatgggcgccatcattggcgtcggcagcggcgggaggcgccgccagctcatggctccggacgaggaggcggcgttcntgaagggcttctgcaaggcggcccgcgacgccccgctgctcaccgccggggcggtcagggcggccttggagaaaaagctggggcggcgagtccaccagtccaccgtctaccggatgctggagcgcaacggctggaggaaggtggtcccgcgccccagccacccggagcagagcaaggaggcggccggggccttcaaaaagggggctgcgcagaagcggtggccaaggcgcgtggggaagccaaaaagaggaaaatgaggctgaggacgatgttccaggacgaggccaggttcggccgcatgtcctcccccagggcctgctgggccccgaagcgcgagcgccccaggccccgtcgcagatggcgagggagttcgtctatgcgttcggcgcggtcagtcccgccgacggccagcacgacagccttgtgctgccgtacgccgacaccggggccatga

SEQ ID NO: 70652 - protein, 211 aa, Unknown
  Obtained from environmental sample
  misc_feature (1)..(211): Xaa is any amino acid
MDEGGAGAADYGDSDGHRLPRGHRQDRPAGLHRQGHGRHHWRRQRREAPPAHGSGRGGGVXEGLLQGGPRRPAAHRRGGQGGLGEKAGAASPPVHRLPDAGAQRLEEGGPAPQPPGAEQGGGRGLQKGGCAEAVAKARGEAKKRKMRLRTMFQDEARFGRMSSPRACWAPKRERPRPRRRWRGSSSMRSARSVPPTASTTALCCRTPTPGP

SEQ ID NO: 70653 - DNA, 411 bp, Unknown
  Obtained from environmental sample
  misc_feature (1)..(411): n is a, c, g, or t
atggcgagggagttcgtctatgcgttcggcgcggtcagtcccgccgacggccagcacgacagccttgtgctgccgtacgccgacaccggggccatgacgatgttcctgcagggggtggccaggcggcaccgccgggaatacatattgatgttcatggaccaggccggctggcacaagtcgaatgggcttggggtgcccgggaacatggagctggcgtacctgccgccgcattcgcccgagctgaacccgcaggagcaggtgtgggacgagctgagggggaagtttttcgggaacatggccttcaagagcatcgatgcggtgatggacaggctggtcgagggcctccggtgcatggaggcgtcccctgacgccctgaagagcctgacccaaagggactggatgaaaaaataa

SEQ ID NO: 70654 - protein, 136 aa, Unknown
  Obtained from environmental sample
  misc_feature (1)..(136): Xaa is any amino acid
MAREFVYAFGAVSPADGQHDSLVLPYADTGAMTMFLQGVARRHRREYILMFMDQAGWHKSNGLGVPGNMELAYLPPHSPELNPQEQVWDELRGKFFGNMAFKSIDAVMDRLVEGLRCMEASPDALKSLTQRDWMKK

SEQ ID NO: 70655 - DNA, 708 bp, Unknown
  Obtained from environmental sample
  misc_feature (1)..(708): n is a, c, g, or t
ttgaatgcgaattggtatgaacagactcttcagcctctggaacagtatacagcagtacctgatcccctacgtggaggaaaacctcggccccctgtcggccaaggagtccgagttcgtcagggcggccgagctggctggcgtggacgcgctggccagggcgtacatgtggaaggggtgcggccggaggcccaaggacaggaaggccgtcctgctggccttcgtagccaaggcggtctggaacctgccgaccaccagggcgctgatcgacttcctcagggccgcccggacggccaggacgctgtgcgactgggagcgggcggcggacgtgccgagcgagtccaccttctcccgcgccttcgagcggttcgccgcggaccgcgtggcggaccggctgcacggggcgatggtggccgccgcgctggagggaaggctggcggggcacgccagcatggactcgaccgaggtggaggccagggagagggcggcggcgaagccaaagaaagaaaaggggcagaggcgcggcaaggggcggcccacgcggctggagctgcaggccgggaggacgctggaggagaacctatccgacctgccatgcgcctgcgaccacggccgcaagcgcaacagcaggggtcttcagcaacgcgtggaagggccacaagctgcacatggcggtggcggacggcggcgcgccgctgtgcgccgtcctga

SEQ ID NO: 70656 - protein, 235 aa, Unknown
  Obtained from environmental sample
  misc_feature (1)..(235): Xaa is any amino acid
MNANWYEQTLQPLEQYTAVPDPLRGGKPRPPVGQGVRVRQGGRAGWRGRAGQGVHVEGVRPEAQGQEGRPAGLRSQGGLEPADHQGADRLPQGRPDGQDAVRLGAGGGRAERVHLLPRLRAVRRGPRGGPAARGDGGRRAGGKAGGARQHGLDRGGGQGEGGGEAKERKGAEARQGAAHAAGAAGREDAGGEPIRPAMRLRPRPQAQQQGSSATRGRATSCTWRWRTAARRCAPS

SEQ ID NO: 70657 - DNA, 1071 bp, Unknown
  Obtained from environmental sample
  misc_feature (1)..(1071): n is a, c, g, or t
atgcgaattggtatgaacagactcttcagcctctggaacagtatacagcagtacctgatcccctacgtggaggaaaacctcggccccctgtcggccaaggagtccgagttcgtcagggcggccgagctggctggcgtggacgcgctggccagggcgtacatgtggaaggggtgcggccggaggcccaaggacaggaaggccgtcctgctggccttcgtagccaaggcggtctggaacctgccgaccaccagggcgctgatcgacttcctcagggccgcccggacggccaggacgctgtgcgactgggagcgggcggcggacgtgccgagcgagtccaccttctcccgcgccttcgagcggttcgccgcggaccgcgtggcggaccggctgcacggggcgatggtggccgccgcgctggagggaaggctggcggggcacgccagcatggactcgaccgaggtggaggccagggagagggcggcggcgaagccaaagaaagaaaaggggcagaggcgcggcaaggggcggcccacgcggctggagctgcaggccgggaggacgctggaggagaacctatccgacctgccatgcgcctgcgaccacggccgcaagcgcaacagcaggggtcttcagcaacgcgtggaagggccacaagctgcacatggcggtggcggacggcggcgcgccgctgtgcgccgtcctgacgagcgcgtccctgcacgactcgcaggccgccatccccctgatgcagatgggggcggggcgggccgccgtcctgtacgatttggcggactccgcctacgacgccgcccagataagggactacagccgctccctggggcgcgtcccgataatagggcggtgccggcgaaggggcgccgggccgccgccgatgccccccgcggagagggcccggcacaaagagcggggcgcggtggagagggcgttctccggcctgaaggacagctgcggcgggcgcgccgtgagggtgaggggcgcggcgaaggtgatggcgcacccgatgttcggggcggtcgcgctgacggcggcgtgcctggcgcgcctgcttga

SEQ ID NO: 70658 - protein, 356 aa, Unknown
  Obtained from environmental sample
  misc_feature (1)..(356): Xaa is any amino acid
MRIGMNRLFSLWNSIQQYLIPYVEENLGPLSAKESEFVRAAELAGVDALARAYMWKGCGRRPKDRKAVLLAFVAKAVWNLPTTRALIDFLRAARTARTLCDWERAADVPSESTFSRAFERFAADRVADRLHGAMVAAALEGRLAGHASMDSTEVEARERAAAKPKKEKGQRRGKGRPTRLELQAGRTLEENLSDLPCACDHGRKRNSRGLQQRVEGPQAAHGGGGRRRAAVRRPDERVPARLAGRHPPDADGGGAGRRPVRFGGLRLRRRPDKGLQPLPGARPDNRAVPAKGRRAAADAPRGEGPAQRAGRGGEGVLRPEGQLRRARREGEGRGEGDGAPDVRGGRADGGVPGAPA

SEQ ID NO: 70659 - DNA, 750 bp, Unknown
  Obtained from environmental sample
  misc_feature (1)..(750): n is a, c, g, or t
gtgcgccatcaccttcgccgcgcccctcaccctcacggcgcgcccgccgcagctgtccttcaggccggagaacgccctctccaccgcgccccgctctttgtgccgggccctctccgcggggggcatcggcggcggcccggcgccccttcgccggcaccgccctattatcgggacgcgccccagggagcggctgtagtcccttatctgggcggcgtcgtaggcggagtccgccaaatcgtacaggacggcggcccgccccgcccccatctgcatcagggggatggcggcctgcgagtcgtgcagggacgcgctcgtcaggacggcgcacagcggcgcgccgccgtccgccaccgccatgtgcagcttgtggcccttccacgcgttgctgaagacccctgctgttgcgcttgcggccgtggtcgcaggcgcatggcaggtcggataggttctcctccagcgtcctcccggcctgcagctccagccgcgtgggccgccccttgccgcgcctctgccccttttctttctttggcttcgccgccgccctctccctggcctccacctcggtcgagtccatgctggcgtgccccgccagccttccctccagcgcggcggccaccatcgccccgtgcagccggtccgccacgcggtccgcggcgaaccgctcgaaggcgcgggagaaggtggactcgctcggcacgtccgccgcccgctcccagtcgcacagcgtcctggccgtccgggcggccctga

SEQ ID NO: 70660 - protein, 249 aa, Unknown
  Obtained from environmental sample
  misc_feature (1)..(249): Xaa is any amino acid
MRHHLRRAPHPHGAPAAAVLQAGERPLHRAPLFVPGPLRGGHRRRPGAPSPAPPYYRDAPQGAAVVPYLGGVVGGVRQIVQDGGPPRPHLHQGDGGLRVVQGRARQDGAQRRAAVRHRHVQLVALPRVAEDPCCCACGRGRRRMAGRIGSPPASSRPAAPAAWAAPCRASAPFLSLASPPPSPWPPPRSSPCWRAPPAFPPARRPPSPRAAGPPRGPRRTARRRGRRWTRSARPPPAPSRTASWPSGRP

SEQ ID NO: 70661 - DNA, 414 bp, Unknown
  Obtained from environmental sample
  misc_feature (1)..(414): n is a, c, g, or t
atggcggtggcggacggcggcgcgccgctgtgcgccgtcctgacgagcgcgtccctgcacgactcgcaggccgccatccccctgatgcagatgggggcggggcgggccgccgtcctgtacgatttggcggactccgcctacgacgccgcccagataagggactacagccgctccctggggcgcgtcccgataatagggcggtgccggcgaaggggcgccgggccgccgccgatgccccccgcggagagggcccggcacaaagagcggggcgcggtggagagggcgttctccggcctgaaggacagctgcggcgggcgcgccgtgagggtgaggggcgcggcgaaggtgatggcgcacccgatgttcggggcggtcgcgctgacggcggcgtgcctggcgcgcctgcttgagtga

SEQ ID NO: 70662 - protein, 137 aa, Unknown
  Obtained from environmental sample
  misc_feature (1)..(137): Xaa is any amino acid
MAVADGGAPLCAVLTSASLHDSQAAIPLMQMGAGRAAVLYDLADSAYDAAQIRDYSRSLGRVPIIGRCRRRGAGPPPMPPAERARHKERGAVERAFSGLKDSCGGRAVRVRGAAKVMAHPMFGAVALTAACLARLLE

SEQ ID NO: 70663 - DNA, 1086 bp, Unknown
  Obtained from environmental sample
  misc_feature (1)..(1086): n is a, c, g, or t
atgacgacaccgaatctcccccaacgactaagaggcctaaacctcggcggttggctaagccagattgacgccatacaagagaaggacccggagaaatttcccggtatagacaagcacatggagtcctttataagcgccgccgatttcgccaatgtaaactcgtggggcttcgaccatgtccgcgtccccatcgactcatatctcttctttaccgagagcgagtcgcccgttgaaaatcgcttggtcaacatagaccgcgccgtcgcgctgtcaaaacagtacgggttaaaattggtactcgacctgcacgaatgcccggggcacgactttgccgacgccgcgagttcgccggttcaaaaattattctccggcgacgatacctgtatcaaaaaagcggagaaaaatatgggcgtgtttgtcggaacgttacggcgcgaacaatcacgtgttattcgagtcgctgacgaacctgtcgcgcctactgcggcgatttggaacacggtgaaagataggctatgccgcgaaatacggcgtcacgcgcctaagtctacgataatcaccggctccaatatgtggaactggccgagcacgtttagcgagctcacgccgtttgacgacgacaacgtggtctacagcgtgcacttctacgaaccgttgctattcacgcaccaattcgcgccgtggattcccgggtcggagataaaggttaaaagaacatatccgtccgactacggtccgggattcataatgaagtacgagcaagtcttatctaaaggagtgtgggacagagaccgattcgtaatggaatttgcgcctgtcaatacattcggaacaaaatacggcgtaccgataatctgcaacgagttcggcgtatacgcacctgtggaacttgaggcgcagttgcgttggtacggcgatttgctctccgttcttaaagatatggaaatagggttttcgtattggaattataaaaacctcgacttcgggataatatccgtgggcgagaaactccacgagacgctgccgcagtacgacaacgcggagcgtataaatcacttcgtgcttgacgttttgagaaagtactga

SEQ ID NO: 70664 - protein, 361 aa, Unknown
  Obtained from environmental sample
  DOMAIN (36)...(331): Cellulase (glycosyl hydrolase family 5)
  misc_feature (1)..(361): Xaa is any amino acid
MTTPNLPQRLRGLNLGGWLSQIDAIQEKDPEKFPGIDKHMESFISAADFANVNSWGFDHVRVPIDSYLFFTESESPVENRLVNIDRAVALSKQYGLKLVLDLHECPGHDFADAASSPVQKLFSGDDTCIKKAEKNMGVFVGTLRREQSRVIRVADEPVAPTAAIWNTVKDRLCREIRRHAPKSTIITGSNMWNWPSTFSELTPFDDDNVVYSVHFYEPLLFTHQFAPWIPGSEIKVKRTYPSDYGPGFIMKYEQVLSKGVWDRDRFVMEFAPVNTFGTKYGVPIICNEFGVYAPVELEAQLRWYGDLLSVLKDMEIGFSYWNYKNLDFGIISVGEKLHETLPQYDNAERINHFVLDVLRKY

SEQ ID NO: 70665 - DNA, 930 bp, Unknown
  Obtained from environmental sample
  misc_feature (1)..(930): n is a, c, g, or t
atgacccacgatactataataaccgaagagccgcggcttagagaatacttagacgacctgcgagggaggggggtaaaaaaactcgctctcgacatggagggcgaccaggggatgtttcactacaagtacgccgtatccatcctgcagtgctttgacggcgagaacgcggcggtgattgacgttctcaaaatgggtagcaacgacacgctaagggaatttctcacctgtcaagatattatcaaggttatgttcgcgtgcggcaacgacatatttatggcgcagacggtgatagggtgcacgataacgcccataaacgatatctccgtggcgcaaaagctgttgggccagccgataaatctcgcgaactacctgaacattgaaaaagaggaaaaagacgcgtttcaaagggcgaattggcttttgcgtccgataaaaccggcgctattggagtacgctatcaacgatgtgttgaagttgctcgagatagagagcagtatggaggagcagcttgtcgagaaagggctctacgatgagtacatacgcgcgtcaagggcggcgagcgacaagaaacacatatctaacccgcacatgttgtttgaaacgaaattcccgggctatgtgagaatgccgtttgagaagaagcggcgcgcggcggcgctgtggatatttagggaacttcttggcgagcggtttgattgtccggtgggatatatattgcctaagaagtcgctaagccaattgctgtacagcgacaaggagttgtcgtacgctcttgaggcggagctcaaccgcaacagaaaaccgcagaagaggcttagtttggagcttataagagagttgctggatacggcgatgcggtcgccgcatattccggacaaaccggcggcgattaagaggcgcaaaatcaatgtagatacgtgtgggagttga

SEQ ID NO: 70666 - protein, 309 aa, Unknown
  Obtained from environmental sample
  DOMAIN (4)...(171): 3'-5' exonuclease
  misc_feature (1)..(309): Xaa is any amino acid
MTHDTIITEEPRLREYLDDLRGRGVKKLALDMEGDQGMFHYKYAVSILQCFDGENAAVIDVLKMGSNDTLREFLTCQDIIKVMFACGNDIFMAQTVIGCTITPINDISVAQKLLGQPINLANYLNIEKEEKDAFQRANWLLRPIKPALLEYAINDVLKLLEIESSMEEQLVEKGLYDEYIRASRAASDKKHISNPHMLFETKFPGYVRMPFEKKRRAAALWIFRELLGERFDCPVGYILPKKSLSQLLYSDKELSYALEAELNRNRKPQKRLSLELIRELLDTAMRSPHIPDKPAAIKRRKINVDTCGS

SEQ ID NO: 70667 - DNA, 1242 bp, Unknown
  Obtained from environmental sample
  misc_feature (1)..(1242): n is a, c, g, or t
gtgggagttgagcccgctatggccgccgatgatacggataagttgaaaatctgccatttcgtaacatattacctgccggttacgcaaaattggatttacagccaattaatacataacgaagaatgtcgcgctacggtgttgtgtcaacggttggtgaatccaaagcagttcccattcgatgcagtgtatcccatttgtcaatcgcgaggtatgccctccgtgcctaataggctgattcataaaatatttgaacgctacccattagagccgcatttatcaacagtaaagcgggtaaatccggatatcctgcacggacactttttgcttgaatcatggcggaattaccgattggtcaagcgcatgaatgtcccattggtgacgacgtgttacggccaggacgtaacgagtttattgaaaaagccgttttgggcggcgcgtagcggaaaggtatttgatatcggggcggcgtttatagttgagggagagtatatgggggaaatgctcgcggctaaagggtgtccgaaggagaagatacgggttatcaagcttggggttgacgttgagagaatttgcggtatcgacggcgatgtcaatgacggtattaataataaagtccgtatattattcaccggtctaaaccgtgaaaaaaaaggagcgatatacgccgccaaagcatttgtcaaagcgctgtctgccggcactgataatcactccgataaaaacggcgagagtgttgatttggaactgcatctattaggcgacggcgtctatcgtaaagccgttgagaaaattctaatggatgccggcgtaaggcaaaaggctgtcttccacggcgtaaccccgtattctcgctacctagagatactcaaaggcgccgacattgttttggcccccagcgtccacgccgccgacggcgacacggagggcggcgcgccggtggtcgtcatagaggcgctatgcgccggagttcctgtcgttggcagcaatcactgcgatatcccgaacattgtctctaacggttccaccggcctcatatcggcggagcgtgacgtggaggcgttgacgagagatatccgtatcctatccgcagatcggcggctaagagcggcgatgggagaacgcgggaagcgctacgcacggggggagcacgatatcggcaaacaggtacggaagattacgatggtttacaaggaggttctaaacgctccctcagcctgccgaccccccgcaccgcgaccatag

SEQ ID NO: 70668 - protein, 413 aa, Unknown
  Obtained from environmental sample
  DOMAIN (191)...(378): Glycosyl transferases group 1
  misc_feature (1)..(413): Xaa is any amino acid
MGVEPAMAADDTDKLKICHFVTYYLPVTQNWIYSQLIHNEECRATVLCQRLVNPKQFPFDAVYPICQSRGMPSVPNRLIHKIFERYPLEPHLSTVKRVNPDILHGHFLLESWRNYRLVKRMNVPLVTTCYGQDVTSLLKKPFWAARSGKVFDIGAAFIVEGEYMGEMLAAKGCPKEKIRVIKLGVDVERICGIDGDVNDGINNKVRILFTGLNREKKGAIYAAKAFVKALSAGTDNHSDKNGESVDLELHLLGDGVYRKAVEKILMDAGVRQKAVFHGVTPYSRYLEILKGADIVLAPSVHAADGDTEGGAPVVVIEALCAGVPVVGSNHCDIPNIVSNGSTGLISAERDVEALTRDIRILSADRRLRAAMGERGKRYARGEHDIGKQVRKITMVYKEVLNAPSACRPPAPRP

SEQ ID NO: 70669 - DNA, 708 bp, Unknown
  Obtained from environmental sample
  misc_feature (1)..(708): n is a, c, g, or t
atgctcgtggagagttttttggcggtcatagcggtcataaccgtcggcgcaatcaccataggcggaaaactcccgcaaggtatagaaacgccgccgcagattttcgcttccgctgtggctagttttcttgtgaagaccggattgccggagagcgtggttttcacgctgatcaccctatcgataagcgccttcgccctcacctccttagactcggtagcccgagtggggcggctggcctttcaggagctatttacagaatcggaaaccggaaacggcggagcgggggggacgcattctcggataaagaatttcttacgcgacaagtacgcggcgacggtttgcacgttgctcttcggttacctgctcgccattttgggatacaaggctatttggccgctgttcggctccgccaatcagttgcttgccgccttgtctctaatagcgtgcgcggtatttctaaagaagacaaagcgtcaaggggtaatgctctacgcgcccatgtttattatgttagccgtaacgtttacggcattaattattaccatattgaccaagggcggaaagctctttgacggtacgttcaacgttgctcaagacttcttgcagttggtatttgcaatactgctgctgggactggggactatggtcgcggtgcggggggtcggcaggctgagggagcgtttagaacctccttgtaaaccatcgtaa

SEQ ID NO: 70670 - protein, 235 aa, Unknown
  Obtained from environmental sample
  misc_feature (1)..(235): Xaa is any amino acid
MLVESFLAVIAVITVGAITIGGKLPQGIETPPQIFASAVASFLVKTGLPESVVFTLITLSISAFALTSLDSVARVGRLAFQELFTESETGNGGAGGTHSRIKNFLRDKYAATVCTLLFGYLLAILGYKAIWPLFGSANQLLAALSLIACAVFLKKTKRQGVMLYAPMFIMLAVTFTALIITILTKGGKLFDGTFNVAQDFLQLVFAILLLGLGTMVAVRGVGRLRERLEPPCKPS

SEQ ID NO: 70671 - DNA, 312 bp, Unknown
  Obtained from environmental sample
  misc_feature (1)..(312): n is a, c, g, or t
atgatggctaaggaaggaattcgcgtaaaattacgcggtttcgatgtggaattgatagaccagagcgcgaaatcaattgttcaggcggtgcagaaggccggagctaaagttaccggcccgattccgctgcctacccgcatcaacaaaatgacggtgcttcgctcgcctcatgtgaataaaaagagccgtgagcaatttgagatgcggacgcataaaaggctcatagatattatcaacccgtcggcggaagtaatggattcgttaatgaagcttgaattgcccgccggcgtggacgtagaaatcaaacaatag

SEQ ID NO: 70672 - protein, 103 aa, Unknown; identical to SEQ ID NO: 12778
  Obtained from environmental sample
  DOMAIN (6)...(101): Ribosomal protein S10p/S20e
  misc_feature (1)..(103): Xaa is any amino acid

SEQ ID NO: 70673 - DNA, 621 bp, Unknown
  Obtained from environmental sample
  misc_feature (1)..(621): n is a, c, g, or t
atgttagggctattggccaaaaaagtgggaatgactcaggtcttcgatgaagaaggcaacatggttccggtaacggtaatgagtgttacgccgaatgttgtcattgccaaaaagacagaagaaaaagaccgctataatgccgtggttattggcgtgggcgacgcgaagaaaagcagggtaacaaaaccttatgccggacagtttcccgaaaacatcgcccccaaaaagcggctgcaggaattgcgggactttgaaaaagaaaccgccgtgggggattcccttggagttgaaacgctggaaggcgtccgctatgtcgacgtatccggcgtatccaagggcaagggttttcagggcgttgttaagcgctatggttttggcggcgggcggaaaacccacggttccaaattccaccgtgagccgggttcgaccggccagagcacctacccgcacaggacgttcaagaatacgaaactcccgggccgcatgggcagggagaacgtgacggttttaagcctgcgggtactgaagctggacgccgagaaacagcttattctggtacgcggatcggttcctggcaataacggcggccttgtgctggttcgcgcggcggtgaaaaggtag

SEQ ID NO: 70674 - protein, 206 aa, Unknown
  Obtained from environmental sample
  DOMAIN (8)...(201): Ribosomal protein L3
  misc_feature (1)..(206): Xaa is any amino acid
MLGLLAKKVGMTQVFDEEGNMVPVTVMSVTPNVVIAKKTEEKDRYNAVVIGVGDAKKSRVTKPYAGQFPENIAPKKRLQELRDFEKETAVGDSLGVETLEGVRYVDVSGVSKGKGFQGVVKRYGFGGGRKTHGSKFHREPGSTGQSTYPHRTFKNTKLPGRMGRENVTVLSLRVLKLDAEKQLILVRGSVPGNNGGLVLVRAAVKR

SEQ ID NO: 70675 - DNA, 648 bp, Unknown
  Obtained from environmental sample
  misc_feature (1)..(648): n is a, c, g, or t
atgacaatgaattgtaaggtttattcaaaagaaggcaatgaactgcgaaccatagaattggcggatgaagtcttcggccttccggcaaacgaagccctgatttggtacgctatcaacaacgagcttgccaacaagaggcagggtaacgcctgtaccaagggacgcggcgaggttcacggctccaatgccaagccttataaacaaaaaggcacgggacgcgcgaggcggggcgacaagaaatcgccggtactggtcggaggcggcgtcattttcgggcccaagccaaaggattattcctatgccatgccgaaaaaggccaagcgtaaggcgctgaaaaccatcctgagccttaaatttaaaaatgacatgttaaaaattattgaggatttttccatagaaacagggaaaacaaaagaccttgcggttctgctgaacaaattcaaccccggcacgcgcaccgtgcttatcctgaaagacgacgacccgaaactcaaaagggccgctgccaatatcccttggcttagctatctttcctataaccgcctgcgggcccatgaccttttctacggccgccaggtgcttatgctggaaacggcggcgaagaacttgaatgaattttacggctctaaagaggaggccgccgaatga

SEQ ID NO: 70676 - protein, 215 aa, Unknown
  Obtained from environmental sample
  DOMAIN (17)...(206): Ribosomal protein L4/L1 family
  misc_feature (1)..(215): Xaa is any amino acid
MTMNCKVYSKEGNELRTIELADEVFGLPANEALIWYAINNELANKRQGNACTKGRGEVHGSNAKPYKQKGTGRARRGDKKSPVLVGGGVIFGPKPKDYSYAMPKKAKRKALKTILSLKFKNDMLKIIEDFSIETGKTKDLAVLLNKFNPGTRTVLILKDDDPKLKRAAANIPWLSYLSYNRLRAHDLFYGRQVLMLETAAKNLNEFYGSKEEAAE

SEQ ID NO: 70677 - DNA, 642 bp, Unknown
  Obtained from environmental sample
  misc_feature (1)..(642): n is a, c, g, or t
gtgaaattgattttaaacgcgacaaaatcgggtattcccggcaaagtcgttacaatagaatacgatcctaaccgcagcgcgaacatcgcgttaatccattacaaggacggcgaaaaacgttacatcatcgctcctaaagatttaaaagcaggcgcggtaattgtaagcgggccggatgccgcgatagagccgggcaacgcccttcctctggaaaatatcccgttagggtttaccgtttataacattgaattaacattgggcaagggcggacaactggtacgttcagcaggaacaagcgcgcttatcgccgcgaaagaaggcgactatgtgacaataaaaatgccctccggcgaaatgagaatggttttcaagaaatgttacgcgacaatcggaaatgtcggcaacgaagaccacatgaacataactttcggaaaagcgggccgcaaacgctggctgggagtgcgccccacggtgcgcggtatggtgatgaaccctgtggatcacccgcacggcggaggcgaaggaaagaacaagggcgttcaccctgttaccccctggggacagccgacaaagggatacaagacccgcaaaaaacacaagccgtcttcaaggtttattgtgagcaggggcaagaagaaatag

SEQ ID NO: 70678 - protein, 213 aa, Unknown
  Obtained from environmental sample
  DOMAIN (6)...(56): Ribosomal Proteins L2, RNA binding domain
  misc_feature (1)..(213): Xaa is any amino acid
MKLILNATKSGIPGKVVTIEYDPNRSANIALIHYKDGEKRYIIAPKDLKAGAVIVSGPDAAIEPGNALPLENIPLGFTVYNIELTLGKGGQLVRSAGTSALIAAKEGDYVTIKMPSGEMRMVFKKCYATIGNVGNEDHMNITFGKAGRKRWLGVRPTVRGMVMNPVDHPHGGGEGKNKGVHPVTPWGQPTKGYKTRKKHKPSSRFIVSRGKKK

SEQ ID NO: 70679 - DNA, 711 bp, Unknown
  Obtained from environmental sample
  misc_feature (1)..(711): n is a, c, g, or t
atgggacaaaaagttaaccctacggggcttagaatcggtattaataaaacatggggttcgcactggtatgtggatccaaaagaatatgtagacgcccttcacgaagatttattgctgcgtaagctcattcttgacatgcccganaccaaaggcgctgatattgccgagatggaaattgtccgtcatccgcaaaagataacaatcacaattcatacggcgcgtccgggagttatcatcggcgtaaaaggcgcgaatatagaaaaaatagagagcgacttacacaagaaagtaaataagattgtaaagataaaaattaaagaagtgcgcaacgcggataacaacgcgcagattgtggcgcagaacatcgcccgccagcttttggcgcgctcttcgttcaggcgcaccatgaagcaggcgatttccaacgctattaaaaagggtaacgcccagggcgtaaaagtgcgcctttcgggaaggctcggcggagcggaaatgtcccgcaccgaagaagctaaagaagggaggattccccttcacacattgcgcgcggatatagattacggttttgccgaagcccacacaccctttggctctataggcgtaaaggtatgggtttataacggcatgaagtacggcaaagaacaaaaagaagacgcaggcgcccttgtccgcaaacggcgggacagggctcccggcggcggcaggagttag

SEQ ID NO: 70680 - protein, 236 aa, Unknown
  Obtained from environmental sample
  DOMAIN (65)...(119): KH domain
  misc_feature (1)..(236): Xaa is any amino acid
MGQKVNPTGLRIGINKTWGSHWYVDPKEYVDALHEDLLLRKLILDMPXTKGADIAEMEIVRHPQKITITIHTARPGVIIGVKGANIEKIESDLHKKVNKIVKIKIKEVRNADNNAQIVAQNIARQLLARSSFRRTMKQAISNAIKKGNAQGVKVRLSGRLGGAEMSRTEEAKEGRIPLHTLRADIDYGFAEAHTPFGSIGVKVWVYNGMKYGKEQKEDAGALVRKRRDRAPGGGRS

SEQ ID NO: 70681 - DNA, 429 bp, Unknown
  Obtained from environmental sample
  misc_feature (1)..(429): n is a, c, g, or t
atgttaagtcctaaacgtgtaaaacgccggaaagttcaaagaggcaatatgcccggcaacgccacaagatgcaacaaagtagtgttcggcgatttcggccttgtcgctatggacagaatgtggataacaaaccggcagatagaggcggcgcgtgtcgccataaaccgccatgtaaaacgcggcggcaaaatgtgggtgcggatttttcccgacaaacccttttcaaagaaaccggccgagacccgcatgggaaaaggaaaaggcgctccggaatactgggtcgcggtagtaaaaccgggaaccgtaatgtttgagcttggcggcggtatcgcaagatctctggcggaagaagcgatgaacctcgccggagcgaaacttccgattaaaacaaagtttgtcgcccgcgcggacatggaacttggggcttaa

SEQ ID NO: 70682 - protein, 142 aa, Unknown
  Obtained from environmental sample
  DOMAIN (1)...(133): Ribosomal protein L16
  misc_feature (1)..(142): Xaa is any amino acid
MLSPKRVKRRKVQRGNMPGNATRCNKVVFGDFGLVAMDRMWITNRQIEAARVAINRHVKRGGKMWVRIFPDKPFSKKPAETRMGKGKGAPEYWVAVVKPGTVMFELGGGIARSLAEEAMNLAGAKLPIKTKFVARADMELGA

SEQ ID NO: 70683 - DNA, 378 bp, Unknown
  Obtained from environmental sample
  misc_feature (1)..(378): n is a, c, g, or t
atgtccgcgcgggcgacaaactttgttttaatcggaagtttcgctccggcgaggttcatcgcttcttccgccagagatcttgcgataccgccgccaagctcaaacattacggttcccggttttactaccgcgacccagtattccggagcgccttttccttttcccatgcgggtctcggccggtttctttgaaaagggtttgtcgggaaaaatccgcacccacattttgccgccgcgttttacatggcggtttatggcgacacgcgccgcctctatctgccggtttgttatccacattctgtccatagcgacaaggccgaaatcgccgaacactactttgttgcatcttgtggcgttgccgggcatattgcctctttga

SEQ ID NO: 70684 - protein, 125 aa, Unknown
  Obtained from environmental sample
  SIGNAL (1)...(24)
  misc_feature (1)..(125): Xaa is any amino acid
MSARATNFVLIGSFAPARFIASSARDLAIPPPSSNITVPGFTTATQYSGAPFPFPMRVSAGFFEKGLSGKIRTHILPPRFTWRFMATRAASICRFVIHILSIATRPKSPNTTLLHLVALPGILPL

SEQ ID NO: 70685 - DNA, 372 bp, Unknown
  Obtained from environmental sample
  misc_feature (1)..(372): n is a, c, g, or t
atgatccaggtagaaagcttcctgaatgttgcggataattcaggcgccaaacttgcgcagtgtataaaagttcttggcggcactcacaggagatacgcgaaaataggcgatattgtcgttgtggcgataaaagaagccttgcccacatcgacaataaagaaaggtactgtggaaaaagcggttgtggtgcggactcataaagagtaccgccgtccggacggaacctatatcaggtttgacgataacgcctgcgtcattattgacgccgcgcttaacccgaaaggaaagcgcattttcgggcctgtagccagagaattaagggaaaagagcgagtttatgaaaatagtttcactcgcgccggaggttttataa

SEQ ID NO: 70686 - protein, 123 aa, Unknown
  Obtained from environmental sample
  DOMAIN (1)...(123): Ribosomal protein L14p/L23e
  misc_feature (1)..(123): Xaa is any amino acid
MIQVESFLNVADNSGAKLAQCIKVLGGTHRRYAKIGDIVVVAIKEALPTSTIKKGTVEKAVVVRTHKEYRRPDGTYIRFDDNACVIIDAALNPKGKRIFGPVARELREKSEFMKIVSLAPEVL

SEQ ID NO: 70687 - DNA, 321 bp, Unknown
  Obtained from environmental sample
  misc_feature (1)..(321): n is a, c, g, or t
atgacagcggcacataaatttaaaataaagaaggaagacactgttcaggttattgccggaaaagacaaaggcaagcagggcagggtattgaaaatccttcgggacaaagaccgcgttcttgttgaaggcgtaaacatcgtaaagaaagcgcagaaaaaacggaaacaacaggatcgcggcggcatattggaaatagaagcggcgcttcattcatccaatttaatgattgtttgtaaaaaatgcggccccacccggatcggatacaagataaccggggataaaaagacaagggtttgcaggaaatgcggggaggctctgtaa

SEQ ID NO: 70688 - protein, 106 aa, Unknown
  Obtained from environmental sample
  DOMAIN (9)...(42): KOW motif
  misc_feature (1)..(106): Xaa is any amino acid
MTAAHKFKIKKEDTVQVIAGKDKGKQGRVLKILRDKDRVLVEGVNIVKKAQKKRKQQDRGGILEIEAALHSSNLMIVCKKCGPTRIGYKITGDKKTRVCRKCGEAL

SEQ ID NO: 70689 - DNA, 582 bp, Unknown
  Obtained from environmental sample
  misc_feature (1)..(582): n is a, c, g, or t
ttgcaggaaatgcggggaggctctgtaatggataaaaattatgtgccccggcttaaaaagatctataaagagcagattgcgccggaactttttaaggaattcaattacaagacaaacatgcaaatccccaagctgaaaaagattgtggtaagtatgggagtaggggaagcgatacagaataaaaattttttgaacgccgccgttgacaccttaacgcagatcacagggcagaaagcggttaagacaaaggcgaagaagagtatcgcgaatttcaagattagaagcggtcaggaaataggagcgaaggtaacattgcgcggaattattatgtacgaattttttgacaggctggtgaatgtcgcccttccgcgcgttaaggactttcacggcatcaaccagaacgcttttgacggacatgggaattattcactgggaattcaggaacagattattttcccggagattgattttgataaaattgaaaaggtagccggattaaacgtcgttatcgttacatcggcgcagaccgacgaggaagcaaaggcgttcctgtcgaagttcggaatgcctttcaggaaatag

SEQ ID NO: 70690 - protein, 193 aa, Unknown
  Obtained from environmental sample
  DOMAIN (35)...(94): Ribosomal protein L5
  misc_feature (1)..(193): Xaa is any amino acid
MQEMRGGSVMDKNYVPRLKKIYKEQIAPELFKEFNYKTNMQIPKLKKIVVSMGVGEAIQNKNFLNAAVDTLTQITGQKAVKTKAKKSIANFKIRSGQEIGAKVTLRGIIMYEFFDRLVNVALPRVKDFHGINQNAFDGHGNYSLGIQEQIIFPEIDFDKIEKVAGLNVVIVTSAQTDEEAKAFLSKFGMPFRK

SEQ ID NO: 70691 - DNA, 369 bp, Unknown
  Obtained from environmental sample
  misc_feature (1)..(369): n is a, c, g, or t
gtggttatttataagacgcgggaagaagcgatacatatagccaacacaatcgcgccggaacatcttgagcttcaagctgccgacgcggacgcctggatacccctgttgaggaattacggatcactttttatcggaagcctttccgccgaggccctcggcgactatgttgcggggattaaccataccctgcccacatcgggcagcgcccgtttcacgggcggcctgtcaatcaggcattttctcaagaccgtcaccacattgcgctgcgcctcaggcgcgggctttgaaaaagcgcgtaacgcggctgaaacgctggcccgcgccgagggccttgaaggccacgcgctaagcgcggcggcgcggggatga

SEQ ID NO: 70692 - protein, 122 aa, Unknown
  Obtained from environmental sample
  misc_feature (1)..(122): Xaa is any amino acid
MVIYKTREEAIHIANTIAPEHLELQAADADAWIPLLRNYGSLFIGSLSAEALGDYVAGINHTLPTSGSARFTGGLSIRHFLKTVTTLRCASGAGFEKARNAAETLARAEGLEGHALSAAARG

SEQ ID NO: 70693 - DNA, 561 bp, Unknown
  Obtained from environmental sample
  misc_feature (1)..(561): n is a, c, g, or t
gtgtctaaaataactgttctggaaacagaaataggtgttattcaggtagataaagaagattatatctgtcttaccgatatgcttaaagcaaaagacggagatttttttgtaaccgactggcttagaaaccgaaatacgcttgaatatattggcatttgggaacagataaacaatcccgattttaattatggcgaattcgccataattagaaataaagctggtttgaatagtttcaagataagtgtaaatgagttcgttcagagaactaatgcgattagtcttcacgcanaagctggtaggtatggtgggacctatgctcacaaagatatagcctttcagtttgcaatgtggataagccctgaatttcaaatatacattgtcaaaaagaatttcaacgccctaaggaagctgaacaaaaactactcggttggtctgccaaacgggaacttgcaaaaatcaattatcacatccatacagacgctgttaaacagaaccttatcccaaaagagcttgccccaaaacaagcctcggcaatatatgccgatgaagcggatgtcttaa

SEQ ID NO: 70694 - protein, 186 aa, Unknown
  Obtained from environmental sample
  DOMAIN (3)...(134): KilA-N domain
  misc_feature (1)..(186): Xaa is any amino acid
MSKITVLETEIGVIQVDKEDYICLTDMLKAKDGDFFVTDWLRNRNTLEYIGIWEQINNPDFNYGEFAIIRNKAGLNSFKISVNEFVQRTNAISLHAXAGRYGGTYAHKDIAFQFAMWISPEFQIYIVKKNFNALRKLNKNYSVGLPNGNLQKSIITSIQTLLNRTLSQKSLPQNKPRQYMPMKRMS

SEQ ID NO: 70695 - DNA, 387 bp, Unknown
  Obtained from environmental sample
  misc_feature (1)..(387): n is a, c, g, or t
ttgcacgcccggcttgaagggcagcctacgctccctttacgcccagtgattccgaacaacgctcgcacccctcgtattaccgcggctgctggcacgaagtttgccggtgcttcctctcgaggtacattcatggcgaccgaaaccgcctgctattccctcacgacagtggtttacacgcctaagcgctccatcccacacgtggcgtcgctgcgtcagggttgcccccattgcgcaatattccctgctgctgcctcccgtaggagtctgggccgtatctcagtcccaatgtggccggtcaccctctcaggtcggctaccgatcgtaggtttggtgggccgataccccgccaactgcctaatcggacgcgaactcatccccaggcgataa

SEQ ID NO: 70696 - protein, 128 aa, Unknown
  Obtained from environmental sample
  misc_feature (1)..(128): Xaa is any amino acid
MHARLEGQPTLPLRPVIPNNARTPRITAAAGTKFAGASSRGTFMATETACYSLTTVVYTPKRSIPHVASLRQGCPHCAIFPAAASRRSLGRISVPMWPVTLSGRLPIVGLVGRYPANCLIGRELIPRR

SEQ ID NO: 70697 - DNA, 399 bp, Unknown
  Obtained from environmental sample
  misc_feature (1)..(399): n is a, c, g, or t
gtgagatgttgggttaagtcccgcaacgagcgcaacccgtgcctctggttgctaattcagctctccagagggactgccggggacaacccggaggaaggtgcggatgacgtcaagtcctcatggcccttacatcctgggccacacacgtgctacaatggggggcacagagggaagccaaatcgcgagatggagcggatcccgaaagcctctcccagttcggataggagtctgcaacccgactccttgaagccggaatcgctagtaatcgcggatcagcatgccgcggtgaatacgttcccgggccttgtacacaccgcccgtcaagccatgggaggggagagcgctccaagacgcgtagccaacccgcaagggagcgggcgtccaaagcgagatccctga

SEQ ID NO: 70698 - protein, 132 aa, Unknown
  Obtained from environmental sample
  misc_feature (1)..(132): Xaa is any amino acid
MRCWVKSRNERNPCLWLLIQLSRGTAGDNPEEGADDVKSSWPLHPGPHTCYNGGHRGKPNREMERIPKASPSSDRSLQPDSLKPESLVIADQHAAVNTFPGLVHTARQAMGGESAPRRVANPQGSGRPKRDP

SEQ ID NO: 70699 - DNA, 369 bp, Unknown
  Obtained from environmental sample
  misc_feature (1)..(369): n is a, c, g, or t
ttgttgtttattttctccataaaggaggtaatccagccgcaccttccggtacggctaccttgttacgacttagccccagtcagggatctcgctttggacgcccgctcccttgcgggttggctacgcgtcttggagcgctctcccctcccatggcttgacgggcggtgtgtacaaggcccgggaacgtattcaccgcggcatgctgatccgcgattactagcgattccggcttcaaggagtcgggttgcagactcctatccgaactgggagaggctttcgggatccgctccatctcgcgatttggcttccctctgtgccccccattgtagcacgtgtgtggcccaggatgtaagggccatgaggacttga

SEQ ID NO: 70700 - protein, 122 aa, Unknown
  Obtained from environmental sample
  misc_feature (1)..(122): Xaa is any amino acid
MLFIFSIKEVIQPHLPVRLPCYDLAPVRDLALDARSLAGWLRVLERSPLPWLDGRCVQGPGTYSPRHADPRLLAIPASRSRVADSYPNWERLSGSAPSRDLASLCAPHCSTCVAQDVRAMRT

SEQ ID NO: 70701 - DNA, 417 bp, Unknown
  Obtained from environmental sample
  misc_feature (1)..(417): n is a, c, g, or t
ttgccgccccggctccctacttcccttccgcggcatccgtcagccgctacgccctgccccgcgcgtcgccgcgtcggtcaaacgccctcgtgcgggcgggggagtcttggcccccttcccgtcggctgcgcctctcggcctcgccttagggtccggctcaccccgggcggactaaccttccccgggaacccttgggctttcggcgcgcgggctttccacccgcgttttcgcatactcatgccagcattctcattcccgatgcctccagcggccatcgccagccgccttcccaggcctacgggacgctctcctaccactttgcatcgctgcaaaatccacgacttcggcggcgcgcttagccccgataattttaggcgcggcagggcatcgaccagtgagctgttacgctttctttaa

SEQ ID NO: 70702 - protein, 138 aa, Unknown
  Obtained from environmental sample
  misc_feature (1)..(138): Xaa is any amino acid
MPPRLPTSLPRHPSAATPCPARRRVGQTPSCGRGSLGPLPVGCASRPRLRVRLTPGGLTFPGNPWAFGARAFHPRFRILMPAFSFPMPPAAIASRLPRPTGRSPTTLHRCKIHDFGGALSPDNFRRGRASTSELLRFL

SEQ ID NO: 70703 - DNA, 471 bp, Unknown
  Obtained from environmental sample
  misc_feature (1)..(471): n is a, c, g, or t
ttgcgctcgcgcggccggttgccgaccggcccgaggggacctttggatgcctccgttactttttgggaggcgaccgccccagtcaaactggccaccaggcattgtcccggctcccgcaagggagcgcggttaggattcaggcaacgcaagggcggtatttcaacgacggctccccccggcccagaagccggggatcatagcctcccgcctatcctacgcgcgcggcgcctaaagccagtgccaagatgcagtgaaggttcatggggtctttccgtccaggcgcggggcgccggcatcttcaccggcactgcaatttcgctgagtctcgggaggagacagcgcagaagtcgttacacgattcgtgcaggtcggaacttacccgacaaggaatttcgctaccttaggaccgttatagttacggccgccgtttaccggggcttcggttcgccgcttcgggggttgcccccctga

SEQ ID NO: 70704 - protein, 156 aa, Unknown
  Obtained from environmental sample
  misc_feature (1)..(156): Xaa is any amino acid
MRSRGRLPTGPRGPLDASVTFWEATAPVKLATRHCPGSRKGARLGFRQRKGGISTTAPPGPEAGDHSLPPILRARRLKPVPRCSEGSWGLSVQARGAGIFTGTAISLSLGRRQRRSRYTIRAGRNLPDKEFRYLRTVIVTAAVYRGFGSPLRGLPP

SEQ ID NO: 70705 - DNA, 366 bp, Unknown
  Obtained from environmental sample
  misc_feature (1)..(366): n is a, c, g, or t
ttggcgaacagccaaacccttgggaccttctccagccccaggatgcgacgagccgacatcgaggtgccaaacctccccgtcgctatggacgcttgggggagatcagcctgttatccccagagtaccttttatccattgagcaacggccgttccacgctgtgccgcgggatcactaagccctgctttcgcatctgctcgacccgtcggtctcgcagtcaagcccccttctgcctttgcgctcgcgcggccggttgccgaccggcccgaggggacctttggatgcctccgttactttttgggaggcgaccgccccagtcaaactggccaccaggcattgtcccggctcccgcaagggagcgcggttag

SEQ ID NO: 70706 - protein, 121 aa, Unknown
  Obtained from environmental sample
  misc_feature (1)..(121): Xaa is any amino acid
MANSQTLGTFSSPRMRRADIEVPNLPVAMDAWGRSACYPQSTFYPLSNGRSTLCRGITKPCFRICSTRRSRSQAPFCLCARAAGCRPARGDLWMPPLLFGRRPPQSNWPPGIVPAPARERG

SEQ ID NO: 70707 - DNA, 369 bp, Unknown
  Obtained from environmental sample
  misc_feature (1)..(369): n is a, c, g, or t
atgcattcagcgcttctccgcagggcgcgcggctacccggccgtgccgctggcgcgacagccggttcgccgtaggcgcccccgtcccggtcctctcgtactaaggacggcgtccctcaagccttgtgcgcccgcgccggatagggaccgaactgtctcacgacgttctgaacccagctcgcgtgccgctttaattggcgaacagccaaacccttgggaccttctccagccccaggatgcgacgagccgacatcgaggtgccaaacctccccgtcgctatggacgcttgggggagatcagcctgttatccccagagtaccttttatccattgagcaacggccgttccacgctgtgccgcgggatcactaa

SEQ ID NO: 70708 - protein, 122 aa, Unknown
  Obtained from environmental sample
  misc_feature (1)..(122): Xaa is any amino acid
MHSALLRRARGYPAVPLARQPVRRRRPRPGPLVLRTASLKPCAPAPDRDRTVSRRSEPSSRAALIGEQPNPWDLLQPQDATSRHRGAKPPRRYGRLGEISLLSPEYLLSIEQRPFHAVPRDH

SEQ ID NO: 70709 - DNA, 1893 bp, Unknown
  Obtained from environmental sample
  misc_feature (1)..(1893): n is a, c, g, or t
atgaaaaacattttcaaattattcggctttattgcacttgcggcaataattgtattttcaatggcggcttgcggagagggagacgacaacccaacacccaaacccacaccaaccccaacacccacacctgatcctgtaatttatacaatgaattttacagaaaatacaggttggaatgagacgggtcatgaggattggaacaggtggcattataagtatcttggcgactataatgacgcaaaaatcaatcctttagattcaaataaggcgtatgttcttacctgttcgtttacttcagacgtggatattgataggttaagtgttcagcttatcaaagaagacggctgggtaaatgtttcagattggacagaaataattgttcctattcccggtactattccaaaaaataccagatataactttagagtgcctctgtttcccaatagtaacgcaagtgattttctatacgttatgattggtagaagtgtttctactgcggcaactttatctttttatgaatttaaactggaagcggttaataaagatatgcagggattagataaatggactgtctccggcaaagatattatagttacggacaaaagaaagacgtttgcggaaaacttgtccagttatcaaggtaaaaataatgtattccacattaaaccaaaatataacgcaagcatttacgatcatttcgtaatagaatatgatttaagcgcttatgcggggaagaagatcggcgttgaaatgtctatggacgcttatttaaataaagaagcaagagtcgcatggcacatgcttattgccccggattatccgttggtgttaggctacaccgattataattatttcttgtccgctaatacatggcatactatatcgggaactactatagttgatgttccctctagcggcgataaaagattatatctttcgggaatgcaaataatcggagcggaagcgtattttgccaacgcgacacttacgattgccgaagaccccggcactaataccgccgttacgttgaacagcgtaacagcggacggttccgcgtcgcaaacgacaacgcagttgacgctgacgtttagtcaggcgattaccggtcttaacgccgctaacatcaatcttggcaacaccatatcgggtctgacaaaaggaacgctcagcggttcgggaccaacctatactctgcctgtcagcggatttatccaaggcggaaatttgagcgtaaatgccgttaaattgggttataacataaccggcggtccgaagacggttacaattaattacaaaagcggcggaggcggttcaacgccggttacgcccacaggagtaataacaacaggcgctacctcaaacagcatcaccataggctggaatccggtatccggcgcgacagggtactatatttatcgcagttcatcagtttccggtacttacacacaggttggcagtgcaacaacaacctcatatacagacaccggtctttatgcaggtacggtatactattacaaagttgcggcatacaacagcgacgggacaggtcctcaatcttcgattatttcggcagcgacacaggacagctcgacattctctttcacaatcagcggtactgcaagaacagggcagaaacttactgccgtaacaaccggaaccggatggacaggtaattttaaatggggctatgctgacagcgccggcgcaaatgctttttactatttttcttccggtgcgtccggaaccaataacagcgaatttaccattccggcaggttacacgggaaagtatataagggcgttccgtttccatcctcaaggcacttggactgatatgcaaacatataataaacaatttccaagtaacttccttggtcctgtagacagcaactaa

SEQ ID NO: 70710 - protein, 630 aa, Unknown
  Obtained from environmental sample
  SIGNAL (1)...(25)
  DOMAIN (440)...(519): Fibronectin type III domain
  misc_feature (1)..(630): Xaa is any amino acid
MKNIFKLFGFIALAAIIVFSMAACGEGDDNPTPKPTPTPTPTPDPVIYTMNFTENTGWNETGHEDWNRWHYKYLGDYNDAKINPLDSNKAYVLTCSFTSDVDIDRLSVQLIKEDGWVNVSDWTEIIVPIPGTIPKNTRYNFRVPLFPNSNASDFLYVMIGRSVSTAATLSFYEFKLEAVNKDMQGLDKWTVSGKDIIVTDKRKTFAENLSSYQGKNNVFHIKPKYNASIYDHFVIEYDLSAYAGKKIGVEMSMDAYLNKEARVAWHMLIAPDYPLVLGYTDYNYFLSANTWHTISGTTIVDVPSSGDKRLYLSGMQIIGAEAYFANATLTIAEDPGTNTAVTLNSVTADGSASQTTTQLTLTFSQAITGLNAANINLGNTISGLTKGTLSGSGPTYTLPVSGFIQGGNLSVNAVKLGYNITGGPKTVTINYKSGGGGSTPVTPTGVITTGATSNSITIGWNPVSGATGYYIYRSSSVSGTYTQVGSATTTSYTDTGLYAGTVYYYKVAAYNSDGTGPQSSIISAATQDSSTFSFTISGTARTGQKLTAVTTGTGWTGNFKWGYADSAGANAFYYFSSGASGTNNSEFTIPAGYTGKYIRAFRFHPQGTWTDMQTYNKQFPSNFLGPVDSN

SEQ ID NO: 70711 - DNA, 468 bp, Unknown
  Obtained from environmental sample
  misc_feature (1)..(468): n is a, c, g, or t
gtgcctgacggcgattacggaaattttatcgaaagttacacgggaaaaacatatccgccgggcgacattatcgacatggaagggaaaaaaatcggcgtgcacaaggggcttatccgctacactatcgggcagaggcgggggctaggcgtcgccgcaaatgttcccatttatgtagcggataaatcaatagcggataataccgtaacgctgggaacggacgacgctctttttcgcaaatcgctttccgccaaagacatcaatcttatcgcttgcgaggacttaaaaaagcctatgcgcgtaacggtaaaaacccgctacttgcaggctgaacagagcgccacggcggaacaaacaggggagaacagcctgcacattgaatttgactcaccccagcgcgcaattacgccggggcaagcggttgttatgtatgacggagatattgtagtcggtggcgggacgatagagtag

SEQ ID NO: 70712 - protein, 155 aa, Unknown
  Obtained from environmental sample
  DOMAIN (1)...(154): tRNA methyl transferase
  misc_feature (1)..(155): Xaa is any amino acid
MPDGDYGNFIESYTGKTYPPGDIIDMEGKKIGVHKGLIRYTIGQRRGLGVAANVPIYVADKSIADNTVTLGTDDALFRKSLSAKDINLIACEDLKKPMRVTVKTRYLQAEQSATAEQTGENSLHIEFDSPQRAITPGQAVVMYDGDIVVGGGTIE

SEQ ID NO: 70713 - DNA, 441 bp, Unknown
  Obtained from environmental sample
  misc_feature (1)..(441): n is a, c, g, or t
gtgcgtagcagttgcgacgacgccaagtccgccgccaactgggtgatgacggacattatgcgtatgatgaacgacgctaaaatcgagaacccgtttgaactaaagaccaagccggagcgtttgggcgaactgataaagcagataaacagcggcggcgtttcagccaaggccgccaagagggtcttggacttgatggagagcgaggacaaggagcccggcacggttatccgcgaacagggcctggagcaggtatcggatacgtcggctcttgaagcggtggtaaaaggcgtggtcgatgcccaccccgccgaggttcagaggtacaagggcggcgacaaaaagttagccagcttcttcatgggccaggtaatgaaggcctccaaaggcgcggccaacccgaaagaagctatgactattcttgacaagttgattcttggatga

SEQ ID NO: 70714 - protein, 146 aa, Unknown
  Obtained from environmental sample
  DOMAIN (1)...(144): GatB/Yqey domain
  misc_feature (1)..(146): Xaa is any amino acid
MRSSCDDAKSAANWVMTDIMRMMNDAKIENPFELKTKPERLGELIKQINSGGVSAKAAKRVLDLMESEDKEPGTVIREQGLEQVSDTSALEAVVKGVVDAHPAEVQRYKGGDKKLASFFMGQVMKASKGAANPKEAMTILDKLILG

SEQ ID NO: 70715 - DNA, 1011 bp, Unknown
  Obtained from environmental sample
  misc_feature (1)..(1011): n is a, c, g, or t
gtgaactacttccaaaaatcagagcgcctctataacagcgccgcactaaacaacggcgccggtatctccgagaccgaaatgcgtgagatcgcaaagtggccgcttgatcaggcggtacagctatttgccgccgccgatcaggcaaggcggcattttttttgcgacacggtcgacccgtgcgcgattatgagcgtcaagtcgggcgggtgcggcgaggactgcgccttttgctcgcagtcggctcacaataatgccgatatcgcggcgcacgggctttgcgaaccaagggagattgtcgcacggtgccgggaggcttggtctagggggttgccgttttgcgcggtgtctagcggcaggcgtcttgacaaatcggaatttcagacattgtgcggggcgctttcggagtgcggtagcgatggggagaaacacgcgtcgctgggcatactcggcgatagcgattttgcggcgttgcgcgatgcgggggtcgtgtgctacaaccacaacttggagacgagccgcgattatttcggcaagatagtgaccacgcacggttatgacgatagggtggccaccgtccgtagggcaaaggcggctgggcttagggtgtgctgcgggggtatcttcggcgttggcgagagctgggaggataggatcgcgctgtgtttggagttgcgcgggctgggggttgacaccgtgccgataaaccttttgaacgctatagaaggcacgcgggcggagccgcctaaggagtcgccgcttgagtttttgaagatagtgacgttgtataggttggctatgccgagggcgactattaaagtgtgcggcgggcgggagaagaatttgggggcgttgcagccgttgatttttttggcgggagcaaatggatacattacaggggggtatttgactacgggcggggcgggtgttgatgcggatgatgggatgattgaagcgttgggactgtttagaaaaagtcaaaatcaaaatcttaaaaatcttttgggaaaatga

SEQ ID NO: 70716 - protein, 336 aa, Unknown
  Obtained from environmental sample
  DOMAIN (64)...(224): Radical SAM superfamily
  misc_feature (1)..(336): Xaa is any amino acid
MNYFQKSERLYNSAALNNGAGISETEMREIAKWPLDQAVQLFAAADQARRHFFCDTVDPCAIMSVKSGGCGEDCAFCSQSAHNNADIAAHGLCEPREIVARCREAWSRGLPFCAVSSGRRLDKSEFQTLCGALSECGSDGEKHASLGILGDSDFAALRDAGVVCYNHNLETSRDYFGKIVTTHGYDDRVATVRRAKAAGLRVCCGGIFGVGESWEDRIALCLELRGLGVDTVPINLLNAIEGTRAEPPKESPLEFLKIVTLYRLAMPRATIKVCGGREKNLGALQPLIFLAGANGYITGGYLTTGGAGVDADDGMIEALGLFRKSQNQNLKNLLGK

SEQ ID NO: 70717 - DNA, 336 bp, Unknown
  Obtained from environmental sample
  misc_feature (1)..(336): n is a, c, g, or t
ttggaagtagttcacgcactcttcttgtcttccccgcctttaagcacatactccggcagtgttttgtcaacaacagactctttcgtcaccagcacctccgccacgtcgtccctagacggcagttcgaacatcaccggcagcaggcacgactccagcacgttgcgcaatcctctcgctcctgttttctttcgcacagcggtatccaccgtctccttcagcgcatctttcgcgaacgtcagcgtcacaccctccatggcgaagagtttttggtactgtttgacgagagcgttcttcggctccgtcaggatacgcagcagagagtcttcgtccaattga

SEQ ID NO: 70718 - protein, 111 aa, Unknown
  Obtained from environmental sample
  SIGNAL (1)...(23)
  misc_feature (1)..(111): Xaa is any amino acid
MEVVHALFLSSPPLSTYSGSVLSTTDSFVTSTSATSSLDGSSNITGSRHDSSTLRNPLAPVFFRTAVSTVSFSASFANVSVTPSMAKSFWYCLTRAFFGSVRIRSRESSSN

SEQ ID NO: 70719 - DNA, 1266 bp, Unknown
  Obtained from environmental sample
  misc_feature (1)..(1266): n is a, c, g, or t
gtggacaatacgtcgagacccagatttccggagattaagtgctccttctgcggcaaaggccccgaagacggcaaggcgctcatcacgggcatatccgcctttatatgccacgactgcgtgagcctatgcaacgacatggtacgcgaaaagacccacggcagcggccttgagggcatagacatagacaaactccccacgccccaagagatgaaggagtttctggatcagtacgtcatagggcaaaacgaggtcaagatggccgtgtgcgtcgccgcctacaaccacttcaaacggctattctcaagaggacagggcgaagacgatgtggagattgacaaatccaacatgctgatgataggccccacgggcaccggcaaaacgcttatagcgcaaacgctggcaagattcctgaaagtcccgttcacaatagtggacgccaccatctttacggaagccggctacgtcggcgacgacgttgagaatatgctggtcaggctgttgcaaaccgcgaactacgatgtgcccaaagcggaaaagggcatcatctatatagacgagttcgacaagatatcgaggaaatcagccaatccgtcaataacacgcgatgtctccggcgagggcgtccagcaggctatgctgaagatattggagggcaccgtggccggcgttccccccaagggcgggcgcaagcatccggagcagagcctcatacaaataaacacgagagatatcctcttcatctgcggcggcgcgtttgaggggctagacaagataatagaagcgagaatagaccagagccgtatgggcttcaacgccgacgtaaggagcaaaaaccaaaagaagatcggcgatgtgctgcgcaaagtcgagcctgacgatctaatatccttcggcctgataccggagatcataggccgtctgccggtagtgatgggcttggatcaattggacgaagactctctgctgcgtatcctgacggagccgaagaacgctctcgtcaaacagtaccaaaaactcttcgccatggagggtgtgacgctgacgttcgcgaaagatgcgctgaaggagacggtggataccgctgtgcgaaagaaaacaggagcgagaggattgcgcaacgtgctggagtcgtgcctgctgccggtgatgttcgaactgccgtctagggacgacgtggcggaggtgctggtgacgaaagagtctgttgttgacaaaacactgccggagtatgtgcttaaaggcggggaagacaagaagagtgcgtga

SEQ ID NO: 70720 - protein, 421 aa, Unknown
  Obtained from environmental sample
  DOMAIN (115)...(363): ATPase family associated with various cellular activities (AAA)
  misc_feature (1)..(421): Xaa is any amino acid
MDNTSRPRFPEIKCSFCGKGPEDGKALITGISAFICHDCVSLCNDMVREKTHGSGLEGIDIDKLPTPQEMKEFLDQYVIGQNEVKMAVCVAAYNHFKRLFSRGQGEDDVEIDKSNMLMIGPTGTGKTLIAQTLARFLKVPFTIVDATIFTEAGYVGDDVENMLVRLLQTANYDVPKAEKGIIYIDEFDKISRKSANPSITRDVSGEGVQQAMLKILEGTVAGVPPKGGRKHPEQSLIQINTRDILFICGGAFEGLDKIIEARIDQSRMGFNADVRSKNQKKIGDVLRKVEPDDLISFGLIPEIIGRLPVVMGLDQLDEDSLLRILTEPKNALVKQYQKLFAMEGVTLTFAKDALKETVDTAVRKKTGARGLRNVLESCLLPVMFELPSRDDVAEVLVTKESVVDKTLPEYVLKGGEDKKSA

SEQ ID NO: 70721 - DNA, 672 bp, Unknown
  Obtained from environmental sample
  misc_feature (1)..(672): n is a, c, g, or t
ttgcttcgctacgctcgcaatgacggtcattgcgaggagcgaagcgacgaagcaacccagaaaaaacaagaaaggcaaacaaccgcaatgtcgttagttcccatggtaatcgagcaaaccggccgcggcgagcggtcgtatgacatctactcgcgcctcctcaaggagcgcatcatcttcctcgggtcggacatagacgacacgaccgccgacctcgtcatggcgcagctgatcttcctcgaatacgaggacgccgacaaggacatcacgctctacataaactcgcccggcggcatcgtcagttcggggctcgccatctacgacaccatacaatatataaaacccgacgtctccacaatctgcataggccaagcggccagcatgggggcggtgctccttgccgccggtacaaaaggcaagcgttacgccctgccgcactcccgcatcatgctgcaccagccgatcggcggagcgggcggacaggccgcggatatcgccatccacgcaaaggagatcatacgcataaagcagacgctaaacgatatcctgtgccgccacacaggccaggatagagaagttatagccaaagacaccgacaggaatttttacatgtcggcggaagaggctaaggcctacgggctgatagacgaaatctttacgtcaagggagtaa

SEQ ID NO: 70722 - protein, 223 aa, Unknown
  Obtained from environmental sample
  DOMAIN (41)...(222): Clp protease
  misc_feature (1)..(223): Xaa is any amino acid
MLRYARNDGHCEERSDEATQKKQERQTTAMSLVPMVIEQTGRGERSYDIYSRLLKERIIFLGSDIDDTTADLVMAQLIFLEYEDADKDITLYINSPGGIVSSGLAIYDTIQYIKPDVSTICIGQAASMGAVLLAAGTKGKRYALPHSRIMLHQPIGGAGGQAADIAIHAKEIIRIKQTLNDILCRHTGQDREVIAKDTDRNFYMSAEEAKAYGLIDEIFTSRE

SEQ ID NO: 70723 - DNA, 1275 bp, Unknown
  Obtained from environmental sample
  misc_feature (1)..(1275): n is a, c, g, or t
ttgaatacgaccgtatcggagcctgaggtttggaagcgcgttgtggagattgagatacccgagtcggaggttgacgccgctgttgacgccaagcttgcggagattaggcgcggcgcgcggatgcccggattcaggcagggcaaggtgcccctcacggtagtcaagcaacgctacggaaaggcggcgcgggcggaggctgtcgaggacgttatgcagaacgccttcaagtccgcttgcgaggagcataagattacccccgtcagcgaggccaagctcacggacataaagggcggcgagggaggcgaggcgctgcgtttcaccattgagaccgaggttgacccgcccatcgcggagataaagggctacgacaagcagaaagtaaaggcgaagcccgtcaaggtgacggactccatggtagacgaggcgtttgccgagttctgcgaccggtacgccgagtttaacgatgtggagcgccccgccaagaagggcgactacatgcgcatcaggtacaagagcgtgtcgatagacggcgtcgagcgccccgacctgaaagaccacagtccggagcacccgattgagttgggcggagagggcgtctttaaagagttcgacaaggggcttgtcggaaaggcggcgggcgacgaagtggagatcggcgtcaagttccccaaggattacgccgacaccggcgtcgccggcaaggcgggcgagttctccgtcgaagtgctctccgtgcaagaaaagcacctgccggagataaacgaagagttcttgaaaaaaatcggcgactacccgaccgccgacgcgctaaaaaacgagttccgcaagagcatggagacgcgtgagctacgccaagccaaggagatcgcgcacgaagaggtgattgaggagctgataaaagaaaacccgatccaattggcgccgtccactgtcgaatcgctggccaaaaagatgatggacgattaccttgacaggcagggcggcgcgacggcggcggccggtctgagcgaggagcggcaggaaaaattctacggcctggcggcgatgatgctaaaacggatgaaaatcatcgactacgtggccgacaaagaaaaaatcaaagccacccaagaagaggttgataacgaaataatgctgatggcgcaagcgtacggccaagatttcgacgccctaaaacagaaatttcgcaaagacggcgtgacgaacagaatacgtatggacatacgcgagcgcaagacgttagacttcttgataggtgaaggcggtgcggagtga

SEQ ID NO: 70724 - protein, 424 aa, Unknown
  Obtained from environmental sample
  DOMAIN (154)...(243): FKBP-type peptidyl-prolyl cis-trans isomerase
  misc_feature (1)..(424): Xaa is any amino acid
MNTTVSEPEVWKRVVEIEIPESEVDAAVDAKLAEIRRGARMPGFRQGKVPLTVVKQRYGKAARAEAVEDVMQNAFKSACEEHKITPVSEAKLTDIKGGEGGEALRFTIETEVDPPIAEIKGYDKQKVKAKPVKVTDSMVDEAFAEFCDRYAEFNDVERPAKKGDYMRIRYKSVSIDGVERPDLKDHSPEHPIELGGEGVFKEFDKGLVGKAAGDEVEIGVKFPKDYADTGVAGKAGEFSVEVLSVQEKHLPEINEEFLKKIGDYPTADALKNEFRKSMETRELRQAKEIAHEEVIEELIKENPIQLAPSTVESLAKKMMDDYLDRQGGATAAAGLSEERQEKFYGLAAMMLKRMKIIDYVADKEKIKATQEEVDNEIMLMAQAYGQDFDALKQKFRKDGVTNRIRMDIRERKTLDFLIGEGGAE

SEQ ID NO: 70725 - DNA, 1002 bp, Unknown
  Obtained from environmental sample
  misc_feature (1)..(1002): n is a, c, g, or t
atggattctcaggtaaaatcatcgattgaacttttggtaaacaatatcaggaaactgatatctgtagacgcgaaaaaactcgaatacattattgcggcatggattgccggaggtcatgtaattcttgcggattcccacggagtgggaaaaacttctcttgcccgggcgttggctcagtctatccgctggaggcccgaggatatggcagcggtcgtcaataacggcgacgccggaagcagtgccgctaaaatggaagggttcagccgtatccagtgtacggtcgatcttcttccgcaggatatacttggctataaccgttttttgggacattcgggagaattgatcttcaacaaagggcctatctttgcgcattttgtgttatgtgacgaaatcaacctgcttaccccaaaaactcagggaagtttttttcaggttatggaagagcaaagcgttaccatagaagggaaattgtaccgtctgcatgatccgttttttatcatcgctacaatgaaccttaaaggcgtccacctttttcctctgcccgttccccagcttgaccgttttatgattcgcctctctcttggttatcccggtgaagaagatgaaaaggaaattatcaacaggcacggcagaattgacgcgtggaacagctttgacagcgttattgacagcgcggatttaatccgctggaagaaaatggttgacgaagtacagatgcattctgatgtaacttcgtaccttgttaaatgcgtaagactgacaagggtgcacccggacattgaaaccccggcaagtccgcgcgcgggagtgcgtatttcgcgccttgcccgttcgctcgctatgtgccgcggtatggattttgtttccgttgacataatcaaagaaatatttattcactctatggctcaccgtataatcacccgcgatccttccataccgccggaagcgcctcttacaaatattctaaattcggttcctgtagagccgaaacaggaacagtaa

SEQ ID NO: 70726 - protein, 333 aa, Unknown
  Obtained from environmental sample
  DOMAIN (39)...(243): ATPase family associated with various cellular activities (AAA)
  misc_feature (1)..(333): Xaa is any amino acid
MDSQVKSSIELLVNNIRKLISVDAKKLEYIIAAWIAGGHVILADSHGVGKTSLARALAQSIRWRPEDMAAVVNNGDAGSSAAKMEGFSRIQCTVDLLPQDILGYNRFLGHSGELIFNKGPIFAHFVLCDEINLLTPKTQGSFFQVMEEQSVTIEGKLYRLHDPFFIIATMNLKGVHLFPLPVPQLDRFMIRLSLGYPGEEDEKEIINRHGRIDAWNSFDSVIDSADLIRWKKMVDEVQMHSDVTSYLVKCVRLTRVHPDIETPASPRAGVRISRLARSLAMCRGMDFVSVDIIKEIFIHSMAHRIITRDPSIPPEAPLTNILNSVPVEPKQEQ

SEQ ID NO: 70727 - DNA, 2313 bp, Unknown
  Obtained from environmental sample
  misc_feature (1)..(2313): n is a, c, g, or t
atgaaaagatccccgcttgttttattctggctgcgcctctttttatacctaagcggccccgcgctgatactccttcatccgggcattgccgttaccttcgaccgtatcagttttactcagtggttcgtcataatccccgtgatggcttttctcgcatttatttcgcagtcgaaattttctttcagggacagatgccttacctcgggcgttattctgctccttcttgccgcgtggatgggctggcaaggcttcggcactttgcagcttcttctcgccggcgtgataagttttaccctcacttatttactttttaactacccgcgctgggccaaaccggcggctttagaaccgttttttgccgcgtgggtgtgcctgcatttgctttcgctttcccgttccggcgatgatgtcgcgtggcagagcggggctcttacccaatttatttttgtgtggactgcggttgtctttctgttatacagttttgtgatctacctttgcctctttccgaaaagtcagggcggcgcggttaaagaaggatcgctctttgccattgccgcggcaggtttattggtcttggttatgattatcctgcccgccgattttgtccgtaactccgtgatagataatctgctccccgaaaaaatacctgaaaaaataaaagaaggctccgagaaaggcttgccgcaggatgcggaaggaagacggaaggggcgcagaacaattccgcagagcggggaaaaacaagggcagggattgcgcggcgtttccgaatacagttggcagaacaagtcaagcaggggtaaaaaaggagacggaagcaagagcgataaccgccaatacatggtgatgatagtcgcggcggacagagaacccgtgtacatgggcgacgttttccggggacagcttgatcccgtagacggctttcttccaagccctcaggagcctttgaacagaattgcgaaacagcgcttgtttactacatggttcgataatgagccggaagttgataagagcagggaaaagcaggaagtttcttccatatcaactctgccgcagaagtatctgccgtaccgccctgtttcaatcgatcctgtgatattaagcgagaacacgggcccgcttcggtatattcatcaggttgtttcaaacactcatttaggcgatcctctggcgcttatcttccggtcttcccgctccttaagttcttttgaaaaaaatcttcttgcgccttacatggaaatttccctgtacgaaaaagatgccgaggctttcagaacatatttgagcacggcgcagaaaaaatggaaggaagaccgcgatgaaattttagccaaacttacaagacagaatgaaatacccaagccaagcaacgaacatctggaaacaatcttcgctttgctgacgggcttttcaacataccaatacaatttaagttataccgatgatcttaacgttgaaatgataaaagattttcttttaaataacgaggaaggcgattgtgttgaattttccaattcgctcgctttgctcggccggcttgcgggcattccgtcgcgtgttgttacaggctatcttgcggcggaggaactgcaaacgccggcgcaccttcgcggccttgcgaatctgcgaaccaggattccgtatttgcagcagtcccctcttaataatttatttttggtgaccaatcttcacgcccattcatggacgcagttctacattcccgaattcggctggctggacttcgaagcgaccatgttcgctatgccgccggaaggcgagggcgatttcagcacatgggacgttgtgattccgcttatcgacgaaaaaagagttttctcgcaaatcaaaaaatttccctggcttgcggtattacgcgccgccgcgttctttgcggtcttcgcgcttgtctgcgcgtatctcctgcgctacggccgcgagcttgccctgtatctcggcgcgcggcgcggcggcagggcgggagcgcgctctctgtacctcctgcttctcgcgcgccttgccgcggacggcaagcccgtaaaacccgcttcaaaaaccgctcttgagtacgcgcaattattcccgttcaaaaaaacgggcgccgattcggaggtgagcgaaaacccccaccttaaaaatttcgcttctctttacacggaaatacgctggcgcgattttaaggaaagcgcccaaatggacgagtgcttcatgaaattgaaacaggaatataaaaacatacttgaaaccacgaagcgcgggggaatacacggcccgctgttacgcgctatcagtctgagggggcttggttatttatga

SEQ ID NO: 70728 - protein, 770 aa, Unknown
  Obtained from environmental sample
  DOMAIN (495)...(584): Transglutaminase-like superfamily
  misc_feature (1)..(770): Xaa is any amino acid
MKRSPLVLFWLRLFLYLSGPALILLHPGIAVTFDRISFTQWFVIIPVMAFLAFISQSKFSFRDRCLTSGVILLLLAAWMGWQGFGTLQLLLAGVISFTLTYLLFNYPRWAKPAALEPFFAAWVCLHLLSLSRSGDDVAWQSGALTQFIFVWTAVVFLLYSFVIYLCLFPKSQGGAVKEGSLFAIAAAGLLVLVMIILPADFVRNSVIDNLLPEKIPEKIKEGSEKGLPQDAEGRRKGRRTIPQSGEKQGQGLRGVSEYSWQNKSSRGKKGDGSKSDNRQYMVMIVAADREPVYMGDVFRGQLDPVDGFLPSPQEPLNRIAKQRLFTTWFDNEPEVDKSREKQEVSSISTLPQKYLPYRPVSIDPVILSENTGPLRYIHQVVSNTHLGDPLALIFRSSRSLSSFEKNLLAPYMEISLYEKDAEAFRTYLSTAQKKWKEDRDEILAKLTRQNEIPKPSNEHLETIFALLTGFSTYQYNLSYTDDLNVEMIKDFLLNNEEGDCVEFSNSLALLGRLAGIPSRVVTGYLAAEELQTPAHLRGLANLRTRIPYLQQSPLNNLFLVTNLHAHSWTQFYIPEFGWLDFEATMFAMPPEGEGDFSTWDVVIPLIDEKRVFSQIKKFPWLAVLRAAAFFAVFALVCAYLLRYGRELALYLGARRGGRAGARSLYLLLLARLAADGKPVKPASKTALEYAQLFPFKKTGADSEVSENPHLKNFASLYTEIRWRDFKESAQMDECFMKLKQEYKNILETTKRGGIHGPLLRAISLRGLGYL

SEQ ID NO: 70729 - DNA, 1209 bp, Unknown
  Obtained from environmental sample
  misc_feature (1)..(1209): n is a, c, g, or t
atgagacaaaaattgtgccttctcgcgtgtcttgtcctgatttgcggctgttcgcgcagcggagactgggttcagttccggggcgagggcgggcgcggcgtaagttcttcccgtatcgctccgcccctgggtctgcgctggaaaataaaactccaggaaagcggcgaaaggctccgctctcttaatccgcctgtggtaatgggagacactatttatttcggttccgacgacggcaacttttacgcgctggatgtagaaagcggttatatgcgctgggtatttaaaagcggggcggagatcaactcaattccctacgccgacaaggacaaagtttactttggcagcaaggacggcaaactttacgcactttcccgcgagacgggagaagagatttggaattttcagactcaaagccagatcaattcccaggttcagcgttacggcgattatattatttttgtcggagacgcggacgcgatttattttctttctccggacggcaaagagcaattcagtcttgataatcccggctggtataactacaccttccttatggccgacgacgtaatgtacttcggcataggtccaagggttcatttaataggtccttatgacctaaacaaaagggaatttctttggtttctcaatttcgatgaaattagagctatttggtattcattttccgcggttaggggcgaccttctttattttggaacagttgatatttacgacaatatgtacttcagtttttacgcgtacaaccgcaataccggagaaaaggcgtgggaacagcaaagcgaaggaacttttagaaattgggattatgattcaatatacaaattgtttttaataaatgtggacaaactggattttatggctcctacggtttggaaggattatgtcatctttacgggaggagactgcacagcccgcgcttttgacgcaaaaacaggcgctttgcgctgggagcaggtttttgacagccccataagttcagcccctacagttgccgcggggcgtgtttatttcggcctgcatggatacgattttgccgtttcaaaactggtctgtatatccgcaaaggacggaaaaacgctctgggagatggaaaccgagggcaaccttctttccgcccccgttattgccggaaaaaggataatttttggcactgataagagtgttttttacgttttagaacaggttttttaa

SEQ ID NO: 70730 - protein, 402 aa, Unknown
  Obtained from environmental sample
  SIGNAL (1)...(20)
  DOMAIN (299)...(336): PQQ enzyme repeat
  misc_feature (1)..(402): Xaa is any amino acid
MRQKLCLLACLVLICGCSRSGDWVQFRGEGGRGVSSSRIAPPLGLRWKIKLQESGERLRSLNPPVVMGDTIYFGSDDGNFYALDVESGYMRWVFKSGAEINSIPYADKDKVYFGSKDGKLYALSRETGEEIWNFQTQSQINSQVQRYGDYIIFVGDADAIYFLSPDGKEQFSLDNPGWYNYTFLMADDVMYFGIGPRVHLIGPYDLNKREFLWFLNFDEIRAIWYSFSAVRGDLLYFGTVDIYDNMYFSFYAYNRNTGEKAWEQQSEGTFRNWDYDSIYKLFLINVDKLDFMAPTVWKDYVIFTGGDCTARAFDAKTGALRWEQVFDSPISSAPTVAAGRVYFGLHGYDFAVSKLVCISAKDGKTLWEMETEGNLLSAPVIAGKRIIFGTDKSVFYVLEQVF

SEQ ID NO: 70731 - DNA, 495 bp, Unknown
  Obtained from environmental sample
  misc_feature (1)..(495): n is a, c, g, or t
atgcccgaacggtcacgaagatttaattttaccaaaccctatatcgacagttccatgactattgttaccgaaaaaaattcttccgtaaaagttgaaaaacccgaagatatcgaagggtacagggcggcttaccaaggcgacactacggcgcagtattttgctgaaaggttaaagaagaacggtatctcatttacatcgttctcctacgataaaataacaaattgctttgatgatcttgcccttgggcgcgtcgatttaattatcgcagacaacattgccgcctgcgattacgcgggaaaagaaaatagtccctttgaaattgtatggcagggggcgtcgggcgaattaatcgggatttgtttaaagaagggaaacgacgctttaaccgccgcgattgacaacgcgctggacgaattgtttaaggacggcgtaatgcgggaaatatcccttaaaatatttaaccgcgatttggtttcgccgacgagagatttctga

SEQ ID NO: 70732 - protein, 164 aa, Unknown
  Obtained from environmental sample
  DOMAIN (1)...(155): Bacterial extracellular solute-binding proteins, family 3
  misc_feature (1)..(164): Xaa is any amino acid
MPERSRRFNFTKPYIDSSMTIVTEKNSSVKVEKPEDIEGYRAAYQGDTTAQYFAERLKKNGISFTSFSYDKITNCFDDLALGRVDLIIADNIAACDYAGKENSPFEIVWQGASGELIGICLKKGNDALTAAIDNALDELFKDGVMREISLKIFNRDLVSPTRDF

SEQ ID NO: 70733 - DNA, 750 bp, Unknown
  Obtained from environmental sample
  misc_feature (1)..(750): n is a, c, g, or t
atggaagaaattaaagaattatatacgctgattaaaaaagccaaacaccttgtcgcgcttacgggcgctggtgtaagcacgctttcgggtatccgcgactttcgcggcaagaacggtctttacaacgatatggacgctgaaaaaatttttgacatcaattatttcgaacaagacccgtcgttttattacaaaatgtccggtgatttcatttacaatcttgatgagaaagaagcgtccatagtccacattgtgcttggagaacttgaacagcgaggttacctaaaagcgttgattactcaaaacatcgatcttcttcatcaaaagggcgggagcaaaaatgtgatagagattcacggctcgccttcaatgcattactgtatgcggtgttcgggcgtaagagtgagttatgaggaagttgcggctattgtccgcaagggagaaatgcctaagtgcccgaagtgcggcagggtattaaaaccggctatcacttttttcggcgaagggcttccggcggacgcgttaaggcaggcggtgacggaatcgcaaaaagcggacttaatgcttgtgcttgggacaagtctgactgtcttccctgccgcgggtatgcccgattatactctgcgtaacggcggtaaggttgttatcgttaacaatatgcctacgcctctggacggcagggcattactccattttgacgatcttggttctgtctttgaggaattgcaaaattgtttacattcagaaagttaa

SEQ ID NO: 70734 - protein, 249 aa, Unknown
  Obtained from environmental sample
  DOMAIN (22)...(198): Sir2 family
  misc_feature (1)..(249): Xaa is any amino acid
MEEIKELYTLIKKAKHLVALTGAGVSTLSGIRDFRGKNGLYNDMDAEKIFDINYFEQDPSFYYKMSGDFIYNLDEKEASIVHIVLGELEQRGYLKALITQNIDLLHQKGGSKNVIEIHGSPSMHYCMRCSGVRVSYEEVAAIVRKGEMPKCPKCGRVLKPAITFFGEGLPADALRQAVTESQKADLMLVLGTSLTVFPAAGMPDYTLRNGGKVVIVNNMPTPLDGRALLHFDDLGSVFEELQNCLHSES

SEQ ID NO: 70735 - DNA, 1485 bp, Unknown
  Obtained from environmental sample
  misc_feature (1)..(1485): n is a, c, g, or t
atgagtatacgagacagatacgcgccttcccctacggggcttcaacatataggcggaataagaacagcgcttttttattacctctttgcccgttcgggcggcggaaaatttatcctgcgcctagaggataccgacagaacccgctacgacgaaagctttgtgaaaaatctttacgatacctttgactggctgggaataaaatgggacgagggtcccgatgtcggcggacaattcagtccctatgtgcagtccgagcgcaccgctcactataaaaaatacgcgcaggagcttcttgataaagggcaggcgtactattgcttttgctcttcggaaagaattgaaaaagtacggcaggaaagagaagccgcccactcctcggaaagcggttacgaccgcctttgccgtaagattgattctgcggaagccgcaaagagagccgccgcgggcgaaccctgtactgtcagattaaaaatcccgcttggcgagacgacacgcttccatgatcatctgttaggtgacattgaatggaagaacgatgacattaaccccgatcccgtcctgttaaaatcggacggcttcccgacttaccaccttgcgaatgtggtagacgatcatttaatggaagtgactcacgttcttcgcgcgcaagaatggcttgcgtccacgcctctgcatgtgataatgtaccgcgcctttggctggacgccgccagagttctgccaccttccgatggttatgggacaggacggcaaaaaactttccaaacgccacggcgcgacaagcattgatgaattccgtaagcagggctatcttcccgccgcgctgataaattacatcgctctgttgggcgcttcctacgaagaaggcaaagagatttacacccccgaagaacttgcgcagcgtttcagtcttgaaaaactaaataaagcgcccgctgtttttgattacaaaaaacttgagtggtacaacgggcagtacatcagaatgatgaacgatgaggagcttgcctctctctgccttccgtttgcgatagaggcgggcttgttcggaggcgcaaagaacgaaccgtcaacacagcagagggaaatttttaccgccgcaatgccgcttgtaaaagaacggcttgtcttccttaacgaagtccctgaaaaaatagcctacctgtttagcgaacccgaagtccccgcgcctgaagaatttatccccaaaaagagcgaccttgccaagacgattgagattttacaaataggcaaggaacttgtgcgcgaattggcgggtgcgccgagcgacgaacaggcggaggagtttataaaagcggaagcggaaaagagggaaataaaactcggcgaccttatgatgcccctgcgcgtcgcaattacaggcagtcgagtaagcccgccgctttttggatcgcttcgcatacttggagcggaaaaatccgcggagcgagtgcaaagagcgttggataaattaaaccgaacttaa

SEQ ID NO: 70736 - protein, 494 aa, Unknown
  Obtained from environmental sample
  DOMAIN (2)...(321): tRNA synthetases class I (E and Q), catalytic domain
  misc_feature (1)..(494): Xaa is any amino acid
MSIRDRYAPSPTGLQHIGGIRTALFYYLFARSGGGKFILRLEDTDRTRYDESFVKNLYDTFDWLGIKWDEGPDVGGQFSPYVQSERTAHYKKYAQELLDKGQAYYCFCSSERIEKVRQEREAAHSSESGYDRLCRKIDSAEAAKRAAAGEPCTVRLKIPLGETTRFHDHLLGDIEWKNDDINPDPVLLKSDGFPTYHLANVVDDHLMEVTHVLRAQEWLASTPLHVIMYRAFGWTPPEFCHLPMVMGQDGKKLSKRHGATSIDEFRKQGYLPAALINYIALLGASYEEGKEIYTPEELAQRFSLEKLNKAPAVFDYKKLEWYNGQYIRMMNDEELASLCLPFAIEAGLFGGAKNEPSTQQREIFTAAMPLVKERLVFLNEVPEKIAYLFSEPEVPAPEEFIPKKSDLAKTIEILQIGKELVRELAGAPSDEQAEEFIKAEAEKREIKLGDLMMPLRVAITGSRVSPPLFGSLRILGAEKSAERVQRALDKLNRT

SEQ ID NO: 70737 - DNA, 453 bp, Unknown
  Obtained from environmental sample
  misc_feature (1)..(453): n is a, c, g, or t
ttggataatgctattattcaaaagatacaatttgaaattgaacaaatagatgaacttatagacgcatcaagtccattatttgatttatgtaaaattagagaacctgattttgttgagagatgcggaatagcattaattcttcaatcattttacaatggtattgaaaaaatgatgttattaatagttaaaaataaagacaagaaattacctaatgggattaaatggcataaagaattatttgacaatacattcaaggcaaataaaaacagaactcatatattcagagaagaattatatgagcaactaaatgattatttgcaatttaggcattttgtaagacatgcatacggctttaaattaaaatgggagaaaatgaaaagtatattatttgatatgaagcctttatgggaaaagataaaagaagatataaatgtatttttaaaaagtaactaa

SEQ ID NO: 70738 - protein, 150 aa, Unknown
  Obtained from environmental sample
  misc_feature (1)..(150): Xaa is any amino acid
MDNAIIQKIQFEIEQIDELIDASSPLFDLCKIREPDFVERCGIALILQSFYNGIEKMMLLIVKNKDKKLPNGIKWHKELFDNTFKANKNRTHIFREELYEQLNDYLQFRHFVRHAYGFKLKWEKMKSILFDMKPLWEKIKEDINVFLKSN

SEQ ID NO: 70739 - DNA, 1713 bp, Unknown
  Obtained from environmental sample
  misc_feature (1)..(1713): n is a, c, g, or t
ttgcaggcaagaagcggcgcggcggcgattaaaaatgaacttgacgcgataatactcagcgccgctcaaatggacaattcgcttaaaaattattatacgaccaagtatttaaccgaaacggttaacgcaattgataaaatttattccgcttcggccgctttggaacgtcaggcggcatactattattatttcgttgtagacgcagagcttaaacgcggaataaccgcaagaacggcggaactggaaaaagggagaaattatcttaacggtcaaaaacgaacaagagccgacggttccacggtaacagatttgtttccatcggaggcgttggaaacgcttaccgcaatgctcgcttctttatctgttgatttggatcgcgggaattccgcgattgcctattacagggatgaaacaaggctggttttaaccgatgaacaaatcactgaaataaagaaaagctgtgaaaaaagcatagccgaactgaacacgctccgcaatcagggcgttacgcttagaactaccgcaaactcaagaacaacccaggccgaagccttcaggcaggaaggggaaaggcttttaagggaatcgcaaaccgcctaccgctctcagaactttgacaccgcgagggacaggcttcaaagggcgtcggatcgttttaacagttcgcttgaggtgcagcagtccgcgtcccttcgccagtcatgggatacccagcttttcaatttagggcaggcgatcaacgcgtccgaaaacgaagcgataatcgcggaagtgcgaaatcttgtaaaccgcgcccgcgcctcttactttgagggaaattttcaacaggcggaagacggccttatcagggcaagaagcagatggcgcataacaaacgcggatgaaaacgaggaaattctttactggctgggcattgtcagaggagcgatgtcggcgcgttcgggcagggtaattcccgttaccgcgcctttgtacccggagatgagccagcttttaagcaaggccagaatgaattatgaggaaggggtgcggttaataaatgcgggcaaccgcataaacgggcttgcgaaatttgacgaagcgcgccggcagacaagggaagtaaggcttatattcccatttaatcaggacgcgggaattctggaactcaggatggaacagtatacggatcccgcggcgtttaacgcttcttttgaacagcgccttagaaccgcgatagcgggaacaaagcgccgttccattgagtctttcgcggaattgcaaaacctagctgaaattaactcaagatatcccgggataaaaggcatcattacgcaggcggaaattgacatgggctaccgtccgcctccgcccgatcctcaggctttggcgcgttcaagggaattatccgcttcggcaaaccgtattctgacggagaataacacaacgctttttgaagtcgccctgacacaggttaacgaggcaatctccctgaatccggaaaacgccgaagcgatgcgcgtaaaagaccgcctcttaaacaggatgagcgttccgggagctatcgttctttccaacgaggacgaacttgaatatcaaagggctgttaaggaattacaggcaggcaataaccttgtcgccttcgcggttgtggaaaggcttatgcagaatcccagaaaccgcaatatcacaaagctgattgaattacagcgaaggatacagtcggttttatga

SEQ ID NO: 70740 - protein, 570 aa, Unknown
  Obtained from environmental sample
  misc_feature (1)..(570): Xaa is any amino acid
MQARSGAAAIKNELDAIILSAAQMDNSLKNYYTTKYLTETVNAIDKIYSASAALERQAAYYYYFVVDAELKRGITARTAELEKGRNYLNGQKRTRADGSTVTDLFPSEALETLTAMLASLSVDLDRGNSAIAYYRDETRLVLTDEQITEIKKSCEKSIAELNTLRNQGVTLRTTANSRTTQAEAFRQEGERLLRESQTAYRSQNFDTARDRLQRASDRFNSSLEVQQSASLRQSWDTQLFNLGQAINASENEAIIAEVRNLVNRARASYFEGNFQQAEDGLIRARSRWRITNADENEEILYWLGIVRGAMSARSGRVIPVTAPLYPEMSQLLSKARMNYEEGVRLINAGNRINGLAKFDEARRQTREVRLIFPFNQDAGILELRMEQYTDPAAFNASFEQRLRTAIAGTKRRSIESFAELQNLAEINSRYPGIKGIITQAEIDMGYRPPPPDPQALARSRELSASANRILTENNTTLFEVALTQVNEAISLNPENAEAMRVKDRLLNRMSVPGAIVLSNEDELEYQRAVKELQAGNNLVAFAVVERLMQNPRNRNITKLIELQRRIQSVL

SEQ ID NO: 70741 - DNA, 2328 bp, Unknown
  Obtained from environmental sample
  misc_feature (1)..(2328): n is a, c, g, or t
atgatatgcaagtttttcaaactgtttttattttctcttttcttaagtttgtcgctgtcttcccttccggcattggattttttctgggaagaaccggcgcgttttacaaaccgtcccggagatttcccggtaagcgcttcgtctgaaaacatctcaggggataatttttccgtacttgcatggcaggaatcttcagctaacagaaatcagattaacgtatatctggcggttaaactgcagggcgaagaatggaaagagagggggatgatcgcaggtccctacgcatattcgggaactgaaccgtccatcttaagccttgtaattgacaaaaagaacaggatcttaatcgcaatcgccgcgtcaggatcgaggacggaaatacttatttccgaggacaggggacaaactttctcgcgtcaggcaataaacacggaagcggaaggttccgtcgctccgcgtatctttgtccgcgcggacggaggctactttctttttgttacaagggggcttactcagtctatcgcgattcattatgcccgttccaacgacggaataagctggtcgccttttgaggtattcgcgcctgaaaacaaccttgcgctcaactttcttcccgcacacgcaagttacggaagcagggacattgttttctttcaatcccttgtcaccgatattgaaacttcgtcatcattccagctttactttaagaccagcgacaacggaggacagacatggacgccggcaaaacgttttacaacatttaacgaccccgtaactcagacgcagacaagtccgaattattttgacaaccagcgcccgcacctttcaagatacggaagcaatttcctgcttgtttgggagcggcactactctacccaaaatccgcaaatttacagcgcgactattgatcaaagcgggaacattataggccgcgtggaacgggtaaataccgaagaggcgtattgcaacaatcctatcggtttaacttacaaggataatcctttggtgatttggtttgacaaccgccgcggtaacaacaggatcattatggcgcaaaaggataatataggctggcaaaaccaactgctttccagcgccgccgccgaatcatcgttcgcgaggccagcagccgaccgcgacggcttgtttattttttggcagagcacaacgcggggtacgcccggaatcgtcctgctcgcgccggatcattcggtaaacagcccgcgcgtaacccctgtaaatttttctccttccgtgcccaaccgttcggaaaaagcgcgtgtcgcatggaacatcccctttgacacttcgggtattcttggtttttcatgggtctggtcgcagagcccgtccgcaataccgaccaatcaaattttaatttataacacaggcaatgcccaaaacctgaatttggaacttaacgcggacatggacggcacatggtacttcagcgtatccgcgcaggattacgcgggaaactggtcggagccggcgggaatcagttacgaaagaaaaacccggccgcctcccgcactgacaataattcaaccggagacggacggcgacggctatcttctttcaaatacttttaaattaacgtggcagccgtccgaggatccgtatgcgtccggttatacgtggaatcttcaattaattggaaacgcgcaggacgctgtaagcgctcccccttccagaatcatgggaacgctcccctcggtaagttacacgaacagcgatgacggtttatacgcgtttacggtttccgcgatcgacagcgccggcaacataggtccgcagtcaaacattttttttaagacaaacaaatttatcccttctaccagcgtaagttttgtagacgcgaaacaggacgtgcagggaaacctctcgataaaaataatagggcgcggcttttctaccggcggacatataacttcggttgtgctggaaaacagcgccggcatgaacattcccggcgtattctcggttttatcggacagggaaataggcgggataaactttgagaatttggaagaaggccgttatgcgctaaaactgcttcattcagagaggggctggtataccgcgccttccggcatctcggtatcaagaagcgtaacagtaaaaatcggagattattcacagagttggaatccttcatggaaaataggaacaaataaaataacgcttaaccccgccgtgattcttgcagcggtacttgtcattttctgcgtactcggagcaatcgccgcgatacgggggatcgcgggcgtcgccgcngaaaaacgccgtgataaagcaggaagcgtttgccataatacaggagaataa

SEQ ID NO: 70742 - protein, 775 aa, Unknown
  Obtained from environmental sample
  SIGNAL (1)...(24)
  misc_feature (1)..(775): Xaa is any amino acid
MICKFFKLFLFSLFLSLSLSSLPALDFFWEEPARFTNRPGDFPVSASSENISGDNFSVLAWQESSANRNQINVYLAVKLQGEEWKERGMIAGPYAYSGTEPSILSLVIDKKNRILIAIAASGSRTEILISEDRGQTFSRQAINTEAEGSVAPRIFVRADGGYFLFVTRGLTQSIAIHYARSNDGISWSPFEVFAPENNLALNFLPAHASYGSRDIVFFQSLVTDIETSSSFQLYFKTSDNGGQTWTPAKRFTTFNDPVTQTQTSPNYFDNQRPHLSRYGSNFLLVWERHYSTQNPQIYSATIDQSGNIIGRVERVNTEEAYCNNPIGLTYKDNPLVIWFDNRRGNNRIIMAQKDNIGWQNQLLSSAAAESSFARPAADRDGLFIFWQSTTRGTPGIVLLAPDHSVNSPRVTPVNFSPSVPNRSEKARVAWNIPFDTSGILGFSWVWSQSPSAIPTNQILIYNTGNAQNLNLELNADMDGTWYFSVSAQDYAGNWSEPAGISYERKTRPPPALTIIQPETDGDGYLLSNTFKLTWQPSEDPYASGYTWNLQLIGNAQDAVSAPPSRIMGTLPSVSYTNSDDGLYAFTVSAIDSAGNIGPQSNIFFKTNKFIPSTSVSFVDAKQDVQGNLSIKIIGRGFSTGGHITSVVLENSAGMNIPGVFSVLSDREIGGINFENLEEGRYALKLLHSERGWYTAPSGISVSRSVTVKIGDYSQSWNPSWKIGTNKITLNPAVILAAVLVIFCVLGAIAAIRGIAGVAAEKRRDKAGSVCHNTGE

SEQ ID NO: 70743 - DNA, 333 bp, Unknown
  Obtained from environmental sample
  misc_feature (1)..(333): n is a, c, g, or t
ttgtctgtttctgcgtcncgattantcagaatatgtaacgggacaaataataggcgtggacggcgcttcaataatataaagaacaggagaaatacaatgacaaatctggaaaagtacgaaaaagcgtttattgacactttcggaatgagcaaagacagactggctgatctaaaataccaggaaattccgcaatgggacagtgtggggcacatgtcgctcattgctgctcttgaagaagattttgatattatgtttgatacagacgatatcatcggcttaagcagttttgaaaaaggcaaggaaataataaaaaagtataatgtggaactttag

SEQ ID NO: 70744 - protein, 110 aa, Unknown
  Obtained from environmental sample
  misc_feature (1)..(110): Xaa is any amino acid
MSVSASRLXRICNGTNNRRGRRFNNIKNRRNTMTNLEKYEKAFIDTFGMSKDRLADLKYQEIPQWDSVGHMSLIAALEEDFDIMFDTDDIIGLSSFEKGKEIIKKYNVEL

SEQ ID NO: 70745 - DNA, 735 bp, Unknown
  Obtained from environmental sample
  misc_feature (1)..(735): n is a, c, g, or t
gtgttaacaggaaagattgtccttgtgacaggaacttcacgggggataggcagacaaatcgctcttgcttttgctgaaaatggcgctacagtttatgcaaacgccagaaaagaaggttctcttgacagtttaattaaagaaaaaaaattaactggaaaaatcatacctgtatactttgacgttaccgacacggatgcttcaaaaaacgctgttatgagaataaaaaaagagagcggaaaatttgattgtctggtgaataacgccggcattatgcaagatgcgcttatcggaatgatagaaaagaaaaccatacacgatgtgtttgaaacaaatgtattcgctgtaatggaattaacgcaattagccgcgcgaattatgacaagacaaaaaagcggttctattatcaatctggctagtatagttggtgtgaatgggaacaaaggtcagcttgtttattctgcgtcaaaaggcgcagttatcgccatgacaaaaacagcggcgaaagaactggctccgcagaatatcagggtaaacgctgttgcgccgggaatgatagatacagagatgtttcattctatcggaaatgaaaaaataactgaaaggcttaataatatcggcatgggaagacttggaacgcctgaagatgtcgcaaaggtttgtctgtttctgcgtcncgattantcagaatatgtaacgggacaaataataggcgtggacggcgcttcaataatataa

SEQ ID NO: 70746 - protein, 244 aa, Unknown
  Obtained from environmental sample
  DOMAIN (7)...(239): NAD dependent epimerase/dehydratase family
  misc_feature (1)..(244): Xaa is any amino acid
MLTGKIVLVTGTSRGIGRQIALAFAENGATVYANARKEGSLDSLIKEKKLTGKIIPVYFDVTDTDASKNAVMRIKKESGKFDCLVNNAGIMQDALIGMIEKKTIHDVFETNVFAVMELTQLAARIMTRQKSGSIINLASIVGVNGNKGQLVYSASKGAVIAMTKTAAKELAPQNIRVNAVAPGMIDTEMFHSIGNEKITERLNNIGMGRLGTPEDVAKVCLFLRXDXSEYVTGQIIGVDGASII

SEQ ID NO: 70747 - DNA, 525 bp, Unknown
  Obtained from environmental sample
  misc_feature (1)..(525): n is a, c, g, or t
atgagtgatgaaatgaataataatttttacaataaaataagaactctcatatttagtttaattaataaaaaaaagaaagaatttaatcgttatctgtctttacctgattattttatagatcgttgggaaaaagcaaaactaatgggatttggcgatggttcttccgtttatgattcctgtattgtgatgggagatgtttcggtgggaaaaaacacatggattggaccatatgctatattggatggttctggcggtggattgataataggtgataactgtaatatctgtgccggtgtgcatatatatacgcatagtacggttaatcgtgtaattaataatactgtaattgaaaaagcgcctgttacaatagggaataatgtttatattggaccaaatgtagttattgcaatgagatgccatattggcaatcgtgtagttataggagcaattagttttgtaaataaggatataccggataatacaaaggcatttggaacaccagcgaggataattgaaaagatctaa

SEQ ID NO: 70748 - protein, 174 aa, Unknown
  Obtained from environmental sample
  misc_feature (1)..(174): Xaa is any amino acid
MSDEMNNNFYNKIRTLIFSLINKKKKEFNRYLSLPDYFIDRWEKAKLMGFGDGSSVYDSCIVMGDVSVGKNTWIGPYAILDGSGGGLIIGDNCNICAGVHIYTHSTVNRVINNTVIEKAPVTIGNNVYIGPNVVIAMRCHIGNRVVIGAISFVNKDIPDNTKAFGTPARIIEKI

SEQ ID NO: 70749 - DNA, 498 bp, Unknown
  Obtained from environmental sample
  misc_feature (1)..(498): n is a, c, g, or t
atgagcgataaaacatattttgtacacgaatccagttatgtagacgagggcgcagaaattggtgaaggcacaaaaatatggcatttctgccatataatgcccggcgcgaaaatcggtaaaaaatgttccattgggcagaatgtgaatgtaggttcccgcgcaattatcggtaatggggttaaaattcaaaacaatgtttccgtgtatgatgatgtaattattgaagatgatgttttttgcggtccttcttgtgtgtttaccaacgtaataaacccgcgcgcctttgttgaaagaaagcatgaatataaaaagaccgtagtaaagaaaggagcgagtattggggctaatgcgacaattgtttgcggcgttaccataggggagtatgcgctaataggcgctggcagtgtggtaacacgggatattcccgcttacgcgcttgcgtatgggaatcctgcgcgtgtgcgtgggaaagtggatgagaatggggagaaggtatga

SEQ ID NO: 70750 - protein, 165 aa, Unknown
  Obtained from environmental sample
  misc_feature (1)..(165): Xaa is any amino acid
MSDKTYFVHESSYVDEGAEIGEGTKIWHFCHIMPGAKIGKKCSIGQNVNVGSRAIIGNGVKIQNNVSVYDDVIIEDDVFCGPSCVFTNVINPRAFVERKHEYKKTVVKKGASIGANATIVCGVTIGEYALIGAGSVVTRDIPAYALAYGNPARVRGKVDENGEKV

SEQ ID NO: 70751 - DNA, 1119 bp, Unknown
  Obtained from environmental sample
  misc_feature (1)..(1119): n is a, c, g, or t
atgaaagtaccgttttacgacgctgtaagagaatataataattataaaaatgaatttgataaagcaatcgccgatgtcatcgcttccggcgcttttattcttggaaaacaggtacaggaatttgaagaggttgtttgcaaatacacaggcgtgaaatacgccgttggcgtagccaatgggagcgacgcgctgttaattgcttccgatatcttaaattacaaaaatgacacggaagtattaactcctgtttttacattctttgcttcagcttcctgtatagcgcgtttaaatggtaaacctgtattttgtgatgtggatgaagatactctttgtatgaacatgaatgacgccgaaaaccgtataaccggaaaaacaaaaggaatattgccggttcatctttttttacagaccgcggacatgacagcctgcatggagcttgcaaacaaacacaacctgacggtactggaagacgcggcggaagcctttggtatgaggacaatgtataatggcgaatacaagcatgcgggattaataggtgatcttggtgttttttcattttttcctacgaaaactctcggcgggtacggcgacggcggaatgattgttactaataatgaagagttgtttcaaaaagcgaaaagctatagggcgcatggttcttcaaaaaaataccaccatgactatatcggttataattcacggctagacactttacaagcggcaattctgaatgtcaaattgtcccgcattgataacgcgattcaaaaacgggcggatcacgccgcacattatcgcgatatgcttaaaaacgtttccgaggttaaacttcctgttgttaaagatggcaacaaagaagttaattatgtgttttgtataaaagcagagaaccgtgacgctcttgaaaaatatttacaatcaaaagaaataggaacttcaatttattatccggttccgcttcatttgcaaaaatgctttggatatttaggttacaaaaaaggcgattttccagtagcggaaaaattatgtgaaactgtacttgcgcttccaatgtttcctgagttgacagaggacgaagttagttttgtttgtgagagcataaaagagttttataagaaatga

SEQ ID NO: 70752 - protein, 372 aa, Unknown
  Obtained from environmental sample
  DOMAIN (13)...(367): DegT/DnrJ/EryC1/StrS aminotransferase family
  misc_feature (1)..(372): Xaa is any amino acid
MKVPFYDAVREYNNYKNEFDKAIADVIASGAFILGKQVQEFEEVVCKYTGVKYAVGVANGSDALLIASDILNYKNDTEVLTPVFTFFASASCIARLNGKPVFCDVDEDTLCMNMNDAENRITGKTKGILPVHLFLQTADMTACMELANKHNLTVLEDAAEAFGMRTMYNGEYKHAGLIGDLGVFSFFPTKTLGGYGDGGMIVTNNEELFQKAKSYRAHGSSKKYHHDYIGYNSRLDTLQAAILNVKLSRIDNAIQKRADHAAHYRDMLKNVSEVKLPVVKDGNKEVNYVFCIKAENRDALEKYLQSKEIGTSIYYPVPLHLQKCFGYLGYKKGDFPVAEKLCETVLALPMFPELTEDEVSFVCESIKEFYKK

SEQ ID NO: 70753 - DNA, 1098 bp, Unknown
  Obtained from environmental sample
  misc_feature (1)..(1098): n is a, c, g, or t
atgtttaatatagcattaataggctgtggtagaataagttttaagcatatagaaggttttattgataatgccgatagattaaatctgacatcggtatgcgatcctgtaaagaaaagagcggaagaaaaggtaagcgagtatcaaaaaaaatttcctgatgcaaaaatcgctgtttatgaagattatcgggaaatgttagccaaacaaaaaccggatatagttaccattgcggcggaatcgggaaaacacattgaaattgcgataacctgtcttgaatcgggatgccatgttatctgcgaaaaaccgatggctctgtctgttaaagacgctgataaaatgattactgcggcaaaagaaaataaacgtaaacttgccgtttgttttcagaacaggtttaacgcgcctgtacaaagaatgcgaaccgctcttgaaacagggcgttttggtaaaatattacatggaatgattcaaatacgctggaaccgtaatgaagcctattatgcggaagccccctggcgcggaacatgggaacaggacggcggaacgctgatgaaccaatgtacccacggcattgatcttttacaatggatgatgggcgagaacgcggtgcgggtacaagcgcagacaaggcgttttatgcgccctatcgaagcggaagatttcggcgccgctattgtagagtttaaaagcggcgcagttggtattattgaaggtactgcggacattttcccgacgaacctgaacgaaacactttcaatttttggagaaaagggcacggcagtaataggcgggttagccgttaataaattggaaacatggcgttttgccgacactgattctgtaggggataccgaggataaagtattaaatcccaacgaaaaagatcctcccacagtatatggttttggtcattctgcgttgtttaaagactttgttgattcaatagaattagatcacgagccattaatatccggggaaaaggggaaaaaagcgctggagataatccttgcaatatataaatcccaaaaaactggaaaacctgtcgatttaccctgtgatttttctactcttgatatgaaaggaacatttgacaaatga

SEQ ID NO: 70754 - protein, 365 aa, Unknown
  Obtained from environmental sample
  DOMAIN (140)...(254): Oxidoreductase family, C-terminal alpha/beta domain
  misc_feature (1)..(365): Xaa is any amino acid
MFNIALIGCGRISFKHIEGFIDNADRLNLTSVCDPVKKRAEEKVSEYQKKFPDAKIAVYEDYREMLAKQKPDIVTIAAESGKHIEIAITCLESGCHVICEKPMALSVKDADKMITAAKENKRKLAVCFQNRFNAPVQRMRTALETGRFGKILHGMIQIRWNRNEAYYAEAPWRGTWEQDGGTLMNQCTHGIDLLQWMMGENAVRVQAQTRRFMRPIEAEDFGAAIVEFKSGAVGIIEGTADIFPTNLNETLSIFGEKGTAVIGGLAVNKLETWRFADTDSVGDTEDKVLNPNEKDPPTVYGFGHSALFKDFVDSIELDHEPLISGEKGKKALEIILAIYKSQKTGKPVDLPCDFSTLDMKGTFDK

SEQ ID NO: 70755 - DNA, 741 bp, Unknown
  Obtained from environmental sample
  misc_feature (1)..(741): n is a, c, g, or t
ttgtgcggattcttatgtacacatgcaggagtaaacgaaataaagaaaatcgcagaagattcagattacataataaattgtataggtataataaaaccttatatacatgatgataatccggcggaagtggaacgtgctatagaagttaacgcgctgtttccgcataaactttccaaatgcgggataaaaacaatccagatcgctaccgattgcgtttatgacggagttaaaggcaattatatagaaacagataaacataacgcgcttgatgtatacggaaaaacaaaaagcctcggcgaagtatcgtctgaaaactttttaaatcttcgttgttcaattatcggaccggaaaaaaagaataaaaaatctctattggagtggtttttaaatcaaccggtaaacgccgaagttaacggatttaaaaaccatcaatggaacggaataaccacttatgccttcgctgaaatatgtaaaggaattattgagaatgatctatggttttccggcatacagcatattatcccatccaatgccttaaataaggctgatatgttaaaaatatttgcggatgttttttccagaaaagatataaaaataaaagatataaacgcggaagaaagtataaacaggacaattaatacgcttaatactcaaaaaaataaacagctttgggaagcggctgggtacgataaaattccatcgttggaagaattaatagccgaagttaaaaacaaattttaa

SEQ ID NO: 70756 - protein, 246 aa, Unknown
  Obtained from environmental sample
  DOMAIN (13)...(244): RmlD substrate binding domain
  misc_feature (1)..(246): Xaa is any amino acid
MCGFLCTHAGVNEIKKIAEDSDYIINCIGIIKPYIHDDNPAEVERAIEVNALFPHKLSKCGIKTIQIATDCVYDGVKGNYIETDKHNALDVYGKTKSLGEVSSENFLNLRCSIIGPEKKNKKSLLEWFLNQPVNAEVNGFKNHQWNGITTYAFAEICKGIIENDLWFSGIQHIIPSNALNKADMLKIFADVFSRKDIKIKDINAEESINRTINTLNTQKNKQLWEAAGYDKIPSLEELIAEVKNKF

SEQ ID NO: 70757 - DNA, 765 bp, Unknown
  Obtained from environmental sample
  misc_feature (1)..(765): n is a, c, g, or t
gtggtgcattatgttgatccgcaaagccgtgatattgatatcgcggaagtaaggggcgcgctggcgggtcttacacagggattttccgtacagaatatcggctctccgcaggaacgtcattttatgatccgtgtagaagacaaagatgacggacgcatccgctcagatcaggtaacgggacttttggaaaatcatttcggaaaaggcgaagtggcgacgctccgttccgattatgtaggctcgcgtttctcaaaggatttaacggatcaagccggtattcttttgggccttaccctgttgttgattttaatatacgcgacaatcagatttaagccgcaatacgccgtaggcgcggtgctcgcgattatccatgacactattgtaattgtggcgtttgtcgtctggtcgcgcatggaatttaccaccagcactatcgcggcgattcttacgataataggttattcaattaataacacaatagttatttttgaccgtatcagggaaaacaacagaatctatccggattccccctttgttgacgtattgaacatttcattaaccggcgttctcggccgttcaataatcacgacatttacaaccatgctggcagtattggccctgtttatctttaccactggttcgatgaaagatttcgcgcttgcgcttcttgtcggtttggtatccggcgtttatacctcgctttatgtcgctacgggttttgtgtatttttgggaatacctgaaaaacaaacgtaaaaaagcgtaa

SEQ ID NO: 70758 - protein, 254 aa, Unknown
  Obtained from environmental sample
  DOMAIN (58)...(247): Protein export membrane protein
  misc_feature (1)..(254): Xaa is any amino acid
MVHYVDPQSRDIDIAEVRGALAGLTQGFSVQNIGSPQERHFMIRVEDKDDGRIRSDQVTGLLENHFGKGEVATLRSDYVGSRFSKDLTDQAGILLGLTLLLILIYATIRFKPQYAVGAVLAIIHDTIVIVAFVVWSRMEFTTSTIAAILTIIGYSINNTIVIFDRIRENNRIYPDSPFVDVLNISLTGVLGRSIITTFTTMLAVLALFIFTTGSMKDFALALLVGLVSGVYTSLYVATGFVYFWEYLKNKRKKA

SEQ ID NO: 70759 - DNA, 876 bp, Unknown
  Obtained from environmental sample
  misc_feature (1)..(876): n is a, c, g, or t
atgaaggtaatccgctcaaaagttttaggattctgcatgggtgtgcgccgcgcggtggcgatggccgccgatgaagcggcgcgggttaaaggttcaggttcccgcgttcttactcttggtcccttaatacataatcccgaagttttggacgatttgaaactccgcggagtagaagaaatatccgggcaggaagaaaacgttaaaggctgttccgttattatccgcgctcacggagtatctcccgcgcttgaaaccgccctgcgggataacggcgcgcatattatagacgctacctgtccgcgggttaaagctagccagttaaaagccgaagaacttgcgcgcgccggatacagtctcttccttgccggcgaaaccagccacgccgaaattgagggaatcctgggttatgtgcaatccagcaacggccctttctgcgtggtagtggacaacgccgccgacgccggaaaagaggcaaaaaaactttacaaaataaatcacgatacaaagaccgcccttttggctcaaagcaccatttccgaggaattgtacagcgcaatcggaaacgccatcggaatgtttttccccaatctggaaataatacaaacaatctgcgtttccacaaaagagcgccagcaggcaatacgtgatttgcttgataaagtagacgccgtaattatcgccggcggaaaaaagtcagctaacacaaaccgcctgtttgagattgcgcaaaagagcggaaaaccgtgcgtattaattgaaaaagcaagcgagataccgccggaattccgctcttacaagacggtgggattaagcgcgggggcttctacgccggattctgttgtggatgagattgagcgggaattgaagcggaaataa

SEQ ID NO: 70760 - protein, 291 aa, Unknown
  Obtained from environmental sample
  SIGNAL (1)...(22)
  DOMAIN (3)...(291): LytB protein
  misc_feature (1)..(291): Xaa is any amino acid
MKVIRSKVLGFCMGVRRAVAMAADEAARVKGSGSRVLTLGPLIHNPEVLDDLKLRGVEEISGQEENVKGCSVIIRAHGVSPALETALRDNGAHIIDATCPRVKASQLKAEELARAGYSLFLAGETSHAEIEGILGYVQSSNGPFCVVVDNAADAGKEAKKLYKINHDTKTALLAQSTISEELYSAIGNAIGMFFPNLEIIQTICVSTKERQQAIRDLLDKVDAVIIAGGKKSANTNRLFEIAQKSGKPCVLIEKASEIPPEFRSYKTVGLSAGASTPDSVVDEIERELKRK

SEQ ID NO: 70761 - DNA, 972 bp, Unknown
  Obtained from environmental sample
  misc_feature (1)..(972): n is a, c, g, or t
ttgaataatatggggaacaacaatatagaatgtaataaaatatcaataaacgcagaaaacgctgaatttcagattatacagtctttaaagcaaaacaggataaaacgcaataaattgaatgaaatttttattgagggtatagaatgtattaaaaaggctgtagaatcaaaaattgatattaccagaataattattaagaatatatataacctgtcagaatggggtaaaaatacaataaaacaaaataaagatgcgaaaattatcgaaatgtccgataaattatataataaattatgtgataaaattaacccttccgagatgttgataacggcaaaaattaagcaaaatacccttaatgacataaataataaaaatccgtttattattgtatttgacaggccgactgattatggaaatctaggttctatgatacgttcggcaaacgcttttaatgcggacggattattcattatcgggcatggagttgatatatatgaggcaaaagtaatcagggcaagcatgggaagcatattttttacaaaaataattactataggatcaatggaaatactatcagagtttattaaatctcaaaagataaaaaataacatggaaataataggcactgattccacaggaaccgtattattaaatgattataaaataaaaaggcctgtaatggtaataataggaaatgaagcaaaaggcatgagcgtaaaactaagggaaatatgcgataaaattataagaataccgatggaaggaaatgtaaattcattaaacctgtcatgcgcggcgtcaataattatgtgggaagtctggaaaaaatatgataaaaggattagctgccaaagccacagcaataatgttggattttctttgcatttccaatacaagaagtgtaaagaaataaaaatatcgtggaaaaatatcaggaaaaatgcagaaagaatttactcaaaaacagtttag

SEQ ID NO: 70762 - protein, 323 aa, Unknown
  Obtained from environmental sample
  DOMAIN (126)...(271): SpoU rRNA Methylase family
  misc_feature (1)..(323): Xaa is any amino acid
MNNMGNNNIECNKISINAENAEFQIIQSLKQNRIKRNKLNEIFIEGIECIKKAVESKIDITRIIIKNIYNLSEWGKNTIKQNKDAKIIEMSDKLYNKLCDKINPSEMLITAKIKQNTLNDINNKNPFIIVFDRPTDYGNLGSMIRSANAFNADGLFIIGHGVDIYEAKVIRASMGSIFFTKIITIGSMEILSEFIKSQKIKNNMEIIGTDSTGTVLLNDYKIKRPVMVIIGNEAKGMSVKLREICDKIIRIPMEGNVNSLNLSCAASIIMWEVWKKYDKRISCQSHSNNVGFSLHFQYKKCKEIKISWKNIRKNAERIYSKTV

SEQ ID NO: 70763 - DNA, 759 bp, Unknown
  Obtained from environmental sample
  misc_feature (1)..(759): n is a, c, g, or t
atggatgtgcgaaaatgccagataattgacgcccattatttcaaggggcgctcactggcaaaagacatgggggaaaaggtacagagcgaacggacttttgaagacatactgatgcgtgaaaatatcgtcagccattatctgcccttgcgctacgcgggggaaggaaccataggccaggaaaaaggtatagatgtctggcttgcccttgaagcatacgagcttgccatttacaagcatttcgacattctggtgctgatagccggcgacggcgactatgtccccttggtacgcaagctgcataccctaggtacccaggtaatgctgatctgctgggatttttcctaccataacgaaaacggggatattgtggagacaaaaacctcccgtcagcttctttccgaggtttattatcctgtgcagatgagccagaaaatcgatcaaaacaacaatgaacacctgaaagacctgttcgtgactgaacggccccaggaatggacattcagtttcggtcagaaagccccgttgtcagctaacgctgccgaaaaacaaccagaagcgccatcggcacaatggggtaccgcaggatctatcgttgcagcccggcccatccctgtacgggatgccacggaatttgactctactatcttcagcgtcagcccaaacggttttgggtttatcaaagacgaggaaagaaacaatatcttctttcactacagcacattgatcaactgcgatttctccgatttaaatccggaatga

SEQ ID NO: 70764 - protein, 252 aa, Unknown
  Obtained from environmental sample
  misc_feature (1)..(252): Xaa is any amino acid
MDVRKCQIIDAHYFKGRSLAKDMGEKVQSERTFEDILMRENIVSHYLPLRYAGEGTIGQEKGIDVWLALEAYELAIYKHFDILVLIAGDGDYVPLVRKLHTLGTQVMLICWDFSYHNENGDIVETKTSRQLLSEVYYPVQMSQKIDQNNNEHLKDLFVTERPQEWTFSFGQKAPLSANAAEKQPEAPSAQWGTAGSIVAARPIPVRDATEFDSTIFSVSPNGFGFIKDEERNNIFFHYSTLINCDFSDLNPE

SEQ ID NO: 70765 - DNA, 1239 bp, Unknown
  Obtained from environmental sample
  misc_feature (1)..(1239): n is a, c, g, or t
atggatgagtattcgttttcatataatacgacagatgataacaatgtctgttttacaaaatgggaagtgggacacaacattaataatgatatctacattaaatataatcaaaagggcgcggatttggcgaaaatttactatcaggtgaacaatgggacaaaaatactatactacaataaaattaaaacttcatcagaagatacaattccatcagaagatataattaatttaaatattgcttccttagatgattccggtgtgcgtaaaggaagaagtgtaagcggcataaatgaatataaagtttttatagaactctataaaaaaggtattatggaaagtaatatttcctttaaaatatggaatgttcccggcatggtttttactgatgacaatcccctgattgaagtaagaacagaggcggatcttatagctatgaaaaacggtttagacaaacaatatgttcttgccaatgacatcgttatttttaatgaatggacgccgattgggacagaagcaaatccctttgagggtaaattctacggcaacgggcatacaattaaaatgttaagaggtattaaccccaatgctgattacgccggtttttttggagttgttaaacacgagggttttcttgatagtacggttatcagagattttaatctgatttatcctgagactggtaatgtccccactacatctacttgttttggcggtattgccggaaaaatagacggaatgggagttacaattcgtaacattataatcggaggaagctattatataaattatattaataatcaatctttgatttttggcggaattgtcgggtatcaggacaataacgcaagaattattaactgcctagtggatgtaaatttttctattaattcctcttctgaaatcgataatttcgattcttttctttttggcggcgcaatcggcaagatgggagcctcaaattatagcgggcttggaccggtagttgaggcggtaaacgtaacatctaatataggaattgatggtataattgctacacaagcagaactaggcggtattatcggacgttccgaaagcggaattttgcgttacttgcatttttctggagacttacaaataaatataccttcaggctatgttagtaatataaatttgggaggaatagccggatcaataaaaaattctaccatagaaaactgttatttcgcttggcggtgtggttgcaagactaaaagggaataa

SEQ ID NO: 70766 - protein, 412 aa, Unknown
  Obtained from environmental sample
  misc_feature (1)..(412): Xaa is any amino acid
MDEYSFSYNTTDDNNVCFTKWEVGHNINNDIYIKYNQKGADLAKIYYQVNNGTKILYYNKIKTSSEDTIPSEDIINLNIASLDDSGVRKGRSVSGINEYKVFIELYKKGIMESNISFKIWNVPGMVFTDDNPLIEVRTEADLIAMKNGLDKQYVLANDIVIFNEWTPIGTEANPFEGKFYGNGHTIKMLRGINPNADYAGFFGVVKHEGFLDSTVIRDFNLIYPETGNVPTTSTCFGGIAGKIDGMGVTIRNIIIGGSYYINYINNQSLIFGGIVGYQDNNARIINCLVDVNFSINSSSEIDNFDSFLFGGAIGKMGASNYSGLGPVVEAVNVTSNIGIDGIIATQAELGGIIGRSESGILRYLHFSGDLQINIPSGYVSNINLGGIAGSIKNSTIENCYFAWRCGCKTKRE

SEQ ID NO: 70767 - DNA, 327 bp, Unknown
  Obtained from environmental sample
  misc_feature (1)..(327): n is a, c, g, or t
atgttgtgtcccacttcccattttgtaaaacagacattgttatcatctgtcgtattatatgaaaacgaatactcatccatttgctcgaattgcgcgttttcaatacctctaacagttacggttattaaactatttacgggcggcagttttttctctttaggcgccccgccgccggattcgcctggaccaccgggttcgccgggaacgccatgttcgccgggaccaccgggttcgcctggaacgccatgttcgcctggaacgccggaagctgatgggtatatagtaacaataaaaaacccgtcctcaaccgtgtattcggtactataa

SEQ ID NO: 70768 - protein, 108 aa, Unknown
  Obtained from environmental sample
  misc_feature (1)..(108): Xaa is any amino acid
MLCPTSHFVKQTLLSSVVLYENEYSSICSNCAFSIPLTVTVIKLFTGGSFFSLGAPPPDSPGPPGSPGTPCSPGPPGSPGTPCSPGTPEADGYIVTIKNPSSTVYSVL

SEQ ID NO: 70769 - DNA, 795 bp, Unknown
  Obtained from environmental sample
  misc_feature (1)..(795): n is a, c, g, or t
atgcgaattgtaaaagccgccatgataggcgacattgtgggaagtcagggactggaaactctcgaagccaaattgcccgcgctgattaacgaacataaaatagattttgttaccgtaaacggcgagaatgccgccgaagggtttggcatgacggaaagcgattttaagcgcatcattgcggcgggcgcgaatgtggttacctccggaaaccatgtttgggaaaaacgcgaattttggagcgtgctggaaaacgaaaaaaatatgcttcgccccgccaattatcccacgggatcggcagcaagttccgacactccgggcgcaggggctgtctgcataaacgaaaaagaaataaaatggattgttataaatcttcaagggcgcgaattgatgaacgctattgattgccctttccgatgttttgatgatcttgtaaaaactcataacggggcggctgatactccgcctgtcattcttgtagatttccatgccgaatccggcaaagaaaaagaatcccttgcctattacattgatggacgcgcggcggtaatagcgggaactcacacgcatattcaaaccgccgatgaacggatactgccaaagggcagcgcgtacattaccgatcttggaatgacgggcaacactgacagcgtaatcggtatggacccgaagatttgtcttgatcgagtccacaagcaaattctgtatcacatggaaacggcggagtccgataaaccgggaaaaattcagggcattatcgcggagattgacgcggacacgggaaaagcaatttcataa

SEQ ID NO: 70770 - protein, 264 aa, Unknown
  Obtained from environmental sample
  misc_feature (1)..(264): Xaa is any amino acid
MRIVKAAMIGDIVGSQGLETLEAKLPALINEHKIDFVTVNGENAAEGFGMTESDFKRIIAAGANVVTSGNHVWEKREFWSVLENEKNMLRPANYPTGSAASSDTPGAGAVCINEKEIKWIVINLQGRELMNAIDCPFRCFDDLVKTHNGAADTPPVILVDFHAESGKEKESLAYYIDGRAAVIAGTHTHIQTADERILPKGSAYITDLGMTGNTDSVIGMDPKICLDRVHKQILYHMETAESDKPGKIQGIIAEIDADTGKAIS

SEQ ID NO: 70771 - DNA, 792 bp, Unknown
  Obtained from environmental sample
  misc_feature (1)..(792): n is a, c, g, or t
gtggcaagacgaaaagcggtaagtaactcaaaaggtaaacattcccgaacaatagtcattttttggcttgtctttatggttgtcatcatctgcgttttcatggcaaacgcctctaccatcaataaaaattttaatctttttaaaacacgcatgacagtctcgcccgtatccgaaggagaaataaatgcggaagaagaccctgccgttacggttgtagtagagccggctccaaaacccgtggttaccgttgaaacaaaaccgcagccccctgaaccggcgaaacccgctcagcccgaaaagaaacctgagcctgaaaaaaagccgcccgctccaaaagaaaaggaaaaagaaaagcagacgccgccgccggtgcagacaagagacagggcgatttattttgcaaatgtcggcagtgacggacagattctccattccaaggtaacgcgtaagattcccgtttcggattcgccgatgcaggatactttgaatattctgcttatcggacctacgtcggcagaattaggccggggactgctcaaccttatccccaaaaacacaaggatactttccgcgacagttcggggcaataccgcctacatcagtttcagcgaagattttttgtttaatactttcggcgttgaaggttacgtcgcccagttacggcagattgtttggacagtaaccgaatttcaaaatgtaaaagacgtgcagattttagttgaaggcagaagaatggattatctcggcgagggcatttggattggaagcccaatcagccgccagtctttctaa

SEQ ID NO: 70772 - protein, 263 aa, Unknown
  Obtained from environmental sample
  misc_feature (1)..(263): Xaa is any amino acid
MARRKAVSNSKGKHSRTIVIFWLVFMVVIICVFMANASTINKNFNLFKTRMTVSPVSEGEINAEEDPAVTVVVEPAPKPVVTVETKPQPPEPAKPAQPEKKPEPEKKPPAPKEKEKEKQTPPPVQTRDRAIYFANVGSDGQILHSKVTRKIPVSDSPMQDTLNILLIGPTSAELGRGLLNLIPKNTRILSATVRGNTAYISFSEDFLFNTFGVEGYVAQLRQIVWTVTEFQNVKDVQILVEGRRMDYLGEGIWIGSPISRQSF

SEQ ID NO: 70773 - DNA, 1104 bp, Unknown
  Obtained from environmental sample
  misc_feature (1)..(1104): n is a, c, g, or t
ttgatgaaaatagaagtttattctcccaccataagacgcaaggaaatggacgcggtgttaaccgcaatggtggaagaaaaaatcggagtcggggagcggaaccggcttttaatacaaacaagcaaagaacaaataaaatttgaatacgcccttgctttgcgcagtcccgcggtagcgctttatcttgcgcttaaggcgttgaatgttaaagcgggacaggcggttgtcatttccgcgctttcgccgcgctactattatcaggtaatcgaagatttgcagttaacgcccatttattgcgacgtgtcttttgattttccctgcatgagccgcgaaactgttgaaaacgccgtctcccagaagccgtccgaagttgaagtctgcgccgttgttttgcaccatactcttggcttccggccggattccaagtctatcgcggaattgggttttccggtaatcgaagatatttcccaaagttacgggaaaataattaaaaaagcggacacggacactgacggcaaagaaactcctgacgctaattcttccagggataaagataaagaagagccgcaaataaatacaaacgggattttttgcatattggggcttgaggagagggatatgcttacgtcgggcggaggggctttgttattcgcgatgaataggaaagacgccgccgaactgcggaactttgcaggtattgcgaatgaatactgcctgcccgacattaacgccgcgcttgccgttgtccagttcaaggaaatacagcggaatcttcagaagaggagcgaaatagcgaatgtttatactcaggcaagcctgcgcacaaggcacaagcgttttatacctcttgccgaagacgattacaacaattattcattctcccttgttctggaaacagggcttaaagacgtaattgcttacgcgagaaaaaaagatattatagtagagagcgcttttgacaacacgcttgcggcgtcggggctttgcggaaattgtcccgtcggcagttcattgtccctgcggacggttctgttcccgctgtatccgcgtttgcgctcatcagaagcggagcgcgtgtcgcgcctgattatgacgctgccgtaa

SEQ ID NO: 70774 - protein, 367 aa, Unknown
  Obtained from environmental sample
  DOMAIN (9)...(364): DegT/DnrJ/EryC1/StrS aminotransferase family
  misc_feature (1)..(367): Xaa is any amino acid
MMKIEVYSPTIRRKEMDAVLTAMVEEKIGVGERNRLLIQTSKEQIKFEYALALRSPAVALYLALKALNVKAGQAVVISALSPRYYYQVIEDLQLTPIYCDVSFDFPCMSRETVENAVSQKPSEVEVCAVVLHHTLGFRPDSKSIAELGFPVIEDISQSYGKIIKKADTDTDGKETPDANSSRDKDKEEPQINTNGIFCILGLEERDMLTSGGGALLFAMNRKDAAELRNFAGIANEYCLPDINAALAVVQFKEIQRNLQKRSEIANVYTQASLRTRHKRFIPLAEDDYNNYSFSLVLETGLKDVIAYARKKDIIVESAFDNTLAASGLCGNCPVGSSLSLRTVLFPLYPRLRSSEAERVSRLIMTLP

SEQ ID NO: 70775 - DNA, 900 bp, Unknown
  Obtained from environmental sample
  misc_feature (1)..(900): n is a, c, g, or t
atgagaaaaaaggcagttttgtttgttaatactcataaaaacaacgcacaaagcgcggcagggcagattcaggcggagttggaaaaacgaggcttttctgtagttgtttactcatttgangggaagcctgaaagaccgcctgaaggcgtttgggacatcgctttctcgctggggagggacggcactgttctttatacgtcgcgctgtcttgcgcctcttggagtgccgattctgcctgtaaacatgggctcgttgggttttatcgcggaagttgacagggacgactggctttccacttacgaaaaatgggaaaagggcgaaatatccgtatctaaacgctgtatgctggaaatttttgtggagcgcggcggcgaaatcattatgaagaatatctgccttaacgacgctgtaatttccgcctcggggattgccaaacttattaatcttgacgtgtgtattaacaggggagacggctccgactgcgcaacaaacgtcgctttaggttcataccgctgtgacgggcttattgtcgcgacccccacaggctctaccgcatactcaatggcggcgggaggacccatccttgatccggaaatggaagcggtaattattaaccctatctgtccgtttgctttatccaaccggccttttgtgcttccttcacgtctgccttttgttataactgtgcctgaacaacagcgttcaggcgtactgttgaccatagacggacaggatacctgtgatcttaaaagcgcggataaaattttcattcaacaggccgtaaaacccgcgcagcttatttttgcggacaggcacgcttattattccgcgctaaggtctaaacttttctggtccggaaatcccttaaacaaaactccctcggagaaaggcgatgcttga

SEQ ID NO: 70776 - protein, 299 aa, Unknown
  Obtained from environmental sample
  DOMAIN (4)...(269): ATP-NAD kinase
  misc_feature (1)..(299): Xaa is any amino acid
MRKKAVLFVNTHKNNAQSAAGQIQAELEKRGFSVVVYSFXGKPERPPEGVWDIAFSLGRDGTVLYTSRCLAPLGVPILPVNMGSLGFIAEVDRDDWLSTYEKWEKGEISVSKRCMLEIFVERGGEIIMKNICLNDAVISASGIAKLINLDVCINRGDGSDCATNVALGSYRCDGLIVATPTGSTAYSMAAGGPILDPEMEAVIINPICPFALSNRPFVLPSRLPFVITVPEQQRSGVLLTIDGQDTCDLKSADKIFIQQAVKPAQLIFADRHAYYSALRSKLFWSGNPLNKTPSEKGDA

SEQ ID NO: 70777 - DNA, 1740 bp, Unknown
  Obtained from environmental sample
  misc_feature (1)..(1740): n is a, c, g, or t
atgcttgaagagctttccatcagaaattacgcgttgattgattccattactctttctttccgccccggatttaacgttctttcgggagagacgggcgcgggaaaatcaataattgtcggctctttaagttttttattgggcgggaaggctgaaacggacgttatacgcacaggctgcgacgaagcgagcgtgtcggccgttatttccgtcaaaaaaaataacgccgaagttacggactggcttaaagggcgcgacattgaatgtgatgaagatactgttatcgtaagaagaaatattaaagcgtcgggaagaggttccgcctatattcagaatgttccggtaacaagacaggacttggccgaatttacggcgttcttgtttgatcttcacggacagcataaccatgaatcacttttgaaaaaagaaaaccaccgccgctaccttgatagatttgccggtattgaagacgaggttcttgccttttacaaggtgtttctggaattgacggacaagcgcaaatctttggaagcgtctttgaaaagcgatcgcgaaagggaagaaaggctggaaatcctgaactatgccgtggatgagattaccaaagccgcaatccatgccggggaaatccgcgagcttgaaaacgaactgcaaaaactttcggattttgaaaaacttgccgggcttatcaaatccgcttcaggtaatttttttgacggagagatgtcggtgttaagccttgcacgcaaaactaagaattccgtagacggcgcaagcgcggttgattcatcgttaagtgaaatttacagaaggctggaaaatctttattacgaagccgaggatatcgccggcgattttcgcgcttacagggacaatttaacctttgatccgcgccggctggaggaagtaaacgagcgtctcgccctgctttataaactgaaaaaaaagtacgttaaaacggaaacgcaggcctcggtcgagaccggcggggaagaagacgcgatcctgtcttacatgagcgcggcccaggcggaaattgaggcgctttgcggcgcggaagaaaacagggaaaaacttaagaacgaaatttccgtgttggaaaaggacattaaagcaaaggctcaaagtttacgccaaaagagaaccggagcggcggaaaaactcggggctttgatcacgggaatccttaaaaatctgggaatgcctaacgcgggttttcaggtaaaaattattccaaaacagcaggacgggcagacttccatcggcccgtggggagccgaagacgtggaatttctcatttccgcaaacacaggcgagccgctcaaagatcttgcccgtatcgcgtcgggaggggagctttcccgcgtgatgctcgcgataaagacggcgcttttgtccgaagaaaagaatgaagctgaaggagtggaaacgcttgtttttgatgagattgacacgggaattgggggggaagtcgcgttgaaagtaggggaatacctgactaaaatcggcaaatttaagcaaattttttgtgttacacatcttgccagtattgccgtaagagccgataatcattttaaggtggaaaaaagaactgaaggcggcagaacttatacgggaatagggcctttgaatgcggacggacgcaggaaagagattgcgagaatgttagccggagacgcgggagacgccgcgcttgcccacgcggacgatcttatgaaaaaatacggaaaacggagcggttaa

SEQ ID NO: 70778 - protein, 579 aa, Unknown
  Obtained from environmental sample
  DOMAIN (1)...(535): RecF/RecN/SMC N terminal domain
  misc_feature (1)..(579): Xaa is any amino acid
MLEELSIRNYALIDSITLSFRPGFNVLSGETGAGKSIIVGSLSFLLGGKAETDVIRTGCDEASVSAVISVKKNNAEVTDWLKGRDIECDEDTVIVRRNIKASGRGSAYIQNVPVTRQDLAEFTAFLFDLHGQHNHESLLKKENHRRYLDRFAGIEDEVLAFYKVFLELTDKRKSLEASLKSDREREERLEILNYAVDEITKAAIHAGEIRELENELQKLSDFEKLAGLIKSASGNFFDGEMSVLSLARKTKNSVDGASAVDSSLSEIYRRLENLYYEAEDIAGDFRAYRDNLTFDPRRLEEVNERLALLYKLKKKYVKTETQASVETGGEEDAILSYMSAAQAEIEALCGAEENREKLKNEISVLEKDIKAKAQSLRQKRTGAAEKLGALITGILKNLGMPNAGFQVKIIPKQQDGQTSIGPWGAEDVEFLISANTGEPLKDLARIASGGELSRVMLAIKTALLSEEKNEAEGVETLVFDEIDTGIGGEVALKVGEYLTKIGKFKQIFCVTHLASIAVRADNHFKVEKRTEGGRTYTGIGPLNADGRRKEIARMLAGDAGDAALAHADDLMKKYGKRSG

SEQ ID NO: 70779 - DNA, 813 bp, Unknown
  Obtained from environmental sample
  misc_feature (1)..(813): n is a, c, g, or t
atggcaaaagttagcgaccatgatcggcaattatacgatgagaaagtcaaatcatatataacaatgaccaaagcgttattggatatagaaaaaaaactcctgttagaaaccaaaaaagacacgccagaagccgcccttcaaaagctgactcttgccgatgaaatgctcaaccttacttccaattatatcgcggttaacggaatatcgcaggttgtcttaaaatcaaaaaacgaggaagtcctgaacgacgcaagaaaatcgctttataaatccgtaatttatcttgaggatgccgtcagcaattacattgacgttcctttttccgattatgaaaacaaattaaatatgctggaatcttttgacgagaaccagcgttactttttaataagaaagatggggcttgccatagaccttttggaatacgcgtacggggacaattcaaaatggagatggacatttgtagaaatggaagggcgtttcgccaccgtcgcgaaaaacatattggaccttcgcaaggtcattgaatactcaacttttgaatctccttattatgattccgtgacttatcacttaaggttaataaaaagactgctggcgcagtccgccgaccgttaccgtgaaaaatacgagttgagtacggggcagatacccgattttaagaccggtatttcatatttaggcgcgttaagaagactgcacattcttcttgccgagagcgaagacgctgaaaacataaagaaaaaaatggcaatctggaaaactaaattagaggcagaccataagaagcaggaagatgccaaaaaaagagcatga

SEQ ID NO: 70780 - protein, 270 aa, Unknown
  Obtained from environmental sample
  misc_feature (1)..(270): Xaa is any amino acid
MAKVSDHDRQLYDEKVKSYITMTKALLDIEKKLLLETKKDTPEAALQKLTLADEMLNLTSNYIAVNGISQVVLKSKNEEVLNDARKSLYKSVIYLEDAVSNYIDVPFSDYENKLNMLESFDENQRYFLIRKMGLAIDLLEYAYGDNSKWRWTFVEMEGRFATVAKNILDLRKVIEYSTFESPYYDSVTYHLRLIKRLLAQSADRYREKYELSTGQIPDFKTGISYLGALRRLHILLAESEDAENIKKKMAIWKTKLEADHKKQEDAKKRA

SEQ ID NO: 70781 - DNA, 912 bp, Unknown
  Obtained from environmental sample
  misc_feature (1)..(912): n is a, c, g, or t
atgagccggccttccgtatccttaaaagaatataaagcccttattccctatgtctcgcgttaccgtattcaatatgttttcggcgttgtctgccttattatcgtggacggcgcccagatagccattccgcagtttatccgcaaggcggtagacctcatttcaagcggcaattatcaatggcggcaaataatcatgctttccatttacatgacgggcgttatggcggtagtggcttgcggccgtttcctgtggcgttattttataagcggctcgtcaaggcggatagaggcgcagttacgcgaaaatctatacggccatttgcagaaactttcatgggatttttaccagaaaaataaaatcggcgacattatggcccgctcaatttccgatcttgaggctgtgcgtatgtccataggcatgggcgttgtcgctctctttgattttatttttatgtccacctcaatattaataattatctttgtgcaggacgccagttccgcgcttttttcaatcattccgcttccccttgtttccgcgctcatcctgcttttcggaaaccttgtcggcaagaaattccgcgcggcgcgcgaagcgtattcaaagttaagcgataacgcgcaggaaacttttgcgggtatccgtgtggtaaaatcgtttgtcaaggaatggtggttcattaaaaaatttgccggttccaacgacgattaccgcaaggcgaacatggaacttgtgcgccttttcggttttttctttccttttattcagtttctttccggctttacggttcttatcatgttagcaataggcggtatgcgcgtgatcaacggtttaatgacgccggggagccttgtgtctatgttcagttatttgaatatgctgatctggccgcttatgggggcgggattcatgtaa

SEQ ID NO: 70782 - protein, 303 aa, Unknown
  Obtained from environmental sample
  DOMAIN (25)...(297): ABC transporter transmembrane region
  misc_feature (1)..(303): Xaa is any amino acid
MSRPSVSLKEYKALIPYVSRYRIQYVFGVVCLIIVDGAQIAIPQFIRKAVDLISSGNYQWRQIIMLSIYMTGVMAVVACGRFLWRYFISGSSRRIEAQLRENLYGHLQKLSWDFYQKNKIGDIMARSISDLEAVRMSIGMGVVALFDFIFMSTSILIIIFVQDASSALFSIIPLPLVSALILLFGNLVGKKFRAAREAYSKLSDNAQETFAGIRVVKSFVKEWWFIKKFAGSNDDYRKANMELVRLFGFFFPFIQFLSGFTVLIMLAIGGMRVINGLMTPGSLVSMFSYLNMLIWPLMGAGFM

SEQ ID NO: 70783 - DNA, 417 bp, Unknown
  Obtained from environmental sample
  misc_feature (1)..(417): n is a, c, g, or t
atgcaatacgtgcatatttttttaatggtaatctgcggtattattctcctctggttcggttattttttgtttttcggaccgccgtcgccgttttatccgagtcttccctggagtaaaaaaagaaaatttaaaggaaatcccggcgaggctaaagtttgccccgtttgtactatgctgatgctgaaaggcgatcgactaaaaacgatagttttccctccaagaaaatcaactgacatagattgtattatgcatattaaaggctgttatagctgtcttaataacggcgtgccaaggcattgtccgatatgtaaagctaaactgaccgttaatgattttcttttggctcgtatgtttaaacgtccgggaagaaaaagccacgttcatgtgcttggctgtaatcgctgcagaaaagtgtaa

SEQ ID NO: 70784 - protein, 138 aa, Unknown
  Obtained from environmental sample
  misc_feature (1)..(138): Xaa is any amino acid
MQYVHIFLMVICGIILLWFGYFLFFGPPSPFYPSLPWSKKRKFKGNPGEAKVCPVCTMLMLKGDRLKTIVFPPRKSTDIDCIMHIKGCYSCLNNGVPRHCPICKAKLTVNDFLLARMFKRPGRKSHVHVLGCNRCRKV

SEQ ID NO: 70785 - DNA, 1374 bp, Unknown
  Obtained from environmental sample
  misc_feature (1)..(1374): n is a, c, g, or t
atgagccatcatcaacccgatccgaataaaagcgttaatttgacgattaacggaatacccgtaacagtccccgaaggaacaagaattcttgaagccgcgaaaaaagcgaatatcaatatccctaccctttgcgaacatcccgaattgtgtaaacgcgctttgtgcagaatctgcgttgttgagtgcgacgggcgcggcaaactaatagcggcttgcgccaatgacgtgtgggaaggcgtgagtatcgttaccaataactcgcgtattcttaacattcgcaaaactatagttgaattaataatggcgaaccacccgcaggaatgtactttctgcgtacgcaatacaaaatgtgaattacaatcgcttacgaaactttataacatcgttaatccgcttttccaaaatgactgcgttgatcatccgccgacaattgaaagcgaaaccattgtccgcaatatggaaaaatgcgtcaaatgcggacgctgcgttgaagcgtgtcaggaagtgcagactatccgcgccattaacacttcacacagaagcaaggagtacgaaatttccactccttacggacaagctctcaaagaatcttcctgcgttttctgcggacagtgcgcttcggtctgccccgtaggagctatttacgagcatgaccaatgcgcggaagtacgcgccgctcttaacgacagcggacgcaaaacaatagcgcaaattcctccctctttcgtgcccgctcttgagaacgctctttctcttgccgcgggaacaattagcatcggaaaaataaactttgcggtaaaacttttaggctttgatcaagtttatgatatgaaaaccgcggaagcatccgcaagcgcggaaataatcggcgaagttaaggcgcgaaaagacagcgcgggaaaattgccgataatctcaggctgcgccgaaggagttggcaattttgtaaaaaacttttatcccgatttagagtctcacttgacagccgaaaaaacagcgcggcggactttcgcgtctgtaatcaaaaacagttacgctaaagaatcgggaatagagttatcgtctattacaacggtttcccttgtaccatgccttgcgcaaaaatacgcagccgacaaaaataaaaccgacttcgcacttaccgccgcggaatttgcgcgaatgatcaatcttgctggaataataattgaaaccctgcctgaggagcaatttgacgctgtcaacatcaaattgcctaagcagaacatttccgtaaaaaaagaaactgtctgcggtttcgcgcaaggacgcaaagtaatggaagctatccgcgaaggtaaatgtaacgccgattgggtggaaatattaagctgtccgggcgggaaatgtaattag

SEQ ID NO: 70786 - protein, 457 aa, Unknown
  Obtained from environmental sample
  DOMAIN (14)...(85): 2Fe-2S iron-sulfur cluster binding domain
  misc_feature (1)..(457): Xaa is any amino acid
MSHHQPDPNKSVNLTINGIPVTVPEGTRILEAAKKANINIPTLCEHPELCKRALCRICVVECDGRGKLIAACANDVWEGVSIVTNNSRILNIRKTIVELIMANHPQECTFCVRNTKCELQSLTKLYNIVNPLFQNDCVDHPPTIESETIVRNMEKCVKCGRCVEACQEVQTIRAINTSHRSKEYEISTPYGQALKESSCVFCGQCASVCPVGAIYEHDQCAEVRAALNDSGRKTIAQIPPSFVPALENALSLAAGTISIGKINFAVKLLGFDQVYDMKTAEASASAEIIGEVKARKDSAGKLPIISGCAEGVGNFVKNFYPDLESHLTAEKTARRTFASVIKNSYAKESGIELSSITTVSLVPCLAQKYAADKNKTDFALTAAEFARMINLAGIIIETLPEEQFDAVNIKLPKQNISVKKETVCGFAQGRKVMEAIREGKCNADWVEILSCPGGKCN

SEQ ID NO: 70787 - DNA, 1248 bp, Unknown
  Obtained from environmental sample
  misc_feature (1)..(1248): n is a, c, g, or t
atgtcaaaattagtaaatatactgacagagggcgcggacagagccgaccccctttctgtttccgaatatgaaaaagcgggcggctttaccgcgctcaagaaagcgatcgcaagctctcccgaagaaataatcgccgaagtaaaaaaggcaaaactccttgggcgcggcggcgcggcgtatccggcgggaagcaagtgggaacatcttttgcacattcccgaaacgcccaaatatattgtctgtaacgccgacgagggcgaaccgggcacttttaaagatcggctcatcatggataaattgcctcttaaattattggaaggaattataatcgccggagtagtctttaaggcgaaagccggatacatttacgttcgcggcgaataccgcaaattgcaaaagaaactccttgcggcgattgagaatgtccgcgccgcaggttaccttggcaaagattttgacattcatgtaatttcgggagcgggcgcttatgtctgcggtgaaaactccgctctccttaattccaccgaaggcaaagttggcagaccgcgtataaaaccgccgcaccttgcggaagtggggctttttcttctgcctactttggtaaacaatgttgaaagttttacaaacattcccgcaatcgtaaacatgggcggcgacgcttatctgaaagccggtcaccccgattccggcggcagtaaacttgtctgtctttcggggcattgcaataacaggggcgtttttgaaataccgcttggcggggtgacattacgcgatattatttttgacactgaaatgggcggcggaatggtcggtccgaaaaagctgaaattttttcacctcggcggtcagagcggttttttcggcggcattgatcaacttgagactgtttacagttacacggatttaaaaaacgcgcggttgtccgttggatcgggagccgttgttgtaatagacgaaagcgtctctatcattgaatatcttaaaggggttactgaattctttattcacgaatcatgcggtaagtgcgtaccctgccgcgagggcaaccgccaaatactgaaaattctgcaaaaactttcagtccccgacggagcggaaaaaggagaccttgaaattctgcggcgtttaatccgcacaatgacagacgccgcgttctgcggattgggacaaaccgccgccgccgcattgaacagcgcgtggaaattgttccccgccgaatttgaagcgaatgtgagggggaaagaatga

SEQ ID NO: 70788 - protein, 415 aa, Unknown
  Obtained from environmental sample
  DOMAIN (27)...(283): Respiratory-chain NADH dehydrogenase 51 Kd subunit
  misc_feature (1)..(415): Xaa is any amino acid
MSKLVNILTEGADRADPLSVSEYEKAGGFTALKKAIASSPEEIIAEVKKAKLLGRGGAAYPAGSKWEHLLHIPETPKYIVCNADEGEPGTFKDRLIMDKLPLKLLEGIIIAGVVFKAKAGYIYVRGEYRKLQKKLLAAIENVRAAGYLGKDFDIHVISGAGAYVCGENSALLNSTEGKVGRPRIKPPHLAEVGLFLLPTLVNNVESFTNIPAIVNMGGDAYLKAGHPDSGGSKLVCLSGHCNNRGVFEIPLGGVTLRDIIFDTEMGGGMVGPKKLKFFHLGGQSGFFGGIDQLETVYSYTDLKNARLSVGSGAVVVIDESVSIIEYLKGVTEFFIHESCGKCVPCREGNRQILKILQKLSVPDGAEKGDLEILRRLIRTMTDAAFCGLGQTAAAALNSAWKLFPAEFEANVRGKE

SEQ ID NO: 70789 - DNA, 507 bp, Unknown
  Obtained from environmental sample
  misc_feature (1)..(507): n is a, c, g, or t
atgcaggaactctcaaaagagcaagtcttaaaaataatggaaaaatatgacaatgatcctcaacagctcattgccgttttacttgatattcaagccgcctcagggaaaaactttgtggaaaaacagtgggcgcagttggcggctgattttttaaaagtccctctttcaaaaattttcgacgttcttactttttacgccatgttcagcacgagtccgcgcggcgagtatgttgtggaaatttgccgcagtacgccttgctttttttcgcgctcggaagaaatcgcgcagtggtttgaaacagcggcgggcgtcaaaatgggcgaaactacggcggacggcaagctttcgcttttttacacaagctgtgtcggcgcgtgcgacattggtcccgtggcgaaaatcggcgacgatgtgttcggcggcttgaacgaggaaaaagttaaatcgctggtaaaattctgccttgaagggaaagcacaggagttaaaagcgctatgtcaaaattag

SEQ ID NO: 70790 - protein, 168 aa, Unknown
  Obtained from environmental sample
  DOMAIN (3)...(155): Respiratory-chain NADH dehydrogenase 24 Kd subunit
  misc_feature (1)..(168): Xaa is any amino acid
MQELSKEQVLKIMEKYDNDPQQLIAVLLDIQAASGKNFVEKQWAQLAADFLKVPLSKIFDVLTFYAMFSTSPRGEYVVEICRSTPCFFSRSEEIAQWFETAAGVKMGETTADGKLSLFYTSCVGACDIGPVAKIGDDVFGGLNEEKVKSLVKFCLEGKAQELKALCQN

SEQ ID NO: 70791 - DNA, 942 bp, Unknown
  Obtained from environmental sample
  misc_feature (1)..(942): n is a, c, g, or t
ttgagccgtatgaggggaaactctcacgtacggttcttaggcgggaaaggcggggcaacccgcccgacccagccaaccgatgacttttgcaaagcccttgaacactattgcacatcacagttgttgtccaatggcaaggctccaaagtggtttctttcaagccaactgtcgttaagcgaggtaatgaccatcatcctgctcttccatctctctaactaccgctactttaagacgtattacctggagtatgtctgcgttcatatgcggagctatttctccacaccggtcagttacaacaggtttgtggaactgatggggtgcgcgttgtttcccctgctcgtatatacgcgtggattcacgcgcgggagatgtacgggtatcagttttatcgactccactgccctgaaagtatgcccatacaggcgtatataccagcataaagtgttcaaaagttatgcggcacggggaaaaagttccaccgggtggttttacggctttaaattgcatctggttatcaacgagctgggagagatatgttccttttgtcttaccccaggcaacattgatgaccggagttttagtgtcatcgacatactgtgccgggaattgaacgggaaactcttcggggatcgaggttatatttcccaagagttgtttgagcgtttgtatcaaaaagacattcagttgatcacccggttgcggaagaatatgaaaaacaagctgatggatatcagagacaaaatactgttgcggaaacgggcggtaatagagtcagtaaatgattttctgaaaaacatttgtcaagtagaacacagccgtcatagaagtattcataattttctggtcaatctattggcggccatatcggcatatagcttcctgccccataagccgtccattcatgacctatgcgataagaaggctttgcctatacttgcttaa

SEQ ID NO: 70792 - protein, 313 aa, Unknown
  Obtained from environmental sample
  DOMAIN (127)...(293): Transposase DDE domain
  misc_feature (1)..(313): Xaa is any amino acid
MSRMRGNSHVRFLGGKGGATRPTQPTDDFCKALEHYCTSQLLSNGKAPKWFLSSQLSLSEVMTIILLFHLSNYRYFKTYYLEYVCVHMRSYFSTPVSYNRFVELMGCALFPLLVYTRGFTRGRCTGISFIDSTALKVCPYRRIYQHKVFKSYAARGKSSTGWFYGFKLHLVINELGEICSFCLTPGNIDDRSFSVIDILCRELNGKLFGDRGYISQELFERLYQKDIQLITRLRKNMKNKLMDIRDKILLRKRAVIESVNDFLKNICQVEHSRHRSIHNFLVNLLAAISAYSFLPHKPSIHDLCDKKALPILA

SEQ ID NO: 70793 - DNA, 777 bp, Unknown
  Obtained from environmental sample
  misc_feature (1)..(777): n is a, c, g, or t
atggatcgcttaagcttccagcgttttttaggactccagctatgcaataaagttcctgacgcaaagacaatatggaatttccgggaagagctaaacaaagcgggagtgctggaaacaatattcgacgagttcgtggaacaattggaggaaaaagggatagtgacgcgcagcgggagcatagtggacgccacatttgtagacgtgccgcggcaacggaatacaaaggaagagaacaaggaaataaaggaaggcaaaacacccgaagaatgggagaaagaagaaaaccggcataagaaggctcaaaaagacgttgaggcgcgctgggcaactaaaaacaaagaagtgcattacgggtataaaaaccatatcaaaatagacaagaagtcaaaaataataacgaaatatagcacgaccagcgctgaagtacatgacagccaggaattgaaaaatctcattgaagaggggaaggacaagaggatatatggtgacagcgcatatactggggaagaggtacaaagctgcataccggaaacgacattgaatcgaatacatgaaaaggggtaccgcaacaatccgttgacgaaaacgcaggaacggaacaacaaagccaaatcgcatatacgctcaagggtagagcatgtatttgccaggatgaaccatttcgggggaatatacataaggacaataggaaaggcgagggcagattttcaaatagggcttttgaatctgacatacaatataacccgatatgtctacctggctggagcaacgtcatag

SEQ ID NO: 70794 - protein, 258 aa, Unknown
  Obtained from environmental sample
  DOMAIN (58)...(247): Transposase DDE domain
  misc_feature (1)..(258): Xaa is any amino acid
MDRLSFQRFLGLQLCNKVPDAKTIWNFREELNKAGVLETIFDEFVEQLEEKGIVTRSGSIVDATFVDVPRQRNTKEENKEIKEGKTPEEWEKEENRHKKAQKDVEARWATKNKEVHYGYKNHIKIDKKSKIITKYSTTSAEVHDSQELKNLIEEGKDKRIYGDSAYTGEEVQSCIPETTLNRIHEKGYRNNPLTKTQERNNKAKSHIRSRVEHVFARMNHFGGIYIRTIGKARADFQIGLLNLTYNITRYVYLAGATS

SEQ ID NO: 70795 - DNA, 1308 bp, Unknown
  Obtained from environmental sample
  misc_feature (1)..(1308): n is a, c, g, or t
atgattcggcttctctgtaaactgggagccgatatcaacgaacattcaggtgacggcacataccctctcattaatgcccacgacacaaaaaatgacgagctttttagactgctgcttgagctaggggcggatgaaagccagtaccaaaagactattgaacaacgcgctaaaaaagaacgggaaaaacacgagcttatcgcgaaacaagaacgacaagaacaagaaagaattgcggaagaaaaaaggcaagaacaaaaacgtatagctaaagcaaaacagaatttactcaaacagcgagaacatatcgcaaaatatcaaaaatgtatttccgctggttatttttatacagtcggcttgaaagcagacggcacggtggtcgccgttggaaataattacttcggccagtgcaataccgaaagttggcgggacgttgtcgcgatttccgctgattaccatacagtgggcttgaaagcggacggcacggtggtcgcggttgggtataataaaaaaggccagtgcaataccggaagctggaatgatattgtagcgattgcctcatgtggttctcatacagtaggcttgaaagcggacggcacggtggtagccgttggggagaatgaatatggccagtgcaacaccgggagttggcgggacattgtcgagattgtcgcaggcaatgctaaaacagtcggcatgaaagcggacggcacggtggtagccgttgggatcaatgaaaaaggccagtgcaacaccgggagctggagggacattgttgcggttgccgctggttttgggcatacagtcggcatgaaagcggacggcacggtggtcgcggttgggtataatgaaaaaggccagtgcaacaccgggagctggagggacattgttgcggttgccgctggttttgggcatacagtaggcctgaaagctgacggcacggttgtcgctgttgggttgaataatgtaggccagtgcaacatcgggagctggcgtgaaattgttgcggttgacactttagaggggcatacaatcggcttgaaagcggacggcacggtggtcgctgttggatataatgaacatggtcagtgcaataccgggagctggcgggatattgggccttttacagaagaaaaacgcattgaggcgcaacgtgcggaacaggagcttatcaaacagcaacgccgtgcagaacaggaacttatcaaacagtctaatgaatgggtatcacagggcttgtgcaaatactgcggcgggcaggttggcggtttattcaagaagaagtgcaaggcttgcgggagggagaattga

SEQ ID NO: 70796 - protein, 435 aa, Unknown
  Obtained from environmental sample
  misc_feature (1)..(435): Xaa is any amino acid
MIRLLCKLGADINEHSGDGTYPLINAHDTKNDELFRLLLELGADESQYQKTIEQRAKKEREKHELIAKQERQEQERIAEEKRQEQKRIAKAKQNLLKQREHIAKYQKCISAGYFYTVGLKADGTVVAVGNNYFGQCNTESWRDVVAISADYHTVGLKADGTVVAVGYNKKGQCNTGSWNDIVAIASCGSHTVGLKADGTVVAVGENEYGQCNTGSWRDIVEIVAGNAKTVGMKADGTVVAVGINEKGQCNTGSWRDIVAVAAGFGHTVGMKADGTVVAVGYNEKGQCNTGSWRDIVAVAAGFGHTVGLKADGTVVAVGLNNVGQCNIGSWREIVAVDTLEGHTIGLKADGTVVAVGYNEHGQCNTGSWRDIGPFTEEKRIEAQRAEQELIKQQRRAEQELIKQSNEWVSQGLCKYCGGQVGGLFKKKCKACGREN

SEQ ID NO: 70797 - DNA, 486 bp, Unknown
  Obtained from environmental sample
  misc_feature (1)..(486): n is a, c, g, or t
gtgccgtccgctttcaagccgattgtatgcccctctaaagtgtcaaccgcaacaatttcacgccagctcccgatgttgcactggcctacattattcaacccaacagcgacaaccgtgccgtcagctttcaggcctactgtatgcccaaaaccagcggcaaccgcaacaatgtccctccagctcccggtgttgcactggcctttttcattatacccaaccgcgaccaccgtgccgtccgctttcatgccgactgtatgcccaaaaccagcggcaaccgcaacaatgtccctccagctcccggtgttgcactggcctttttcattgatcccaacggctaccaccgtgccgtccgctttcatgccgactgttttagcattgcctgcgacaatctcgacaatgtcccgccaactcccggtgttgcactggccatattcattctccccaacggctaccaccgtgccgtccgctttcaagcctactgtatga

SEQ ID NO: 70798 - protein, 161 aa, Unknown
  Obtained from environmental sample
  misc_feature (1)..(161): Xaa is any amino acid
MPSAFKPIVCPSKVSTATISRQLPMLHWPTLFNPTATTVPSAFRPTVCPKPAATATMSLQLPVLHWPFSLYPTATTVPSAFMPTVCPKPAATATMSLQLPVLHWPFSLIPTATTVPSAFMPTVLALPATISTMSRQLPVLHWPYSFSPTATTVPSAFKPTV
